United States Patent Application Publication US 2023/0235365 A1 - sequence listing, part 2

SEQ ID NO: 3276 - protein, 311 aa, unidentified
  source 1..311: note = Related to FCNR01000043.1; note = Eubacteriaceae bacterium CHKCI004
MSKVIKKYDITQCALYKCRSPRILKKRLVIKDEEYKDITAIVKYHGFQIDKKDSTEKRNITAPNKRIKEIQTRMLQLLQKVMRPEWLISGEKGKCYIDNGLKHIHSNYFLTMDIKKFYDNCKREYVFLFFKNRLCMAGDIAGICTDIVTYKKGIPTGCPTSQLLAFYAYENMFTEIYEVAQSHGCMFTLYVDDMTFSSPKAFNVKEMIREIDCILRKYGHKPKYKKVKYYSHGRFVPITGTIVTANHDIKVPNRLQKKVYDDFQELKDLSGKKLSVEQQKKINSLKGRIQAARNIEKNKFPEINRLTQAIG

SEQ ID NO: 3277 - protein, 310 aa, Clostridium sp.
  source 1..310: note = Related to NZ_GL870812.1
MRKETKRYNITQSALYKCRSPKKIKTLLRLEDTEYKKITEIVGYHEFQIDKKDGIEKRDITAPNRRIKQIQSRVLELIQKVERPQWLISGEKGKCYIDNGKAHISSNYFLTIDIKKFYDNCKREYVYQFFKNKLQMSGDIAGICTDIVTFNQGIPTGCPTSQLIAYYAYEQMFDEIYRLAVEHGCIFTLYVDDMTFSSIKAFDVNRLVKEIDFKLRKYGHKPKYKKVKYYSHGKPVPITGAIINAKHEIKVPNSLQQKVFEGFQEVKKLQGQELSGNDQKKLDRLKGQIQASRNIETNKFPEIKRLVNQI

SEQ ID NO: 3278 - protein, 314 aa, unidentified
  source 1..314: note = Related to JAGNZR010000001.1; note = Fusobacteriaceae bacterium
MKNPKYRYEINQCALYKCQSKKKICSLLDISDSEFNTLRDSVKYHCFEIYKKDNSDKRKITAPNQRLKIVQKRLLQLIQYVKRPDWLISGEKGKCYIDNGKAHIMSHYVLTMDIKNFYDNCNREYVFRFFKDKMLMAGDIAGFCTDLVCLEGGIPTGCPTSQLIAFYAYEAMFFELYEVACENKCIFTVYVDDLTFSAENPFNVNLLKREADIRLRKYGHRPKYKKVKYYGKDIPAPITGTILMPDNKLKVPNNLQKKIYDNFQDIKNLCDVEAIDKVDLKKIYTLQGQIQAARSIEPEKYKEIGRISSAKVQR

SEQ ID NO: 3279 - protein, 309 aa, Aminicella lysinilytica
  source 1..309: note = Related to NZ_SNXO01000023.1
MVKKYSIEQSALYKCRSLRRLNTLLFLDTDSKQIADIKKYYSFEINKKDGIAKRKITAPTKKLKTVQKRVLYLLQRIERPNWLISGEKGKSYIDNGKAHIYSNYFLAMDIKSFYDNCNREYVFRFFKDYLQVSGDIAGILTDIVTYDNGIPTGCPTSQLIAYYAYGKMFREISEIAQKYECIFTLYVDDMTFSSQEHFDDNSMKKEIDCTLRKYGHKPKYSKMKYYSHGKDVLITGTVVNRNHELKIPNKLQKKIYDGFQNVKDVDIKEMDCNKKKEIASLRGKLQAAKSIECNKFSDINKIVGNIEKQ

SEQ ID NO: 3280 - protein, 344 aa, unidentified
  source 1..344: note = Related to JAFTWE010000007.1; note = Clostridia bacterium
MRGLMKNKSYPINQCALFKCNSKKRLEHLLTIEQGDLKLVQSIIKYSNFEIDKKNSTEKRKITAPQKTLKQIQRRILYLLQSIEHPEWLISGTKGKSYIDNGKYHCKSSYVLTMDIEKFYDNCTRENVYSFFKNKMCTSSDVAEILTNIVTFNNGIPTGCPTSQIIAFYAYEEMFSNIKKIADKYGCIFSVYVDDLTFSSDKAFDAEKLKRDVDIELRRYKHKPKNKKIKYYSKYEAKPITGTIVTKEHELATPNSLQHKIYTDFQDIKNDCLSSDEELYKKIQVLEGRIQASKNIEIGANKFPEISRLTNRIKENTPIPTQPTVTRKNTNKKAKIRIKNSTQA

SEQ ID NO: 3281 - protein, 336 aa, unidentified
  source 1..336: note = Related to JAFQBX010000034.1; note = Clostridia bacterium
MKAKKYPLNQCALYKCNSKRRLEKTLTIEQGQLKLIDSVIKYSHFEIDKKDSTEKRQITAPKYTLKQIQRRILRLIQFIERPEWVIAGTKEKSYIDNGEFHLKSNYALMVDIKKFYDNCKREYVYRFFRDKMLNSPDVAEILTDIVTYEGGVPTGCPTSQLIAYYAYEDMFANIKRIADNYGCLFSLYVDDMTFSSEKPFNKDVLKREIDIELRRYQHKPKYKKVKYYSKNDPKPITGTIVTKDNTLVAPNKLQEKVYKGFQDIKNLDIDDNSEETIKKIAALQGRIQASRNIEKNKKFPEIERITKQISTEHSGSVPANPPKKSRKRPRKIRIIK

SEQ ID NO: 3282 - protein, 342 aa, unidentified
  source 1..342: note = Related to JAFRQP010000036.1; note = Oscillospiraceae bacterium
MKANKQKYPLDQCALYKCRSRKKLESILAIEQGDLRNIQSAIKYSSFEIDKKDSSEKRTITAPKRTIKAVQARILTLIQRIERPEWLISGEKGKCYIDNGKAHIGSAYVLTMDIKKFYDNCRREYVYRFFLDKMQTAPDVAKILTDIVTYKGGIPTGCPTSQLIAYYAYEDMFKQIQACAESYGCIFTLYVDDMTFSSKDPFPQEKLSREIDIILRRYGHKPKYKKVVFFAKEKPKPITGTIVTSDHELEVPNRLQEKIYNGFQGIKQLSEQNDFKQIDHAAQILLGQVQAAKSIDNKKFPEIERLTKEIRNIQEPQRDFKPKPPHRRKAKGKIHIPKPRTN

SEQ ID NO: 3283 - protein, 344 aa, Flavonifractor plautii
  source 1..344: note = Related to CP095094.1
MKNKVPIKKYDITQCALYKCRTRKRLEYLLRLDPGGLKIIDGIIGYHKFEIDKKHSDEKREITAPDKTLKAIQRRILYLLQRVIRPEWLISGEKQKCYIDNGKAHLNGKYVLTIDIKKFYDNCTREPVYQFFVQKLETSPDVAEILTNIITYNGGIPTGCPTSQIMAFYAYSDMFSEIFDLAKQHGCKFTLYVDDMTFSSKEPFSPHQLSQMIDRVLRKYGHKPKYPKVKYYGPSDYKPITGTVVTPEHSLAVPNGLQKTIYDAFQTVKPLIGVETCSEEDARQILSLKGQIQAACNIEDGKFPEIRRLTNQIKVPDSQSVSTRKRQHHRRSKKIHIKQQAPIK

SEQ ID NO: 3284 - protein, 336 aa, Ruthenibacterium lactatiformans
  source 1..336: note = Related to JAFHCI010000085.1
MKNKTPLKKYDITQCALYKCRTKKRLEYLLRLESGSLKMIDSIIEYHKFETDKKHSTEKRKITAPNKALKTVQKRILYLLQQVLRPDWLISGEKRKCYIDNGKAHLDGRYVLTIDIKKFYDHCTREPVYHFFVQKLKTSPDVAEILTNIITYDGSIPTGCPTSQIMAFYAYFDMFSEVYDIAQKCGCKFTLYVDDMTFSSKEPFSPHQLRQMVDRVLRKYGHRPKYPKVKYYGPSDYKPITGTIVTPRQSLAVPNGLQKTIYNAFQSVKPFIDAESHSEEDVKQILSLKGQIQAARNIEEGKFPEIRRLINQIRIPDNQTASKQKSYARLHSKKSE

SEQ ID NO: 3285 - protein, 327 aa, unidentified
  source 1..327: note = Related to JAFWRN010000131.1; note = Clostridia bacterium
MENPSLKKYDITQCAFYKCRTKKRLAFLLCLSLKELEHISGIIEYHSFEIDKKNSEEKRKITAPSKELKTIQRRILALLQRVIRPDWLISGEKGKCYIDNGKAHINGRYILTMDIRKFYDHCVREAVYQFFIQKMKTTPDVAKLLTDISTYNLGIPTGCPTSQLIAFYAYIDMFSEIAAIAREYGCVFTLYVDDMTFSSSKPIQVNNLIRKIDCILRKFKHKPKYSKIKYHHPSDYKPVTGTVISPNQTLLTPNSLQHKIYIGFIKLKPKLFENNEALSNEEGKELQSLNGRIQAARNIEEGKYPELKRIIHNSQAAIRYNGKRKKI

SEQ ID NO: 3286 - protein, 307 aa, unidentified
  source 1..307: note = Related to DVNI01000021.1; note = Candidatus Avacidaminococcus intestinavium
MQDKFRRYDINQCALYKCKSKKKLEKLLNLQIGELKYINVITTYYHFEIAKSSSHEKRAVSAPSSKLKSIQSRILSLIQYINRPGWLISGEKGKSYINNSQCHISANYLLAMDIKNFYNNCKRNPVYLFFLNELKTSPDVANVLTNIVTYENLIPTGAPTSQLIAFHAYTNMFTEINQMALNFGCIFTLYVDDMTFSSSVPFNHMSLSCNIDKILRKHGHRPKYKKLKYYSKNESKPITGAILTPTHTIKVPNKLRYKIHNTFQKIKNNSNFSDEAKSELLTLKGRLQAAKSIEKNIFPEISRIINS

SEQ ID NO: 3287 - protein, 322 aa, Megamonas rupellensis
  source 1..322: note = Related to QSVE01000001.1
MINKNKLYRYDISQSALYKCRSKNKLSEFLKISIKDVDKIIKYYTFNIPKKDTSKTRQISAPQKKLKTLQKRLLYLIKRIKRPPWLFSGEMGKCYLDNGKYHLNNPYVLTIDIKSFYEHCTRNAVYLFFLEKMQTSPDVAKILTDITTLDKKLPTGTPTSQLIAFHAYEDMFNEINNLAKSYNCIFSLYVDDMTFSSSYPFSPKNLTYKIKTILHKYKHHLSSEKVKYYSKDMAKDITGLILTKDNQIAIPNRLQKKIYDNFSKIKDYEKMTVYDKEIIKSINTLKGQLQAAKNINYNVFPEITRIVYSINCKTNKKPLGNS

SEQ ID NO: 3288 - protein, 303 aa, Clostridium perfringens
  source 1..303: note = Related to CP010994.1
MMMIKKYDICQSPLYKLKNKRRLEKILGLEKYELNKLKFWNKYKSGKIPKDDGDFREINIPNFKLKKVQKKLQILLSKIQRPEWLISGEKNKCYINNAQYHIKSKYVITADIKKFYDNCSRERVYLSLVNKFKVSSDVAGAITDIVTYNKRIPTGASTSQLIAYYSYEDMFNEINTISHKYGCKFSLYVDDMTFSSINPINVQSLKRQIDIILRKYGHRLKSNKFKYYSKDEDKLITGVTLKSNNSLAVSNRLRYNIIKDFKGIKYRKDSNIKLQSLKGRITAAKMIEKSIFPQINNYVSNLN

SEQ ID NO: 3289 - protein, 312 aa, Macrococcus bohemicus
  source 1..312: note = Related to JACEGF010000016.1
MRKQPPKFYNINQSALYKCRSKRKLAELLKCDLKTIQQMAKDIKLYYDSFSMSKKDSEKVRKVDAPNEQLKRTQKNILKLLQRIEKPDYVMSGTLGKSHIDNAQYHIKGSYFLKTDIKQFYNNCSRDRVYRFYVDKMKTSPDVANILTDLTTYNNIIPTGSPSSQIIAYFAYEDMFNNMYIKAKENGFLMSLYVDDLVFSRTDYIDYKSFLREIEVEALKFNHSLKKSKTMYYSPNRSALVTGVIIKNKKMKIPNRLRNNTILQYKNIKKDKNKDEKTELSLIGSINSARMIEPNHFNGVFSFYKQIKKTPK

SEQ ID NO: 3290 - protein, 308 aa, Staphylococcus hominis
  source 1..308: note = Related to JALCVX010000013.1
MKKKKLKFYNINQSLLYKCRSKKKLAQYLHYDLKSLKKIISEIDSHYNFFSKDKKNSDKKREIEAPSDELKKIQKNILKYLKKIQKPNYVMSGTLGKSYIDNAKYHINEKYFLKTDIKQFYKNCSRDRVYRFFLDKMYTSPDVAEILTNLTTYRNTIPTGAPSSQLIAYFAYEDMFNNMYRKAKNNGFKMSLYVDDLVFSRNDYIDFKSFLREIEIEALKYNHSLKKSKTMYYSPKKAALVTGVIINKGELKIPNRLRNNAVHQYRDIKNNFIDDKVLLSFIGNINSARLIEPNHFNGLLSFYKKTPK

SEQ ID NO: 3291 - protein, 310 aa, Enterococcus sp.
  source 1..310: note = Related to NZ_CACSLH010000030.1
MPRKKTNVNLYELNQCVFYKCYSKKKLAEILKITLRELKNTSWNANTSYYQFSQKKKGTDELRKITAPDKELKKVQSTIYSFLRRIKKPEWVISSTLKKSYLSNALYHKKSNYFYKTDIKKFYDNCHRDRVYRFFKDKMKTSSDVAKILTDLTTNENIPTGCPSSQLIAYFAYEDMFNNIKIIADKYKCIMTLYVDDIVFSNADKFNYRALIREVENEVRHFDHSLKKSKTKYYTGEKGAPITGVIVKNNLLYVPNSNRKSILDSFSLAKGINKISEKEFKSLRGKVNAARLIEKNHFNGINSYLKKNNP

SEQ ID NO: 3292 - protein, 307 aa, Staphylococcus chromogenes
  source 1..307: note = Related to PZAM01000037.1
MNTLTNWRKNDLKQFKKYPIHQCAFYKCKSKKKLASLLKTDLKNLNRLSKSIEQEYYTFNKKRQITAPKKELKAIQKRVLNLLNKIEKPDWVISSTKEKSYLDNAHYHIGAQYVCTTDIRSFYNNCSRDRVYQFFAKKLMTSPDVAKLLSDITTLKYIPTGSPSSQILAYFAYEEMFINMFNISQKFNCKMTLYVDDLTFSKDSSFNYQNLINHIDIEARKFNHSLKYKKTNYKSVKKGAKITGVILKNYELKIPNSLRISILKDFENIKNNQELKHQVMSLKGKINAARLIEPNHFNGTNSYVKSL

SEQ ID NO: 3293 - protein, 306 aa, Leptospira kmetyi
  source 1..306: note = Related to AHMP02000001.1
MKHQKYHSIKNSPFFRLKSIDKLAEYLNTKSKRLIYLENMPLTERYRCFPQGTRDIQQPIGFNRFIHNRLHTLLSRILSPDFVFSGKKGFSHVDNALAHLNSKYAALMDIEGFYRNSKREYVFRFFLKKLEMASDIANILTNIVCFNDFIPTGSPLSQLIAYWAYSDMFEEIETVASSNNFIFSLFVDDLTFSSQDRIRHDFHLEINAILKSYRLNIKRKKLQYRSKNQTKIITGCAITPDNKIKVRNKHRVKYINNLQLLLGSHQNRKDEKLIDSALGLISSLQAIEPQIFMESKRILKQKISFS

SEQ ID NO: 3294 - protein, 304 aa, Breznakiella homolactica
  source 1..304: note = Related to NZ_CP067089.2
MRKVNKIYDITFSPLYGIKNKRKLRELLDIGTNEELIHLPLTNSYRIFSINGREIQEPIGLLRKIHDRLFRYLSRIDTPTYLYSGKRGLSYVDNAKRHINSSYFLKMDIKGFYKNANREYVFRFYRYRLNQSDDIAHILANISCYGKIIPTGSPISQLIAYWSYKQMFDEIAILNKDKIFTLYVDDLTISSVELSLAKNLHLQVQAIVKKYRLDLKRKKIRYYNKRENKHITGCVITSDHKFRVPNKHRKKLISIMRKYPSLNTIPEGELMKLTGLISSSQQIEPDIFINTKKRLSQIIKKQLA

SEQ ID NO: 3295 - protein, 309 aa, Leptospira mayottensis
  source 1..309: note = Related to CP030147.1
MHTVHGNFFYTLSNKKRLAKYLRVSLKELLTLQDDSNYKVWFEEGENGKLREIQEPSYKLKSVHSIIQKSLASIVAPEFLFSGVKGKSNISNASYHKDSNYIVTADIRSFYINCNKEYIFRFFKYTLHTSDDIARILTELCCYKTFLPTGSPVSQILAYHSYARIFNRIDAFSKANGITFSLYVDDITLSSEKSIHPYILKKISKLLESVNLSLKREKTKFYSKNSYKIVTGCAISPDHILLRPNKIMRKINNKLCKHEKDLSKLTSKEIESVLGQVIYLRSITPNSYSQLFKSLSLMKAEEKIKQRPL

SEQ ID NO: 3296 - protein, 308 aa, unidentified
  source 1..308: note = Related to JAFZUQ010000009.1; note = Elusimicrobiaceae bacterium
MKTLKYPINKSSLYNLQNKKKLKQLLYIDNSEFNYFAKQVNIDNEYHPFVNKKGRGIDNPSKRLKKLHSRIQKLLSRITYPKYLYSAAKRSNIKNVLKHKNHKYMFKTDINKFFPSSKKEYIFRAFKYNFQMSEDIAWYLANLVCYNDHLATGSPVSTILSFWGYKGVFDSIYALAKRRGITMSLFVDDMAFSSNKYIPISFKSKIEKYLKNVDLILSLKPSKNIFYKSNEEKKLTGAIITTDKKLKILPETELTIKDLLNNIENLNHQKLKSLLGMLQYQKQVEKNNPNITEHISLVKAKIKNLISK

SEQ ID NO: 3297 - protein, 300 aa, Denitrovibrio sp.
  source 1..300: note = Related to PKTM01000012.1
MSNKQYNIHQSPLYKLNSKSKLSSILHIDNLANLLRDGHYNRFEMNGRQIESPCKELKRVHKRVLKLLSRINTPDYLISGKKGLSYVDNAKVHTRRCNLVKMDIKKFYPSSKKEYVFRLFHYKFRMAEDVAWILTELLTCDGHIPTGSPVSQILAFMIFADTFEEINNLAITHGCCFTLYVDDITISSTGNIPRKLIYAIRNELKKVNLNLSGKKTRFYSLNKTKCVTGCVITPDGELRIPNKLHQKIHEKSTMLNKEGLSPHDHQVLFGLLNAAQQIQKSTFPSLYREAKRNFKISVAQ

SEQ ID NO: 3298 - protein, 303 aa, unidentified
  source 1..303: note = Related to NVWR01000002.1; note = Rhodobiaceae bacterium
MKNYSLEKSPLFGIPSKAKLADLLNVGRSDLLAMSRNPTYSFFKIRKGEKFRDIEDPNPDLKKLQKRLNRLLSRIQVPEYVKSSRKGISYVDNAKFHLGFNCTAKFDIDKFFRSTKREYVFRCFHYTFGMPGDLAWLLTDLVTLDGHLPTGAPTSPLLAYWAYADVFSRMHSLAESRGAVMSLYVDDVAVSGNQPLKSEFRDKLSSIAGDYELKLKKDKTHYYLEGETRLITGCALNTVGQAIVPNKLRRKISIMIQQRDISDMTEKEIRRLYGLLNSARQIEPDFSPGLFGRAKSRIETLPV

SEQ ID NO: 3299 - protein, 329 aa, unidentified
  source 1..329: note = Related to DVNC01000014.1; note = Candidatus Scatocola faecipullorum
MSQMKIYPLENSPLYQLCNKSKLEELLGLPKGYINNFTYSRENYHCWHQLKKNKIDTRPVEDPCGILKKAQSKLNKLLSRIYTTDYLMSGKKHSNYIKNAKYHQNNPYVFCFDLSAFFQTATRHYVFSAFKNEFLMSEDVAWMLTDLVTIPNIENTDGYIPTGSPSSQNVIYWAYKKAFDTLFRVAESKKLKFSLYVDDMTFSSSRPISNKFPQLIQKLCSKVGLKINSKKTRYFSKNDFKDITGNVISPKKELKVPNRRRKEILDILAFKNIKDMNVKEIRSFYGKLCSMRQIEPNIFPALYNEARSQYYKLGAQYNQSKQFMKGRRK

SEQ ID NO: 3300 - protein, 329 aa, unidentified
  source 1..329: note = Related to BK021518.1; note = Myoviridae sp.
MKQIKTYPINNSPLYRLSNKSKLAELLGVSKKYLEHFNYSRDNYKCWKQKKKNKKGARPVEDPTLILKKAQSKLNKLLSRVITTDYLMSGKKHSCYINNAQYHLNNPYVFCFDLHTFFQTASRKYIFKAFKNEFQMPAHIAWLITDLVTIPKLDNSDGYIPTGSPSSQNVIYWAYKKTFDKLLEIAEAKALTFSLYVDDMTFSSQRPISATFPKLIQKMCARVGLEINETKTQYFSAKDYKDVTGCIISPKNELKVPNRRRNELINIVKNKPIEEMDIPEIRSLYGKLNSMRQVEPNIFPQLYNQARKRYYELGAQYNTKSKQKIRKKK

SEQ ID NO: 3301 - protein, 328 aa, unidentified
  source 1..328: note = Related to JACFNN010000015.1; note = Alphaproteobacteria bacterium
MLTIEQSWFYRLGRKRDLAALLNLSLSELKALTNDKNFEPWEKTFPDGKKRLIEEPQPQLKKALTEVQKILSHIQTPPWLMSGKKKIQPRDNAIAHIKNAYMISVDIAKFYQNSKREFVYTLFRDDFKQTTDIASLLADLVTYNGHIPTGAPSSQLLAFWTYRKTLEKIHAEASRQHITMTVWVDDITFSSRKPLPKNWLTFVKRSLDKTDLHLKKEKIKFHGQKDHKITTGSAISPKGVLKVKNQKRLEILSLIKSKKIEQLTLKEARSLLGKLTAQRQNEPDFFSSTYIRCKKHLRNLEKMKQKESYHKKPKRIKSLKQKPAAQSR

SEQ ID NO: 3302 - protein, 343 aa, Enterocloster citroniae
  source 1..343: note = Related to SVDP01000050.1
MSKCYPIESSPLYRLRNRRRLAKLLYLPKNYFQEEHTYCYNEFSRPKPNGDGKRHFTVPPDDLKDIQKHICILLKRIITPEWVMSGKKSCSYITNAEIHLKHRFVRTMDISKFYDSAQRSRIYNMFSQTFKMASDIAWIMTELVTYNGMLPTGSPSSQLVVYWTYFNMFQRINELSEKYDCRFSLYVDDMTFSSDFPIKRQLRDEVSVVLRKNGLLAKSKKDHYYQANDFKVITGVGIRQGKKIVPNNKRKQIIELYVQCKKSGNIYDIEKLNGILCSLRQIEPNIFPEIYGYVHCYEKELKKLSRDRFYRTKRKKKPYRTKQMYNVVNNMNLVEQRKEGKQC

SEQ ID NO: 3303 - protein, 336 aa, unidentified
  source 1..336: note = Related to BLMC01000012.1; note = Lachnospiraceae bacterium
MNKCYPIENSPLYRLRNRRRLAEFLNLPKNYFKEEHTYCYNEFSRPKPNGDGERHFTVPPEDLKDIQKHICKLFKRIITPEWVISGKKSCSYITNAEVHLKHRFVKTMDISKFYDSAQRSRIYQMFSQTFNMASDIAWIMTELVTYNGKLPTGSPSSQLIIYWTYCGMFQRINELAEEYNCYFSLYVDDMTFSSDFPIKAILRDGVSDVLRKNGLLAKSKKDHYYQVNDFKVVTGVGIKQGKKLVLNSKRKQIIELYAKCKKSSNIYQIEKLNGTLCSLRQIEPDIFPEIYRYVHSYEQELKKLSRDRFYRSKREKGRYLSKHIHNVGINTEQGFD

SEQ ID NO: 3304 - protein, 337 aa, unidentified
  source 1..337: note = Related to RZYS01000049.1; note = Clostridia bacterium
MMSSKCYLLEQSPLFRLRNRRKLATLLKLDEKYFSNERAYTYRSFSRPKPNGIGIRKFTVPSDELKIIQKQICKLLSRIETPEWVMSGKKSCSYITNAKVHLEYPFVKTMDISEFYDSAQRSKIYNMFFNLFQMEHDIAWLMTELVTYNGGLPTGSPSSQLIVYWAYSDMFNEIQLLSTKYNCTFSLYVDDMTFSSDESISGKLREDVSALLRKNNLNAKVKKDHYYQMKDFKMITGVGIYKGNMVVPNSRRKAAISLYSECRKHGNIKDIEKLNGILCSMRQIEPNIFPEIAMYVKHYEKELKEYSRKRFYMARRKAYQKKRNSCSVAVSNEVKIC

SEQ ID NO: 3305 - protein, 331 aa, unidentified
  source 1..331: note = Related to JAFQOE010000034.1; note = Lachnospiraceae bacterium
MSKMYALEQSPLYRMRNKKKLATLLRISTNYLMQEHGQDYYKFSRPKPNGDGTRNFTVPSDELKYAQKKLCRLLSRIQTPDWVISGKKNHSYITNAEKHIENTFVKTMDISKFYDSAERKYVYRMFKETFKMAEDIAWLMTELVMYENMLPTGSPSSQLIVYWAYCDMFNEINQIANERACIFTLYVDDMTFSSKTPITKELRQEVCNQLKKYGLIAKSKKDHYYQGNTVKVITGVGINDGQKVVLNNKRKRILEQFEKCKTSNKIYDIEKLNGMLCALRQIEPEIFPEIYNYIKHYDSELKLMARNRFFKHRRKRRKIEKQRQYINQNNI

SEQ ID NO: 3306 - protein, 325 aa, Merdimonas faecis
  source 1..325: note = Related to NZ_MIEH01000001.1
MSKLYPIERSPLYKMCNRRTLANLLCLPTKYFSYEHEYQYNEFSKPKPNGNGRRDFTVPSDELKAIQKRICRLLSRIVTPEWVMSGKKHCSYITNAEHHVDKKFVRTMDVSKFYDSVQRNYIFKMFKNTFQMAEDIAWLMTDIVTYKGVLPTGSPSSQLIVYWTYAEMFDAIKRKADENDCDFTLYVDDMTFSADHPISTEFRNEIAIQLKKNGLLAKAQKDHYYQPGSFKVVTGVGIENGEKKVLNNKRQKILFQYEKCKKTCNLYDIEKLNGMLCSMRQIEPDIFPELGNYIKHYEAELKEMARKRFYANKRKKAKVKEKNYA

SEQ ID NO: 3307 - protein, 328 aa, Sellimonas monacensis
  source 1..328: note = Related to JADCKL010000006.1
MSKTYSIEFSPLYRMRNRRKLARVLKLDEKYFKQNHTYKYNHFSEPKPNGTGTRNFTVPEKELKSIQKRICKLMSRIETPEWVISGKKKHSYISNARNHCRNYNVKTMDISQFYDSAKRKYVYSMFKEKFLMADDIAWIMTDLVMCGGTLPTGSPTSQLVVYWSYSDMFENIYEIARKYKCEFTLYVDDMTFSSNIGISKQLRKDVEELLNSYCLHAKAKKDHYYQNNAFKKVTGVGIKKGKLLVPNQKRYEIIGMYKTCLKNKDIIEIEKLRGLLISARQIEPDIFPEIYRFVEKYKDDLNLLARNRYYRNMRKRKKVQRREDVAFV

SEQ ID NO: 3308 - protein, 323 aa, unidentified
  source 1..323: note = Related to JAFNXD010000190.1; note = Lachnospiraceae bacterium
MRKSKTYPLEKSPLFRLRNRRKLALLLGLDVDYFKTAHEYSYKEFEKPKASGDGVRKFAEPKGEICEIQKHILKYLKRIETPEWLKSGKKSESYITNCKMHKDALYIRTMDICHFYDAVSYAQIEKSFCQVFKMAPDIARLMAKLVTNRKTIPTGSPSSQLVVYWVYRDMFDEINSIAATFGCKFSLYVDDMTFSSEKQISHQLRDAVVKKLNEYGLHAKRSKDHYYEAQDYKVVTGCGIKDGKTDVPNKLRYKIVQQYRLCQLTDTIAEIEKLNGMMCSARQMDENIFDSVSNYLCKNRERLKGYVRSRKSKRQYEDNDFEF

SEQ ID NO: 3309 - protein, 309 aa, Clostridium beijerinckii
  source 1..309: note = Related to CP016090.1
MNKDINQYELEDSLLYRLRNRGKLAEMFNLPHNYFRTQYKLDIEYKSKHIQTGRNKKDRLVENPSKKLKNIQREILKYLSRIQTPDWIISGKKGKSYIDNSKFHKDNSYVITSDIMNFYPSCKKDYVYRMFRYTFRMSSDLATILTTLVTYNGGIPTGAPTSQMIAYWAYKDAFIRINEIALKYNAKFSLYVDDMVFSSKSTISKRMILEIKKELQKYNLSLKDNKTRKYGSKDYKLITGVVYDKNGELKIPNRLRKDIIDGYNEIKKKKDNCNETDKKSLLGKIYSARQIEPDAFSQLLHNVKKIECK

SEQ ID NO: 3310 - protein, 307 aa, Pelosinus propionicus
  source 1..307: note = Related to NZ_FOTS01000082.1
MKKIVERHHKKQSFFYCLANKSLLATQFGLPQNFFRSKYKEQLIYSFFEISKKDGSSREINNPKYDLKVLQRKILNYMNRIYKPDWLMSGRKTISYIDNGRKHLGSNYVITIDIKKIYSNCKRNNVYNMFKDVFKMTPDIASIMADLTTFEGAVPTGAPTSQVIAFWTYQDAFEKINEIAQQYDCIFSLYVDDMTFSSLGEIPTQLLLEVDKELKLVGLSIKWKKVKRFGINHCKLITGVVLDEAKQMRIPNALRLSIIQGVKKLSNKELSQEERLRLIKSLKGKINSARNIEPEIFPEIHRKISSI

SEQ ID NO: 3311 - protein, 308 aa, Enorma timonensis
  source 1..308: note = Related to NZ_CAPF01000040.1
MRPSIPLNQCMFYKCRSKKALARCLLLDLHQLQRRSEWIQYRVHAEQKASGGLRVIYAPADELKSVQKVIKSRLHRIEVPSWVYSGVKGRCHIDNAKHHAGSRYFVLSDISSFYENCTRDAVYRFFRDDLLCSPDVASLLADLTTVRNAEGKTVNPTGSPCSQLIAYFSYRSMFHEIASIADRYGCKFSLYVDDLTISSESPISNPRNLMKQVAKSLRAYGHRVKWEKTGYFGKNQFKLVTGVAIDQQGELNIPNHLGEAVITGLKETLSGDRSEIAPTLGRINAARQIDGRVFSEARRLVENAQRCF

SEQ ID NO: 3312 - protein, 306 aa, unidentified
  source 1..306: note = Related to JAFVBW010000499.1; note = Atopobiaceae bacterium
MRPEITIDQCQLYKCRSKKRLAEILYIERADFNDIPTWATYRISHLEKGDGGTRTIYSPSKRLKKVQKRIKRLLERIHKPSWVFSGTKGKCHVDNAMHHAGNTYFVLSDIAEFYESCTRDTVYKFFLNEMKTSPDVAELLADITTLETNGKTIIPTGSPSGQLLAFFSYREMFDELEELTTRHGCRLSLYVDDLTISSNTPIANPKSLQKQLARIMASYGHSIKWSKTRYVKPSEFKVVTGVAIGPDGTPHIPNNLGRAIIGGLQDALGGDCLSQASTLGRINAARQIVEGSFPEVERVLCDYRHL

SEQ ID NO: 3313 - protein, 306 aa, Paratractidigestivibacter faecalis
  source 1..306: note = Related to NZ_QSNG01000001.1
MTHPIDQSRFYKLRSKRKLAEVLCTNPQELKRTLRNASYRISQTPKADGTFRTIYNPNPSLKRVQHRIGNLLSRIEMPPWAFFARKGVCYVDNARYHEGARYLVKSDLSSFYDHCDREHVYRFFKNTMKCSPDIAEALCDLTTYTLQDGSTIIPTGSPSAQIVAFLAYREMFDEIKAVADLYKCKFSLYVDDLTFSSRSGISNPSNLERSISHIARQYGHCIKAEKTVYLDASTSKIITGVALTPSGEPKAPNALREATVSDLTQISSGDLSKIVSCLGRINAAQMIERNLFADSKRQVEQILASA

SEQ ID NO: 3314 - protein, 308 aa, Adlercreutzia hattorii
  source 1..308: note = Related to NZ_AP022829.1
MKKTVRQYPLQRSPIYRLGRRRDLEELLYMQKGDSRRVKCFSEYNIFDKEKSSGGSRTIEAPCSKMKKWQRRVWDLMARIEKPDWVISATKGKSYKDNASKHRSNGYVMTMDISSFYPSCVREYVYRLFRERLECSPDVAQCLTDICTYQGGIPTGSPASQAVAYFAYAKMFEEIEDLARTYGCTFTLYVDDMTFSSQDNFSWKKLAYEVDGVLHKYGHRAKGSKTKYRLPGDFKIVTGVCLAPDGALVAPNKLRSKIVGNTRSLKASGDLSLLSRIQGQIQAADYVEGRRTFPGIRSELERIAEAAL

SEQ ID NO: 3315 - protein, 307 aa, Gordonibacter pamelaeae
  source 1..307: note = Related to FP929047.1
MGANRKKYAIEQCALYNLTTKRRLEEKLLLQSGELKGVMRGVTYRDFQIPKKSGSFRQVSEPNKRLKLVQKRVLWLLSAVEKPDWVMSATPGKCHKDNAVFHRSNAYMVTMDIESFYDKCERERVYQFFKRKLRQPGDVAKALTDLSTYRQSIPTGAPTSQIVAYFAYESMFAEINQVAKSHGCIFTLYVDDMTFSSGEPFSPDKLASEVDAVLRKYGHKSKMSKTRYYPKGTCKLTTGAAISRQLLLVAPNDLRKRVLENYDKLRKTGDKSLVAVILGQIGAAEFIEGRDMFPGIKQAVRAFGNAS

SEQ ID NO: 3316 - protein, 300 aa, Pseudobutyrivibrio sp.
  source 1..300: note = Related to JAGBOE010000222.1
MKRASKKYDLDQCALYKCKSKKKLAELLLIDLRYIKNSKNFIDYHSFELTGKNNKTRLINAPQPILKKIQKRLLALLRPINRPAWVMFGEKGKSYIQNAIVHQYNPYCITMDIKGFYDHCRRDAVYRFCKDKLQVSPDAATIITDFTTWEQRIPTGSPVSQILAYHAYEDMFCKINEYAKSIGAKFTLYVDDITISSKNAIDPKKLASKVRKILHVYGHTISKNKTKYYSKNDFKLITGVIISPNHQLLVPNKLSHKINNELEHLYSIMQESTDVQGAILRLNGLLQAARLIQPNYRSDI

SEQ ID NO: 3317 - protein, 309 aa, Companilactobacillus halodurans
  source 1..309: note = Related to VDFO01000068.1
MKKKYPLSQSYLFKCHSKKKLADSLGMSLKKLKYISNNPRYYSFTKRTGTKNREIDVPSDAELKKAQKNIYNYLKYTNRPNYLMAGEIGKNILSNATFHKDSDYWLKFDISNFFPNCKREYIYRFFQSSMQCSPDVASILTNITVYRGGLVQGISTSMLLSFFAFTPMFDELSLLATKNNLKFSTYVDDFTFSSSSPINTNFIKLRVNKIVRAYGHTIKNRKVKYYSTNDSKRVSGVIVTKTHHLKVPNKNRKKIISLAKSMRENINTGNYQEAEKIRLSLRGCINSARQIEPEIFPEISKFTKTKFKS

SEQ ID NO: 3318 - protein, 310 aa, Apilactobacillus micheneri
  source 1..310: note = Related to QUAW01000007.1
MTYPINQCYLYKIHSKKRLSKIFGLDLKKMMDISNTPIYKNFYILKKNKKDYRKIEYASDTLNGIQRKIHKYLANINKPKFLTGGVKSKSILTNGKIHKNNNYWIKFDISNFYVNCNRDYIYKFFLNDLKCSPDISEILTNLTTFEGHLIQGSSSSVDLSYFAYSKMFKQLNDLALLNDLTFSTYIDDFTFSSNIPINIDYISKNVLKILRLYGHKAKRNKVKYYNINSNKLITGIVVNKNNEIRVPNYNREMIINLRRKIEDNDSCDLRDILSLIGMINSARQIENGVFSNSYNYAQNILKRLRKNKSY

SEQ ID NO: 3319 - protein, 310 aa, Lactobacillus acetotolerans
  source 1..310: note = Related to NZ_AP014808.1
MRKGKYALNQSALYKCGSKKRLAEILGIPLGTLKENAENPQYHIVYKPKKNSTEKRKINAPRKTLKRIQGKIYKKLQYVKRPKWVMAGEKGKNWPDNAEFHKDSCYVLKFDIANFFPNCGREYVYRFFLNRLKCAPDIAEILTNLTTYHGCIVQGSPVSMVLAFYAYEKMFDELANLADENSLLFSTYVDDLTFSSKKQIQKDKLIKIVNKKLHAYDHKSKSKKEMYYGKTKYKKITGVILYPDHVSKVPNRIRLKIKRSLVAAKEAEKEGNVKQANDFKKELVGTIYSARQIEKNIFPEALNYAKQQVS

SEQ ID NO: 3320 - protein, 317 aa, Lacticaseibacillus jixianensis
  source 1..317: note = Related to NZ_RHOJ01000001.1
MKPSESRKRYNLNQCALYCCRSKSKLFKLLGTNAREIRDLTKNMNEQYSIFDLEKKGGGTRTVHGPSPLLKRIQKTLYKYLRKVERPSWLISGELGKSVIDNVRPHQFAGDMIKLDISGFFDNCKREPVFQFFHTILRQPGDVASICTELCMLNGAIVQGSPTSMVIAFYANRKMLEELQQLASDFGLVFTVYVDDIAFSCAASFNEDALLSRACQIVRAYGFRVKTKKVREYPLEKPKLLTGIVISKKNTLSVPNRVRRTILDSMTSYRKMDDSNEKEKLRQSMLGMIASAQQIEPGIFNSIRGQLLSDRRKQLVS

SEQ ID NO: 3321 - protein, 315 aa, Schleiferilactobacillus harbinensis
  source 1..315: note = Related to CP045180.1
MTTKVTKRYLLNQSALYHCTSKRKLARVLQIDLKRLVGIVGDIPNQYSTITRPKKDSGERIVHNAHFELKRVQRRLFTLLRRVKRPNWLISGEIGKSITDNVRPHLGGTQLLKIDISGFFDNCSRESVYQFFHVQMAQPSDVAKICTDLCTLENAVVQGASTSMLIAFYANQSMLQELHELAEDNSLIFTVYVDDIAFSSSHSFQASDILDQATRIVSAYGFRVKNKKVRAYNDSRPKLLTGVIITTTSKMAVPNCKRRKILDDMTQYRRSTNPAERRSMRSKILGQISAAQQIEPDFFTGVKNQLKYEMRMDED

SEQ ID NO: 3322 - protein, 311 aa, Loigolactobacillus coryniformis
  source 1..311: note = Related to CP017713.1
MKKNIRRYPLNQSQLYKCHSRRRLARMLDTDLKTLEEIAKNPRYYSFTRPKKNSNERRIIDAPNQRLKKIQTSVYAYLRKVKRPDWVMAGEVGKNWTENAETHADDSYFVKADISKFFDNCEREYVYQFFLTKLEQSPDVADICTSLVMFEGKIVQGAPTSMVIAFYAYQKMFEELACVAKQFHCIFTIYVDDVTYSSLDPIDSAALEARISQIMAAYGHKVKRQKVRTYGSQRAKRVTGVILSTDHQMLTPNSLRQEIYADFQQYLAQKKADKDDPNLDHQRASLLGKINSARQINPGIFPEMHRILKNG

SEQ ID NO: 3323 - protein, 316 aa, Coprobacillus cateniformis
  source 1..316: note = Related to JAGZJL010000011.1
MKNITLSNNPLYNLKSKNKLKKLLYVDNFDNIINQYDVFIAKPARLVEKPSNQLKIIHTRIFKFLKKIEIPDYLFSSKKGKCYIDNARLHQNNSFVVTLDLSKFFPKSNASHIYNLFEKKFNMSKDVAYIMTQICSIDTSKITLKDSVKRWYQNANNKLKYPIPISHVPTGSCTSQIIAFLSFIDMFEEMNSIACCNNITFSVFVDDIIISSNQPIKRHIINKFKYIATKYGHEINKSKIKYYGINYNKRITGVIITKDHRLKSPSKNHFQSFKDAQQYKINPSIKSKQRTIGRIQAVRNIEKQKFIQLIKDIKQV

SEQ ID NO: 3324 - protein, 313 aa, unidentified
  source 1..313: note = Related to CP051151.1; note = Tenericutes bacterium zrk29
MENALFNLKSKKKLAKLLFYDKIGYLDKDLSFINNYSVFIVETSNGGTIKSRIVETPRGMLKVIHDRVFKFLNQVDLPDYLISKRGSSYVQNHISHKNNSNVVSIDIQKFYPMCSFGNVYKFFHNTMNMSPDVAYIISEILTINYENIKINDKVDEYLEQQEVKNKVKFPTKHIPTGSSVSNILSFLSYREMFEEIAQLSKRYNIEMTVYVDDITFSSNEQFPKTFIGKVKKILIKNGHKYNKRKSKKLDKNHNKNITGVIVNKYKQTKIPNKLHLKYKYAKRDLLKDPSQLNNQKLNGIKEAMKQIDTVSKK

SEQ ID NO: 3325 - protein, 306 aa, unidentified
  source 1..306: note = Related to JAFSUG010000001.1; note = Oscillospiraceae bacterium
MLKRLLHIEDNKFLKQDYIASMVTPYIDKKGKARLIEPPREELKTIQKRIKMMLGQIVVPSNVFSGIRGRSYAENAVMHSSEKLRNLFKIDLTAFFPSISRETVYRFFYEDLCCSPDVAETLTNLTTIDLEKSQAHCLDEIYSFLNYKGVTCKNHLISGAPTSQIMSYLVNHRMFEEMQKVADDNNAVMTVYVDDVTFSTEDHISRHFKNRVIDIVRKYGYQISKAKVKNYTKLYPKLVTGVIIDSHGKPIIKNSMREKIIKEYELLRDHPESAESKQRLKGLLTAARQVDHRAFPTIYRFAFDKE

SEQ ID NO: 3326 - protein, 306 aa, unidentified
  source 1..306: note = Related to JAFYVE010000007.1; note = Clostridia bacterium
MLKRLLRIEDSKFLKQDYVASMVSPYIDKKGKPRLIEPPREELKIIQKRIKQMLGQIIVPSNVFSGIKGRSYADNAVMHTGESRRNLFKIDLTAFFPSISRETVYHFFYEDLCCSPDIAEILTNFTTIDLDKSQANCLDDIYSFLDSKGVLCKNHLISGAPTSQIMSYLVNHQMFDEMQKVADENGAVMTVYVDDVTFSAENRISKNFRDRIIAIVRKYGYQISKSKVKKYTKLYPKLVTGVVIDSEGKPVIKNSMREKIIKEHDYLREHPDDAKSRQRLRGLLTAARQVNNHAFPTIYKFAHNKT

SEQ ID NO: 3327 - protein, 308 aa, unidentified
  source 1..308: note = Related to nan
MLLLHIKDSRYIKQDYIADMVSPYIDKKGKPRLIEPPCEELKTIQKKIKNMLGQIVVPNNVFSGVKGKSYADNAIMHVDNKRRNLFKIDMTAFFPSISRETVYRFFCKDLCCSPDVAEILTNFTTIDLKKSHARYLDEIYAFLDSKHVKCKNHLISGAPTSQIMSYLVNHRMFDEMQKLSDENNAVMTVYVDDVTFSSENWLSGSFRNKIVDIVGKYGYQISKNKVKKYTKLYPKLVTGVVIALNGKPTIKNSIRMKIVLEHAHLRDHPEDADSRQRLRGLLTAARQVDAHAFPTIYKYAYELDTKNN

SEQ ID NO: 3328 - protein, 312 aa, unidentified
  source 1..312: note = Related to JAFSCK010000132.1; note = Oscillospiraceae bacterium
MLKRLLHIEDSKLTKQDYIASLISPYIDKTGKPRLIEPPREELKTVQKRLKKLLGEIVVPDNVFSGIKGRSYADNAKMHIGSGRRNLFKIDLTAFFPSIDRDTVYHFFSKDLNCSSDVAQILTNLTTVDLEKAHITNRNDVYLFLSSKKVSCRNHLISGAPTSQIMSYLVNHHMFDEMQTIADRNNISMTVYVDDVTFSSEGRISHDFTEQIYAIIKKYRYQVSRSKVRKYTKLYPKLVTGVVIDADGKAVIKNAMRLKIINEYNHLLQNPNDPICRQRLRGLLTAARQVDQHAFPTIYKYAFEGSLKCQQN

SEQ ID NO: 3329 - protein, 309 aa, unidentified
  source 1..309: note = Related to JAFQCV010000001.1; note = Oscillospiraceae bacterium
MLKRLLHIEDSKFTKQDYIAALVSPYIDKTGKPRLIEPPHKDLKTIQKRLKNLLGTIVVPNNVFSGIKGRSYADNAKMHAGSHSRNLFKIDLTAFFPSISRETVYNFFYHDMTCSSDVAEILTNLTTIDLEKARIHERNEVLLFLESKKVSCHNHLISGAPTSQIMSYLVNHHMFDEMQIVADNNHAIMTVYVDDVTFSSEYRLSHKFKEQILSIVRKYGYQISRPKVKYYTKLYPKLVTGVVIDSSGSPIIKNAMREKIINEHRHLREFPDDKSSRQRLCGLLTAARQVDPHTFPTIYKFAFSSPDHE

SEQ ID NO: 3330 - protein, 326 aa, Eubacterium sp.
  source 1..326: note = Related to FR898238.1
MPLIYTDCPLYGLKSKKLLKRLLRINNNQMMRQTHIASLVSPYIDKSGKPRLIEPPHEELKIIQKRIKNCLGRITVPDNVFSGIKGRSYADNARFHVGNNRRNLYKIDLTAFFPSITRDTVYRFFAEDLLCSPDVAQLLTDLTTIDLETSNTKNIDEIRLFLKEKGVSTYNHLISGAPTSQILSYLVNHQMFDEMQKIADDNNITMTVYVDDVTFSSENRISKDFRDKIIAIIRKYNYQISKKKVKRYTKLYPKLVTGVIIDATGKIVLKNSMRQKIIIAYNELKNDPDNADIRMRLKGLLIAARQVNKDAFPTIYKFAFQTEENK

SEQ ID NO: 3331 - protein, 309 aa, Faecalibacterium hattorii
  source 1..309: note = Related to PRLC01000002.1
MLKYVLHIKNGDLLKQDYVVSMIGPYIDKTKKPRLIEPPQAELKTVQKRMKTLLGKIQVPDNVFSGIKGRSYSDNACLHLGKSKRNLYKIDLTAFFPSISRETVYCFFFEDLCCSPDVAEILTNLTTVDLKKLNQSSLLEVYDFLANKGVKCYNHLISGAPTSQILSYLVNHKMFDELQSLSDKSNVTMTIYVDDVVFSSEHKISSEFRQSVLSLIKKYNYQVSRKKVKGYSKTYPKLVTGVIINSEGRATIKNALRKKIMVEYEHLRNNPDDIKSRQRLRGLVTAARQVDKSAYPNIRKFAFDNPAKS

SEQ ID NO: 3332 - protein, 308 aa, Faecalibacterium prausnitzii
  source 1..308: note = Related to FP929045.1
MLKYVLQIKNDDMLKQSNITSKIHPYIDKTKKPRLIEAPQAELKIVQRRIKTLLGKIQTPDNVFSGIKGKSYPENARMHIGGRKRNLYKTDLTAFFPSISREDVYQFFNNELCCSPDVSEVLTNLTTVSLERFPKEELTEVYDFLGQKGVHCYNHLISGAPTSQILSYLVNHKMFDELHTLSAKNDMVMTVYVDDMVFSSEHKISSHFRNSVKSIIKKYRYKLSHNKVKGYSKGYPKLVTGVVIDCNENMIVKNSLQHKIILEFEHLRKNPMDQESRQRLRGLVTSAQQIDKSIFPNIKRFAFENPSK

SEQ ID NO: 3333 - protein, 307 aa, unidentified
  source 1..307: note = Related to JAGBJU010000241.1; note = Oscillospiraceae bacterium
MLCHMLNIRDTNLLKQDYVSKLVEPYIDKTGKPRLIEPPRAELKLIQKRIKNMLGMIEVPENVFSGIKGRSYADNASFHIGDSPRYLFKIDLTAFFPSISRDKVYAFFLSDMHCSPDVAAILTNYTTIDLSRAAIQDRQSIYTFLSEKNVSCYNHLISGAPTSQILSYLVNYHMFDEIQMLADKHSVSMTIYVDDLTFSCEHRIPRHFKENVLSVITKYGYVISAGKTKSYTKRYPKLVTGVIIDSNGQLALKNSLQLKISLEHAHLRDHPEDTKSRQRLRGLITAARQVKKDAFPTIHQFAFQANP

SEQ ID NO: 3334 - protein, 324 aa, Clostridium jeddahense
  source 1..324: note = Related to NZ_JADMUB010000001.1
MKYDNCPLYELKSKKILKYLLGIKNSNLLNQQYVASLVTPYIDTTRKPRLIEPPHSELKAIQKKIKTLLGKIEVPNNVFSGIKGRSYIDNALIHKGNGLRHLFKIDLTTFFPSISRETVYGFFYKDLRCAPDVAQILANLTTIDLIKSNSRDIETIYQFLEMKKVRCRNHLISGAPTSQILSYLVNHRMFDEMQALADKNRVTMSIYVDDVTFSSDYRIPQRFKNLVFTIVRKYNYQISGIKVKSYSKLYPKLVTGVIIDTTGDLTIKNSLRKKIIDEHRNLRNDPGNRESRQRLRGLITAARQIDKSAYPNIHRFAFEKFTIR

SEQ ID NO: 3335 - protein, 321 aa, unidentified
  source 1..321: note = Related to MWBL01000033.1; note = Firmicutes bacterium ADurb.Bin300
MNYNYCPLYGLKSKKRLKYLLKIKNSKMLSQAHIAKHVEPYIDIQGRPRLIEPPSVELKAIQKRIKNLLSKIIVPDNVFSGIKGRSYVDNARMHSNGLRYLFKVDLTAFFPSITRETVYTFFREDLHCSSDVAEALTNLTTIDIQKSKAKNINEIYCFLDAKQVNVINHLISGAPTSQILSYLVNHKMFDELQLLSDKNKITMSVYVDDITFSSEFRISHMFREKVYQIIKKYNYKISKKKVKGYSKLYPKLITGVIIDANGNLVIKNTLRRKIILEFRKLMEDPADDESRQRLRGLATAARQINKAAYPFIYKFAFDNKQ

SEQ ID NO: 3336 - protein, 323 aa, Monoglobus pectinilyticus
  source 1..323: note = Related to NZ_CP020991.1
MIYTNCKLYKLNSKKVLKYLLAVSDNNFFEQKYVASQIEPYIDTLKKPRLIEKPSEQLKAIQSKIKGLLYAIQVPDNVFSGIKGRSYSQNAQWHKGTKHVYKIDLTAFFPSITREKVYSFFKDDLETSSDVAEIITNITTVDIDLTNLQNVEQVNEFLISKNVKTRNHLISGAPTSQILSYMANHKMFDEIQSLANHNGIVMTIYVDDITFSSENYISNKFKNKVQSIIKKYGYQISARKVKSYSKCYPKLVTGAIIDKNGCLTVKNSLRYKIMSTLNELKENPNNKTARRKLRGLVIAARQIEPNAYPSVHKLAFDKKYKVN

SEQ ID NO: 3337 - protein, 316 aa, Caproiciproducens sp.
  source 1..316: note = Related to JAGFNZ010000002.1
MYQLKCKKVLKYLLKISDNSVFNQWYVASLIEPYIDISRGKPRLIEPPSLMLKSMQTRLKNMLGTIDVPINVFSGIKGRSYAQNAQWHKGNKFVYKIDLTAFFPSISRERVYSFFKEKLRTSPDIAEFLTNITTVNLDLSNIKSMEEINIFLESKNITTRNHLISGAPTSQILSYLANQDMFNEIQKLSDHNNITMTIYVDDLTFSSTDHISNNFKQEIFSVIRKYGYHISNKKVKGYSKFYPKLITGVIISKDGNIAVKNSLRLKTINELNTLKQAPQNTTSRKRLRGLVTATRQVEPNAYPSIHQFAFDKKYKV

SEQ ID NO: 3338 - protein, 324 aa, Clostridium sp.
  source 1..324: note = Related to JAGZEF010000053.1
MINPIHSNLYKLTSKKYLLSLLHIHNRQFLKQSYVSKQISPYIQTDPKPRLIEVPSEELKTIQRHIKNELNKIIVPANIFSGIKGKSYIGNAKLHSGNKYVFKIDLCAFFPCITRNTVYNFFIESLKTSPDIANILTNLLTVDLSKCSIENVESVNAFLISKKIKTPNHLISGSPASQILSYLVNHKMFDSLQNFCDKNNITMSVYVDDVTFSSQHIISHTQKQVIYKIISKNLYRLSRNKVKYYTKKYPKLITGVVISSNGNLKIKNSLSLNVISEWKYFSQNPKNLQSKARLQGLLIAARQSEPAKFQNIYNLIREASIPFS

SEQ ID NO: 3339 - protein, 324 aa, Agathobacter sp.
  source 1..324: note = Related to JAFQRZ010000015.1
MINPINSNLYKQTSKKYLLNLLHIHDKRFLQQRYVSKHISPYIQTNPKPRLIEVPSEELKIIQRHIKNELNKIIVPENIFSGVKGKSYIENAKLHSGNKYVFKIDLSSFFPCISRNTVYNFFTESLKTSPDIACILTNLLTVDLSKCNIEDADSVNEFLISKKIKTSNHLISGSPASQILSYLVNHKMFDTLQEFCDKNSLIMSVYVDDITFSSQHVISHSQKEVIYKVISKNLYRLSRNKVKYYTKNYPKLITGAIISSNGNLKIRNSLSLNIIKEWKHFKYNQQDAQSKARLQGLIIAAHQSEPNKFQSIYKIVRDASFDVS

SEQ ID NO: 3340 - protein, 323 aa, unidentified
  source 1..323: note = Related to KE159538.1; note = Lachnospiraceae bacterium A4
MIDPVKSNLFKLSSKKYLMTLLNVPTKEYLNQNFTAKQIKPYIQANPKPRLIEVPSDSLKKIQKNIKCELNKIEVPSNVFSGIKGKSYVDNAVIHQNCNFLFKIDLTAFFPCITRETVYKFFKVDLKTSSDIANILTNFVTIDLTLCDIQEPEPIEQFLLSKGIKTTNHLISGSPASQILSYLANHNMFDELQNFCDKNDIIMSIYVDDITFSSQHEISHKHKEIIYNIIFKYLYRLSRSKVKYYTSIYPKSVTGAIISPNGNLSIPNSLSYKVINELRNYKNNPNDEHSQKRLQGLIVVAQQTEPTKFSNIYNHVRNATIKA

SEQ ID NO: 3341 - protein, 320 aa, unidentified
  source 1..320: note = Related to JAJQEB010000010.1; note = Clostridiales bacterium
MINATNSKLYNLQSKKNLIYLLKIHDKDFFNQDYVAAHIHPYIDKRGKPRLIESPSLQLKKIQRNLKNELAKIEVPYNVFSGIKGKSYVENAEMHRKSNYIFKIDLTAFFPCIPRESVYTFFRKQLKTSPDIAQILTNLTTVDLTRCNIKKLESIEKFILDKHIVTTNHLISGSPTSQALSYLVNTKMFDELQYLCDKNKVIMSIYVDDITFSSNHKISHKFKEIVYTIISKYMFKLSHNKIKYYTKDYPKLVTGPVISNGKLIIRNSLRFKIISEFKSLKKNPNKASYDRLKGLIVAAKQIDLNQYPNISKYIKENPIH

SEQ ID NO: 3342 - protein, 302 aa, Dethiobacter sp.
  source 1..302: note = Related to JAGXSA010000175.1
MLRHFLQVQSNQLFNQTFILDKIHPYIDTVGKSRLIEVPDKALRTIQKKIKNMLGKLVLPDYVFSGVKGKSYVDNATHHSGTKFTYKVDVTAFFPSISREKVYLFFREKLKTSPDVAEALTNLTTVDLHLIENIQEVHEFLKRKNIKTWNHLISGAPTSPILSYLVNSDMFDALYSLSKENEIVMTVYIDDIVFSSSYRISYKIRTKILSIIKQYGLQVNKKKLKLYTRKYPKKITGVIIDKNGNSEVPNSLRKKIITELHTLKSNPNNLSSRQRLQGLVTSARQINKETFQNICSYAYKKD

SEQ ID NO: 3343 - protein, 319 aa, Anaerofustis stercorihominis
  source 1..319: note = Related to NZ_DS560015.1
MEIQKSPLYKLSNKNYLKYLLKIPDKKFFKQSYITQLITPYIDNKNGKKRLIEVPDLELKKIQSRLKNILSLLQMPNYVFSGVKGRSYYDNAYLHKGNKYVCKIDLESFFPNISREKVYLFFLTYFKCSSDIAYILTNLTTVDLTRTKIKNNKKLEKFLEYKNIFCKNHLISGSPASQLLSYLVNKDMFDEIYNLANKNSINVSIYVDDIIFSSFNKISYDFIKQIKRIINKYNYNISNSKFKRYLNGYPKRITGVIIDKNGQLSIPNSLRLKIIKEFEYLKSHPNDSKSKIRLRGLILSSRQIEPNAFVGIYKYLKKF

SEQ ID NO: 3344 - protein, 317 aa, Eubacterium sp.
  source 1..317: note = Related to JAFUZY010000121.1
MNKKCPLHGLKSKAQLYSMLGVNDKKLFRNGIQDKVKIYIAKDPKERLIEAPDYITKKAQKQVKNYLMKCDFPPYVFSGIKGKSYFNNAEMHLSSKYMYKTDISKFFPNISRDKVYLFFLNDLNTSPDVANILTNICTINISDSIETNPQVAEFVSKNKIRMFNHLCTGSPASPLLSYLVNRKMFDELNNIAENNGMSFSVYIDDVFFGSKKPIPYGVRQQILKTLTKHGYNISFKKVIYYKDKENKKVTGVIISPNNKLEIPNKLKLKIVSGFSKGNLKDSRAKINGMLIASSIIDKNSFNGIREYMKQLEKDSEE

SEQ ID NO: 3345 - protein, 315 aa, unidentified
  source 1..315: note = Related to JAFVVO010000024.1; note = Clostridia bacterium
MHKHCLLHGLKSKKQLISMLDITDNKVMKGKAQDKIKIYIATEPKKRLIEAPEYKIKKVQNKIKNYLLKCDLPSYVFSGIKGKSYFCNAALHRDCKFLYKTDISAFFPSISRNTAYKFFKNDLETSSDVAKILTDICTVDIRDTLEKDSSVAGFVKDKKIKMYNHLCTGSPASPILSYLVNKAMFDEMYAIAENNNLKFSIYMDDVFFSSSKSISNNVREHILRILTKYGYNVSFKKVIYYTSQQNKKVTGVIITPQNKLSIPNKLRRKIIASFSKGNLKTGEQNLRGMLVASNIIEKNSFSGIKRYLNELSKIQ

SEQ ID NO: 3346 - protein, 317 aa, unidentified
  source 1..317: note = Related to QAKR01000043.1; note = Clostridiales bacterium
MYKSCPLYALQSKKMLMKVLGIQDKKWTKNIYVQQNISPFIDCMVKPRLVEAPKQELKVIQKRIKNGLMKCRFPNYIFSGVKGKSYIDNAKMHAGIKYLYKIDISAFFPNTSREKVYMFFKNELKTSSDVAEIVTNLCTYDISIDLVEKKEIDTFIRMKKIKHINHLCTGASPSPLLSYLVNKSMFDEMYSLCLKYNVNMSVYVDDVVFSCDKPIQPEFRGRILKIVLKNGYNISKNKVKYYGSSDVKKVTGVIIKPDGTLDVPNKLKFKVTKRFKDTQKGSELNKLYGCVIAAKQIKKNIYPSISEYIMNQKKKEK

SEQ ID NO: 3347 - protein, 340 aa, unidentified
  source 1..340: note = Related to DPGI01000004.1; note = Clostridiales bacterium
MQSWDKHNQFKYNEVYPLEYRKCYLYGLKSKKKLLELLHIDRKIYCKSSFLNCKIKPYIEINKNKKKRLIEAPDEDVKNIQSIILRALQLIDVPNYAFSGIKGKCYIDNAKAHSDKKYLFKIDISKFFPNIGRNKIYNFYLNKLKTSPDVANILTNLSTINLDLKNQNNKTMLKINEFINDAHIKERNHLITGSPLSSIMSYFANVDMFEKINEIALKYNITMTVYVDDVVFSSDNKIPYFFRKNVLNIINQNSYDVSVKKCKWYNKPENKKVTGVILDKKGKMQIPNKLMLKTHNYINEINKGDKTNIDKLQGCLVVANSINGKFKEYRGQLKKMKRKF

SEQ ID NO: 3348 - protein, 328 aa, unidentified
  source 1..328: note = Related to JAFQEA010000008.1; note = Clostridia bacterium
MTYKLCRLYGLKSKKTLREWLEIDDSSFFHSKNIAKNYHPYIDNKANKKRLIEVSSPKLKFVQTKILGMLKNLDYPEYLFSSVKGVSFIDNAKQHSGKYYTFKIDISKFFPNTSRNKVYNFFKKDLNTSSDVATILTDCTTVDLRNYNSDKHHNEIVNFLEEYKIKQIAHLSTGAPTSMLLSFLANRPMFEELNSFCEQRGYIFTVYADDVTMSSINPISYSDRSAIIRIAEKYGHFVSKRKVKYYNANQSKKITGVVINKNGEICTPNKLLNKTHNKILKYKSKNIDEHEINSLKGCINVAYQIDKRYPHLRKVLNKNSNYSKEKNG

SEQ ID NO: 3349 - protein, 323 aa, unidentified
  source 1..323: note = Related to DVLO01000021.1; note = Candidatus Limihabitans stercoravium
MTYKLCRLYGLKSKKTLREWLGINDSGFFCSQNIAKNYHPYIGSKDNKIRLIEDSSFKLKHVQKKILKMLKKLDYPKYLFSGVKGLSYIDNAKQHLGKFYTYKIDVSKFFPNTSRNKVYSFFKDFLNTSPDVAKILTDCTTVDLRNYSNSKHYNKIMRFVAIAGIRQIAHLSTGASTSMLLSFCVNQSMFEELNEFCKQRDYIFTVYVDDVTISSTKPITYKDRLKIIRIVEKYGHSISRNKIKYYTLSKTKKITGVVINKNGEARTPNKLLSKTHCKILKFKRGNIGDAEINSLKGCINVAYQIDGKFIHLKKLLNLKDNLK

SEQ ID NO: 3350 - protein, 304 aa, unidentified
  source 1..304: note = Related to JAFWLJ010000001.1; note = Clostridia bacterium
MDLTTCKLYGVQRKRDLSNILKINCKEINKIVNSYKPYIANKSKKRLIEPVSSVELKKVQKRIQNLLKEIKYDSNVFSGISGRSYIDNGRLHLGCEYVVALDISKFFPNTSREKVYKFFKHDMKNSSDIAEILTNLCTIDLSNIADIDEEVIKYISENRIRYKKHIPTGSSISCILSYLVNYKMFDEIVKLGVEYRCKTSIYVDDVVISSTEKINKQLIDRIMGIIKSRGYSIQKTKLKFYDKNEFKRVTGNIISKDGTKLVIPNKIRYKMIKLKKNKEIQKDKKEAKLNGYNQVINQINMEAF

SEQ ID NO: 3351 - protein, 320 aa, Clostridium sp.
  source 1..320: note = Related to FR893092.1
MNFKNCELYKIKRKRDLFILLHIDENKLNEELYKYKVCIKDKKRLLEKPSEELKKIQRNILYKLYQLDFPQYVFSGIKGRSAFGNAIYHINCKYMLKLDMSKFFPNTHRNNIYEFFKDKLKMSSDVSSICTDIVTVNYEKEDVEIDYEVYDFLKRKKIKNTNHLPSGTPTSQILSYLANIDMFDKIIEYTKKHKLQCSIYVDDITISSSNRYITKKEESEIKRIIKKHKHNLSKEKTIRYSVNEFKKVTGFVIDPNNRLVIPNKIKSKIKNQTKFIRKKELDEQRKNSIIGLTNFANISVEGSYKGLRATLKNISTSNTV

SEQ ID NO: 3352 - protein, 305 aa, unidentified
  source 1..305: note = Related to JAADIZ010000149.1; note = Epsilonproteobacteria bacterium
MNKYKCTLFNCKSIKKLQKYLFIQNKNNFKKISNELKNNPLNFYVSFKNNTGRELFSCNEQIKKIHKRLQKLFNVEKSDYLKSGVKKESHITNVKFHKNSNFFLLLDIKNFYPSITKQKIKKQLITTYNQSSDVAEIISNMVTVPQEKALGKRALVTGSVLSQFFAYMINKKMFDELDKISKEENIRFSLYVDDLTFSSNVPVSYLFYTKVYNIIRKNGYIIHSGKIYRGKIGNKSKITGVHITKYGFRLLDRHKIKIREIIKNKDYLENNKPLLGLLNYALQVNPKYSKYMYLIKKKLISDSNI

SEQ ID NO: 3353 - protein, 325 aa, Sulfurovum sp.
  source 1..325: note = Related to CACVAZ010000125.1
MNAYQCTLYGVKSLNKLQQFLQIKAKQEFKALSSSVKSTPLKYYSPFKDENKRELFNCSSHITFLHKKVMRLFNLEQSTYLKSGVKKESHITNAKEHQNSNFFLLIDIKGFYPSITKSKIKTQLIQTYKQSKDVAEFLSNLLTVPQEKSLGKRALVTGSPLSQWFAYVINKKMFDELYNVSKEENIIFSVYVDDITFSSKSIISYKFYTKIYNIINKYEYRIHQGKMYRGKLCNKTKVTGIQFTKYGFRLLDKHKEKIRKIVKSKDCSNQIKSLLGLVNFAIQVNPRYSKYKYLIEKSLLLKHSNTKNKNQYHKSPTNSKALKYS

SEQ ID NO: 3354 - protein, 300 aa, Aliarcobacter vitoriensis
  source 1..300: note = Related to NZ_PDKB01000003.1
MNPYSCTLYNCKSLNKLKSYLNIEDDKYFKSLNANLSANPFKFFRKFEKNERELFRCNKRITQIHQRFIKLFKIEESEYLKSGIKKESHITNALAHKDSNFFLLVDIKGFYPSTTKAKIKKQLIMTYQQSSNVAEFISNAVTVPQEKANNKRALVTGSVLSQYFAYVINKKMFDELYKLSKHNDVIFTVYVDDISFSSKKVLTYKFHQQVYNIIKKYGYTVHNGKVYRGKINNKSKITGVQITKYGFRLLTKHKDKIKELKNKIDIKSKRSLLGMLNYAIQVNPKYRRYKNLFKNYEELN

SEQ ID NO: 3355 - protein, 301 aa, Sulfurimonas sp.
  source 1..301: note = Related to NVUO01000016.1
MFTCTLYNCKSLNSLQKYLLIKTKEFKSLSIELKEIPHKFFKSFTDDKGRELFRCNGQVTKLHKRLMKLFNVEIPIYLKSGVKKQSHITNVKYHESSNFFLLIDVKRFYPSITKSKIKKQLITTYKQSSNVAEFISNLVTVPQKKSNNKRALVTGSPLSQYFAFIINKKMFDELNKISIEEDVKFSVYVDDMTFSSKQVISYKFHQKVFSILTKYGFVTHLIGNKKTYRGKVGAKSKITGVHITKYGLRLLQKHKDSIQHIIKQNLHEEKGKTLLGLVYYAIQVNPKYDKYKRLLEKYNKL

SEQ ID NO: 3356 - protein, 318 aa, Brachyspira hyodysenteriae
  source 1..318: note = Related to CP015910.2
MIKYNLDIFKNFTSIEKTCEFLCVNKVLKYNIINNNIKECYITEINDNGREIHKPIFFLKKTQKKLLKCLLPKVLPKYLFAPSIKNTNKNNIENARYHLGKKYFLTMDISSFYNSIKGNTIYDLFFNKFKLNSDIALFITKLTVYDNGKETFLSTGSPSSQILAYLCYSDVFDNIYNLCLKKGIRFSLYVDDMTFSSDIKFTNKLPNKIIDIFEKNNLKIKPEKTKRYNKGYAKITGVILKNNKLYIKNSKRKDIIENLKLLNKSNDIIKKEIENNNIEIIKTISKLNGLLNYTKQIEEDHFLANRNRIRKLYKLIPK

SEQ ID NO: 3357 - protein, 317 aa, Spiroplasma sp.
  source 1..317: note = Related to NZ_CADDIL010000010.1
MQYNNCILYSLNSKKKLVKILIVNKNINKKKLVKIFSKEEQLKILIEKSKKVQLTDKKTRNKILNSTNITFNENIHRQFTYAQKKSDYKMILKKLSKILSIWVEKNNLNYLYSIIKNVDYVKNAYFHKENNYFLKIDFKNYFNNISSLQIFNFFKYKLNTSIDIARILTVLSVADINNTNLKQGLETSPILSFLVNIEIFEEIYQYCIEKKFKMSLYVDDLVISSKNPINKKEIQFVFNILIKNKLKINRRKIKYQNLYNNIVIITGIQILKNHNLKPINKTCKKLRIEKKISKNQNVINGLISNLKYIQQINDKNK

SEQ ID NO: 3358 - protein, 333 aa, unidentified
  source 1..333: note = Related to JAIPEU010000010.1; note = Vallitaleaceae bacterium
MNYKECSIYKITKKSDVNYLLDNADKATNINKYHQYITTYVVLDPNGKPKRLIECIEEKYRHTNKVLFNLLKSIETPEWHFSKKAVSYLDNAFYHLDNRYMLTLDIKKFFPNTSQDSVYRFFLNKFELTPDIASYLAKLCTVNIDLCKYDSVEMKNNVNTYMEIKKIRQRNHLITGASTSCLLSFLVHQEMFEEIRGLLKKHEKMSVYVDDITISSNCPIDKKLVKQISAILYRYGHRLSKNKTKYYTKDSYKRTTGVILTPSKQARIPNSKRNEIFSLFGIYKETGYTCEKTKDRLRGLLNYARSIEPNAFPRIYEAVVSQSKSYSKQNPTR

SEQ ID NO: 3359 - protein, 416 aa, Clostridium sp.
  source 1..416: note = Related to FR881490.1
MNLNELIEQQIQKCRLYGLTKPLIIKEILNIPDYVDIKHLDKSIDSFYDTFYIKKNWAKESQTKEERYKEILNIEKNISERFTSIPDGEDKTKYRKIVTINTDWLKKSQKKFNKILMSILLDKKVRGIKQKSIIPYLHSAVKQRSYHTNAQAHVGDKYVFAIDLKDFYPSVTKYKLYLFFKNEFNLSSDIAMFYAVLSTCISDDGTYRLGQGLSQSSTLAYLVNYSLFNYLYELSKVEDIDMSIYVDDVVFSSKNKISQDFIDKLFGIIKSNNMQIKRQKVHYYKKESVKKITGVYVNGNKTRVANHKHYEFHTQYKYLKNHILNVKTIEDYYKIYNLYLKFYGNFQHIKMVESRVHDRYEKFIKDFDEFFPKGINKKQKSINYQKDNIKNVTDREKLNKCYQKLLNKNKIIESVL

SEQ ID NO: 3360 - protein, 416 aa, Clostridium sp.
  source 1..416: note = Related to FR890375.1
MNLDNLLEEKIRESRLYGVTKPMIIKEMLNIPEDIDIKNLDKNIDSFYDTFYIKKTWVQGSKTKEEKIKEILNIEKTTSERYKSIPDGEEKTKYRKIVTINSDWLKKSQKKFNKILMNILLDKKIRGVKQNSIIPYLHSAVKQRSYHTNAQVHVGDKYVFAIDLKDFYPSVTKYKLFLFFKDKFNLSSDIAMFYSVLSTCLADDGSYRLGQGLSQSSTLAYLVNYSLFNYLYNLAKNDDIEMSIYVDDVIFSSKNEISQVFIDKLFGIIKGNDMRIKRQKVHSYKKESVKKVTGVFINGNKTRVANHKHYEFHMQYKYLKKHIIDIKSIEQYFKIYNLYLKFYGNFQHIKMVEGRVHDRYIKFIKEYDDFFPKGINKKQKNVNYRKGNIKNISDSEKLKSSYKRLLKINKVSKSVL

SEQ ID NO: 3361 - protein, 421 aa, unidentified
  source 1..421: note = Related to DVJF01000026.1; note = Candidatus Caccenecus avistercoris
MDLNKLIEENISKNRITGLTKPKIIKEMLSIPENINLKKLDQIINSCYSTFYIKKNWSKHQETEEEKYIRYLNIHQELSERIQQLPENADKTKYRKILVINEPWLKVSQKKLNKLLTSILLTKKEKAKKRESIVPYLHSSVKQRSYTTNAQAHIGDKYVFAIDLKDFYPSVTKVKIFNFFKKHFKLPSDIAMIYAVLSTYKSDNGEYCLGQGLSQSSTLAFLVNYRLFNYLYLEAQKLGIEMTIYVDDVIFSSSSPIPQKFINRLFGIIKENKMSIKRRKVYYYGKKQTKKITGIYIKKNKTSVAYEKHKEIRIQYNYLKEKIKEIKTFSDYLCIYNLYLKFYGNYHHILNVEKKINNKILNFVDKYDEFFPKGIHKKQKQPYSVQNIKTINDVQRLNKCYQKLKNKNLNEVILDYPNVNL

SEQ ID NO: 3362 - protein, 408 aa, Erysipelothrix sp.
  source 1..408: note = Related to NZ_WTSZ01000005.1
MKKNFDGLKRLNKKKTIYSLFEFPKAASNKDYDFSNNYEFRYLAKKKDDINRKERKLERLTGYIQLQDSDKDALMRSRPKDYDKNSYRTIVNYSNSSDWLKKAQKKIHKYIVKELGEVEYLHSTIKSKSYATNAFQHRGENYTLAIDLKNFFTYVSREKLQYTLKDFLQIDSDVAFLYSSMLTSPVDEPPHHGGKYNLGQGLPSSPILAYLCHASLFEYIYNNSLKEEITMTVYVDDVVFSSVKPIPQHFIDRLFGLFKRNGLEINKDKIRLYMNGSTKKITGTYVSPQKLSIPNRKHEELHNLYQTLKEKKEKIETMDDYLFLYNIYLKFSGNYQYLIQVECRGEDGKISVNPRYKKFEKLNNELNILFPRGLKKKKKKTPYSKENMYFEEYKQLEEKYKLSVSRLK

SEQ ID NO: 3363 - protein, 325 aa, Staphylococcus sp.
  source 1..325: note = Related to JAHAKK010000031.1
MKILENCKLFKLNKIKTIYKKLNIPIEAQQKNFDFDSLYDFKYLKKDSKDNNKISKEERFEKYVNIEKSIPQLIDERPGDFNKSKYRVIININQEWLKKSQKKFHKIIAKELNNIPYLHSTIKHKSFATNAHKHIGEKFTLTIDLKNFFTCISRETLANKLKTLLEIDSDIAIYYSRLFTSPSDKPPYNNGQYNLGQGLPSSPILAFLCNYTLFEYINDLAKLYNTSMTIYVDDITFSSDLPISQEFIDKLFGLFKQNGMRINPSKIHLSKNNSFKKITGVNIIDGKPKIPSRKHEEIMIQFKTIKTLMTIKSFSDYFDDNQVIF

SEQ ID NO: 3364 - protein, 419 aa, unidentified
  source 1..419: note = Related to JAGBET010000010.1; note = Bacilli bacterium
MDRVKECLKNCRLYKFNNRKGIKQLLKIPDNLNLNDIRGELSSYYNFFYLKKPDKIKSKMSKEEIRNKYLSIEENLEIYDERPADYTKDKYRMLINIREKWLKQTLKRINKLLSQSLIKKNKKNVEYPIPYLHSSLKKRSYNTNVKAHKNHKYILAIDLKAFYPSVSYEKIINFFRHDLKLEKDIAEIYTALCTCPLDDPQQGNIQYGIGQGLATSPVLAFLTNYRMFEYIYSIAQKSGIEMTVYVDDIVFSSSKPIEQTFINSLFGIVKKNNLKINKNKVKLYGPKQVKKITGLCIIKGGSIKVPNSKHFETKIQFEYLVNKILVISNIDDYLSFYNLFLKFKGNVQFIELVEDKIPKKYSDFIKEYKDYFLYGVPKIKKSKIYTQSNVSNDDYKNFVIMYERLKKKIDKVKNNKIIM

SEQ ID NO: 3365 - protein, 413 aa, Gallicola sp.
  source 1..413: note = Related to DUUN01000201.1
MDNVKECLKKCRLYCFNSRNGIKNLLNIPKDFDLENVRDGLLPYYNFFYLKKPDKSKTKETPEERKMKYLSIEESSDIYDTRPDDYSKDKYRMLININEKWLKKTLKKINKLLSLSLIKKNKKEVNYPIPYLHSSLKKRSYKTNVEAHNSNKYLLAIDIQNFYPSISCEKIFNFFKYDLNLDDDIAGIYTSLCTCPLDDPVVGKFEYGIGQGLATSPVLAFLSNYRMFEYINDFATKNNIEMTVYVDDVVFSSNKPIKQEFINSLFGIIKRNGLRIKKSKVKIYGPNQDKKITGLCITKGGKVRVPRSKHEELKIQYDYLSKEVLNIKNINNYFNFYNLFLKFKGNVQFVLLVEERATTKHFKFIEEYKDFFLYGIRKNKKGNKYTKDNISEEDYKKFILKYENLRKKIDSLK

SEQ ID NO: 3366 - protein, 338 aa, Psychrobacillus sp.
  source 1..338: note = Related to FOGY01000005.1
MQFNNSKLYGLSNKKLLADILSVDKKSLKNVSLEFLPYKLPQHLSTINGKQRDIYNPNDEHKKALRKLVRLLMQVELPSYVFGGIKEKSHIQNASIHKANNYLMLIDIQNFFPSTLDSYVYDLFKGKFQMADDIAKILTDFVTIPCEKKDGRYLPQGYPTSPILSYLAYVGMYNELATVAVENEMIFSCYYDDLTFSSNKFINKSLKRKCYQIIEKHQLKVHPIKSKLIVKKGVEVTGVFLDDLGEAKAPKKLLKKLQESYEKVKNMDRNPSEFTKMNFVDELNKLQGLISAVKSIEKNRKIDLFLNELKFIRKKYNVPYRKNDVKKYFNTEYASIIR

SEQ ID NO: 3367 - protein, 338 aa, Lysinibacillus fusiformis
  source 1..338: note = Related to NZ_CP070490.1
MQFNNSKLFGLSNKKLLADTLNVEKKSLKNVAIEFVPYKLPPQLSNINGKQRDLYNPNEEHKKALRKLVKLLMQVELPSYVFGGIKEKSHIQNAFVHKQNKYLMLIDIQNFFPSTMDSYVYDLFKRKFQMEEDLAKILTDFVTIQCERKEGRYLPQGYPTSPILSYLAYVDMYNELEALAVENGMSFSCYYDDLTFSSNKFINKSLKRKCSQIIEKYQFKIHPTKSKLIVKEGVEVTGVFLDDLGNLKAPKKLLKKLQKSYDKVKEMNENPSGFTKKNFVDELNRLQGLVAAVRSIENNRKVNLFLNELKYIRRKYNVPYRKKDIKKYFKTEHALLIQ

SEQ ID NO: 3368 - protein, 338 aa, Rummeliibacillus sp.
  source 1..338: note = Related to NZ_VCBM01000001.1
MNFNNSKLYGLSNKKILADLLKVDKKRLKNVIEEFVPYKLPTELSTINGKKRDLYNPKNEHKKALKKLVGLLMQVGIPSYVYGGIKERSHIQNASIHRTKKYLMLIDIQNFFPSTSDSYIYNLFKDRFGMANDLAKILTDFVTVQCENREGRYLPQGYPTSPVLSYLSYAAMYQELLHLAVENGMQFSCYYDDLTFSSDKFISKSLKRKCSQIIERYHFKIHPTKSKLMVKKGVEVTGVFLGDSGEVKAPKKLLKKVQNSYEKVKEMDKNPNAFTKIDFVDELNSFQGLIAAVKSIENDRKVDLYLNELKHIRKKYDVPYRKGSAKEHFRSENAKFIL

SEQ ID NO: 3369 - protein, 338 aa, Priestia flexa
  source 1..338: note = Related to NZ_CP090431.1
MNFNNSRLYALSNKKVLADILGIDKKRLKNVIQEFVPYRLPPELSTVNGKQRNLYNPNDEHKRALRKLVRLLMQLEIPPYVYGGIKEKSHIQNASIHKKGKYLMLIDIQNFFPSTSDSYVYDLFKNKFGMANDIAKILTNFVTVPCENSDGRYLPQGYPTSPILSYLSYLDMYEELLYLAVENGMKFSCYYDDLTFSSDIFISKSLKRKCSQIIGKYHFKIHPTKSKLIMKKGVEVTGIFLNDLGEIKVPKKLLKKLQSSYEKVKEMGENPSTYIKSDFVDELNRLQGLIAAVKSIEVNRKVDLYLNELKYIRKKYDVPYRKSSIHKHFKTESAKFIM

SEQ ID NO: 3370 - protein, 337 aa, Bacillus sp.
  source 1..337: note = Related to NZ_CP036356.1
MDFSASKLFGISNKKYVAELLNVEKAKLKNVSSEFVPYKFEQSVKGKKRILYNPNDIHKAILKKITKMISQLDIPDYTFGGIKGRNYIDNANVHRDNSYLLLVDIKNFFPSTRDSYIYGLFKNKFEMPSDIAKIFTDLVTVPCENGEGRYLPQGYPTSPILSFFAYLDMYEEIFEVVRANNMGFSCYYDDLTLSSNKFIAKSVKRRVTRIIRKYGFEVHPTKSRLVIKKYTKVTGVILKEDEIVAPKALLRKLHDTHNLMRLMDKDCVKHTKEDFIDVCNKVQGLISAIKSINDQKKLDIYINTLTHIRKKYNVPYRKANIATSFNTDYGRLIGVSI

SEQ ID NO: 3371 - protein, 341 aa, Peribacillus simplex
  source 1..341: note = Related to NZ_VNKI01000001.1
MDFSTSKLFGISNKKYVAELLNVEKVKLKNVSSEFVPYRFEQSVKGKKRVLYNPNDAHKAILKKIVRMISQLYLPGYTFGGIKGRNYIDNANVHRNNSYLLLVDIKNFFPSTRDSYIYDLFKNKFEMPPDIAKIFTDLVTVPCESGEGRYLPQGYPTSPILSFFSYLDMYEEILKVTLENNMLFSCYYDDLTLSSNKFIAKSVKRRVTRIIQKYGFEVHPTKSRLVIKRHTKVTGVILKENDIAAPKALLKKLHDTYNLLLSLDKNCTKYTKEEFVDVCNKLQGLISAIKSINDKKKLEMYHNTLSHIRKKYNVPYKRANISTSFETDYGKLIGTLPRHIS

SEQ ID NO: 3372 - protein, 402 aa, Lentilactobacillus kribbianus
  source 1..402: note = Related to NZ_JABEQQ010000001.1
MKHAKHRKKQCLNDYYQALKEITIVKNLVYVVKAIQYLTILKIIIAIIFFTLQVIVKIISWVIPYLEIIYNFLSQVTSLFCCFQRGNVKMYWKSCRLYGVKSKRELSYLLKVPLESLKNIDENYISENFVYDGRELTNPSDKLKKVLERILGYLFMLRIPPYEYGGIKGRNAIQNVQRHVGHGFILRTDIRHFFPNTKYDNVFDLFRNKLNMSIDCATILTLLTTNVAVNASYRSLAQGYPTSPVLSLLSYLDLFNEISDYADEHKFTFTAYYDDLTLSSETFINKSHLRMIEHIIKKYGFDAHPQKTKLVKVSKVHSKIKITGVLLQKDGLYVPKKLYKGLYEYVQRLRSVLSGDVSISNEEKKTLIQQVRGCIAAIQVISDDESFQGYEDMARSLEKTII

SEQ ID NO: 3373 - protein, 332 aa, Levilactobacillus brevis
  source 1..332: note = Related to CP024635.1
MIFFLKLHLFFVAFKEVRKVYWKSCPLYRVKSKRKLSYLLKVPVESFKNVDENYISENFEKDGRNLTNPSDKLKVVLERILDYLFMLKIPPYEYGGIKGRNAIQNVQRHVGHGFILRTDIRHFFPNTKYNNVFDFFRNKLDMSIDCATILSLLTTNIARNSDHRSLAQGYPTSPVLSLLAYLNLFNEISSYANEKGFTFTAYYDDLTLSSNDIISHSHLRMVKHIIEKYGFEAHPRKTKLVNVSKFQSKIKITGVLLQKDGLYVPKKLYKGLHESVNQLNLALNSRQGISNKEKKKLVEQVRGCIAAIHSINDDTVFQGYEDMARHLEKSIV

SEQ ID NO: 3374 - protein, 321 aa, Levilactobacillus wangkuiensis
  source 1..321: note = Related to NZ_BOLL01000005.1
MYWKSCPLYGVESKRKLSYLLKVSLNSLRDVDLNYPSENFEEKGRNLTNPSPKLKTVLETILNYLFKLRIPQYEFGGIKGRNAVQNVQCHVGHGYILRTDIRHFFPNTNYNNVYDFFRNKMKMSIDCATIISLLTTNIAAGAQHRSLAQGYPTSPVLSLLVYLNLFDEIDYYARAHDFTFTAYYDDLTLSSTSIINKQHLRKVKHIIRKYGFEAHPKKTKLVIVTEIHSKIKITGVLLQKNGLYIPKKLYKKLHEAVSLIDPVLNGNLKYSDDDKKKLVEQVRGCIAAIEAISLENDFQGYRDQARHLEKTIDYEQLSENK

SEQ ID NO: 3375 - protein, 314 aa, Lactiplantibacillus plantarum
  source 1..314: note = Related to NZ_AP018405.1
MQFTTCKLYGIQSKRKLSYILKTSLASLKNVDLSFQSKNFYQQNRLLTNPSEELKVILQRITKYLFTIGIPEYEFGGIKDRSFVTNVEMHVGHGFVLRTDIRHFFPNTHYGDVYVFFHEIMNMSVDCATIMAKLTTYRCNQNYRSLPQGYPTSPILSLFSYLNMFEEINTYAVKNGFTFTAYYDDITISSKRFIGRSHLRVIIHILKKYGFQAHPQKTKLVKISKNSSRIKITGLLLQKDETLVPKKLYKKLHVAMKNIDSALKQSNSRLNKADAKKIVQQARGCIAAINTIGSNDEFQGYSDQIRQLEKRCYY

SEQ ID NO: 3376 - protein, 420 aa, Enterococcus sp.
  source 1..420: note = Related to NZ_NIBN01000001.1
MIKKHKIVQVKQWLKEKTCKDGKINFTKTCTFLAAIQVCLWLIEIICMLCGFIISTFVEIAPFLEAFFKILENLASTLSYNLRRSFFVDFYNSKLYGVSNKKYLSELLHLEKSTLKKIDKFYEVKPFLKKVNKKERLLYNPSMQHKIALKRIVKMLSFIGFPDYLCGGVPEVSYVTNASRHLEKNNLLLLDITNFFPSTKDSYVYDFFLNTLNQSTDIAKIMVNLTTAKSEDGDYRFLPQGYSTSPMLSFFAYHKMYERLNAFAEKNDLTFSAYYDDFTFSSKDFIPKYLMKEAIKIISDYGLSVNEKKTKLVKVNHTKITGVVVHKDKMSVPKGLFKKTYEHYLTLLDMDENTENYTQDNFIDTCNRMQGCLAAIQSVEPERNLEHYKNMIRYIRNKYDVPVERKKKDKYFKKKEVRQT

SEQ ID NO: 3377 - protein, 408 aa, Enterococcus faecium
  source 1..408: note = Related to NZ_UARO01000001.1
MINKHKIVQVKQWLKEKTCKDGKLDFTKTIAFLAAIQVCVWLFKIICRICGFSISIFIEIAPFLEAFFKFLENLASTLSYIKEGVFFYGFYNTKLYGVSNKKYLSELLHLEKSTLKKVDTFYEVKPFLKNINGKERLLYNPSSQHKIALKRTVKMLSFIGFPDYLCGGIPEVSYVTNASRHLEKKNLLLLDITNFFPSTKDSYVYDFFKNTLNQSTDVAKIMVNLTTATNNSGNSRFLPQGYSTSPMLSFFAYHKMYDRLNTFAEKNNLTFSAYYDDFTFSSNEFIPKYCMKEAIKIINDYGLSVNENKTKLVKLNHTKITGIIVHEDKMSVPKGLFKKTFEHYLTLLDMDKYPEKYSQYNFIDTCNRMQGCLAAIQSVEPERNLDHYKNTIRYVRSKYNVPVNKKNK

SEQ ID NO: 3378 - protein, 323 aa, Enterococcus villorum
  source 1..323: note = Related to NZ_MJEA01000001.1
MDFSNTKLHGVSNKKYLSELIHLELHTLKKVDQFYTVTPFVKNINDKERILYNPSLPHKIALKRIVKMLGYIGFPDYLCGGIPNVSYVSNASRHLMQKNLLLLDITNFFPSTSDSYVYDFFKNTLNQSTDIAKIMVNLTTAKNESNNVRFLPQGYSTSPILSFLSYFRMYEQLNDFALNNNLVFSAYYDDFTFSSNKFIPKYYLKETTKIINKYGLNVNERKSKIVKINHTKVTGVIIHDEKIKAAKGLFRKMYECYLTLLDVDVNNNFYSKDDLINTCNKMQGCLAAIQSIERDRNLEHYQNMIRYIRRKYDVPVSKKSINR

SEQ ID NO: 3379 - protein, 330 aa, Enterococcus faecalis
  source 1..330: note = Related to CP042216.2
MDFAKSRLYGVSNKKYLSELLQLELKTLKDVDSNYEVEPFFKEVNGKIRELYNPSDAHKRALKNIVKRLSYIGFPHYIYGGIPLVGYVDNASRHLEKEYLLLLDITNFFPSTKDSYVYDFFHNTMSQPADIAKILTNLTTIKKDEERFLPQGFSTSPMLSFLSYHQMYEELDVFSKRNNFTFSAYYDDFTFSSDKFIHTSKRREAIAIIEKYGLQVNKKKTRLTICNHTRVTGVIIHGDTKKAPKKLHKKMYDYYRLLLDMDKDPTKYTQDEFIDTCNRLQGCIAAIQSIEKERNLEHYKNTLRYIRTKFDVPVEKKKKHLYFKNVQINN

SEQ ID NO: 3380 - protein, 332 aa, Vagococcus fluvialis
  source 1..332: note = Related to JAAVMB010000016.1
MEFTKSKLFGISNKKYLSELLNVELKTIKDVDSNYKVEPFFKEVNGKNRELYNPSEVHKKVLKKIVKLLSCIEYPEYVYGGIPNVGYVDNASRHLEKEYLLLLDITNFFPSTKDSYVYNFFYNTMCQSSDIAKILTNLTTVKIENGDERFLPQGFSTSPILSFLAYHEMYEKLEGFAKNNKFTFSAYYDDFTFSSNKFIHANKRREAIAIIEKYGLQVNNKKTRLTICNYTRITGVIINGNIKKAPKKLHKKMYDCYRLLLNMDKCPEKFTQNEFIDTCNRFQGCIAAIQSIETERNLEHYKNTLRYIRTKFDVPIEKKKKHLYFNNILIAD

SEQ ID NO: 3381 - protein, 322 aa, Atopostipes suicloacalis
  source 1..322: note = Related to NZ_FQUF01000018.1
MEFKEKFKQKIVQIKQWLDSLEAKADNYIWLQFILIIVRLCDFIKVISIIALVIKCFLRLSYILLPYLIEFIEFIETLASTFSYKRRSFFMDFTQSVLYGVSNKKYLSELLHLELKTLKNVDKYYTVYPFEKKTNGKTRELYNPSNEHKRALKRMTGMLNKIKFPSYLCGGIQNVSYVDNASRHLNKDYMLLLDIANFFPSTRDSYIYDFFYNSMSQPSDIAKILVNLVTAKVNNHRHLPQGYSTSPVLSFLSYHRMYQELYEYSLHNCFTFSAYYDDFTFSSNNFIHPNRRRDIIKIIEKYDFKVNSKKTKLVIGNHVSSP

SEQ ID NO: 3382 - protein, 315 aa, Streptococcus sp.
  source 1..315: note = Related to AZYV01000015.1
MDFKRSILFGVSNKKWLADLLKIEKYKLTNISSNFIGKSFFREVNGKTRELYNAGLIHKRVLRLIVKYLQKIDVPAYLHGGIPGRSYVTNVEMHCENNFAIIVDISDFFPSTSAQKVFDFFRYDMNQSPDIAKILTDLTTVTKYEKSFLPQGYPTSPILSYFAYYNMYETLMRYAQANDFIFSAYYDDLTFSSKKPIPKRCMNRIIKIIESHKLKINKSKSKIRRINNVKVTGCIIVNGELKAPRKLQKETYDLYMIIKNDVLSTNDLSRMLKKFIGKISAIQMIEKNRKFPNYMKLIKDKQAELEELRVEKAKA

SEQ ID NO: 3383 - protein, 316 aa, Streptococcus oralis
  source 1..316: note = Related to NCUA01000007.1
MDFSKSILYEISNKKWLAELLKIEKNMLSNVGDNFVGKSFMKDVNGKTRELYNAGTIHKRSLKLIVKYLQKINFPTYLHGGIPGRSYVTNVESHSKNKFAVIVDISNFFPSTNAQKVFNFFRYDMNQAPDIAKILTDLTTVSKDEHSFLPQGYPTSPILSFLAYYHMYENLMKYAQNNGLTFSAYYDDLTFSSKKPIPKICLKEIVNIIESFNLKVNKEKSKVSKLDYTKITGCVIVKGELKAPRKLQKETYDLYRYLKNSNLSDEELLSLLKKFAGKISAIQSIEKERQFPNYFKLIENMKSELEERRISELDWL

SEQ ID NO: 3384 - protein, 311 aa, Streptococcus sp.
  source 1..311: note = Related to RBKM01001915.1
MDFTRTILYGVSNKKWLSELLKIEKSKLKNIRNNFNTVPFVKKVNGKNRELYNAGKMHKLVLKRIVKYLQSIDIPNYIHGGITGKSYVTNVESHKKNRYGVIIDISNFFPSTDAQNVYNFFRFDMNQSTDIAKIMTDLTTVSKGNKSFLPQGFPTSPILSFLAYHKMYELLNNYAKVRDLTFSAYYDDLTFSSRKRISKRCLREIVSIIESNSLEINLIKSKVSKLNYTKITGCVIVGNELKAPNKLQKETHDLFLKIKNGNLSETELSILLKRFLGKISAIQMIEKNRKFPNYLKLIEDKKRELMSRRND

SEQ ID NO: 3385 - protein, 324 aa, Sporosarcina pasteurii
  source 1..324: note = Related to CP038012.1
MYIQGGIFLFRESFLYELSNKKFLSEIIQVDLSVLKNLEDLLETEKWKPYKLENKKRDLYNPTVQHKRALKRLVRSLYSITYPTYLYGGIKNKSYIDNAAIHKNNKYFLIADIEKFFPSTHESYVYDFFRNKMQMSIDISRILTLLVTYQHEEDSYRYLPQGFPTSPLLSFLAYSDMFKELEQFAETNNLVFSAYYDDLTFSSASFISKHLKRELALILRRYGFNLSTEKTRFQKRKANNITGVIVTKDGLKSPYKLTKKLMRLSSDLDNNLKNSSLTKEEIIVQLRRIRGCIIAIQSVDPSRNLQVYEKQINEVKRVHDVTFS

SEQ ID NO: 3386 - protein, 385 aa, Enterococcus asini
  source 1..385: note = Related to JADMDV010000024.1
MKTRNEVKKTRGKHRKQLAQFTLCNIVVNFLMDFKDVLESLRAVFRLVSFVVDSLQYWIDLLYSLLFYFCEVYKMNYSTSPLFEVSSKKRLSYLLKTDISKLKQADISFSAPYFSKMKGRKTRQFFNPTDTQRITINAIKNCLEQIEIPNYIYGGIKNRSYIANARVHENAKSLILIDLKNFFPSTSDSYVYDFFKNKLNQPADVARILTIITTESGDHGRFIPQGYSTSPLMSFLAYESMYQQLNNLANQQQLHFSAYFDDITFSSSKYINKAVERSAKKIVRSFGLQINQEKSRTLFNNASKLTGVVITPTQIQASGKLHKQMIDNFDLLLNSLYSNSKPSKKDLLNLCNKTQGCINSIKAIEENRDLSYYTNKVKEVRRLIK

SEQ ID NO: 3387 - protein, 315 aa, Carnobacterium maltaromaticum
  source 1..315: note = Related to NRPS01000012.1
MILLKYTNSSLYGITTKKHLSYILKMNLGSLSNIEPLFCANSFSKKKNNKSREFYNPTLEQRAVLNRINVALCQIGAPNYAYGGIKGRSYIDNAKVHSGQKALFLIDISNFFPSTRDKYVYKFFKNKLAMSTDVATILTLVVTEKLFDSDKRFLPQGYPTSPLLSLFAYIEMFESINKIAINNDLKYTCYYDDLTLSSSSYIDKKILRQVKKEISSYDLKVNDFKTRALFNKASKLTGVVVSPEKIVAPGKLQLQMIDNFSKLMDAIYSGKMTTKIEINELCNKVQGCLASIKSIEPDRDLTYYVNKLKIIRQML

SEQ ID NO: 3388 - protein, 318 aa, unidentified
  source 1..318: note = Related to nan
MNYKNSNLYSVQSKAKLARLLNIDANKLRAVRENFSVDAFVVEINGKKRLLHNPSYCYKQILKRMLLLLYPIGAGDYVFGGIKNRDYIMNAKVHKNNTYFCLIDIKDFFPSTNSDFVYRFFRYKMNMSIDVAKICTLLTTVSNSETSRPDNLPQGFPTSPYLSYLSYLELFEQLNNISISKNMNFSCYYDDLTFSSPRFISKGTKRDIIKLINSYQLQVNSSKTRLLKNSNGVKVTGAVIRDNQLLTPNSLFLKLYKEYDNLLSEFYLNSFDQKKILNMCEVVDGILASVTRIELTENAEYIKNKVQIIRETSNATIS

SEQ ID NO: 3389 - protein, 318 aa, Exiguobacterium aurantiacum
  source 1..318: note = Related to NZ_MKXO01000001.1
MNFEKSILYNVQSKKHLANLLRIDARKLKAVREYFSVEPFVAEINGKKRLLYNPSYFHKQLLKRMLLLLYPIGAANYVFGGIKNRDYIMNAEFHKNNKCFCLIDIKDFFPSTSSDFVYRFFRYKMNMSIDVAKICTLLTTASSRETNKLDYLPQGYPTSPYLSYLCYLEFFEQLNNISVSKNITFSCYYDDLTFSSQHFISKGTKRDIIKLIESYQFQVNKDKSRLLKNSNGVKVTGAVIRDHKLLIPNSMHLKLYKTYDKLLNDFYLSSFDQTNIVNMCDAVDGILASISRVESIENIKHIKNKVRIIREISNAITS

SEQ ID NO: 3390 - protein, 346 aa, Exiguobacterium acetylicum
  source 1..346: note = Related to NZ_LFQN01000028.1
MSLQISLALAFIILLLEKEIENYMNFQNSILYGIKTKKELAKLLDINKKLLNDVNYHFSTKPFEANINGKKRMLYNPNDIHKEILKKLIELLSPIKAKEYVFGGIKNRSYIMNATLHKDSTFFCLIDIKDFFPSTKEKFVYNFFYNNLKMSSDVAKVCTLLTTEYDIQQRNRHLPQGYPSSPYLSYLCYFKLFEELNAISISKNLIFSCYYDDFTFSSKQSISIKTKREIMKCIKKYNLTVNTDKTKLVKNKNGIKITGVVIRNNDVIPPNKNLHKLYIGFKELKIKFENDFFEKDEVLKLCEKVKGLYEAVQKIKFNNDLTYMVSYIKDIKIFYEKNKSIKNKSD

SEQ ID NO: 3391 - protein, 317 aa, Bacillus sp.
  source 1..317: note = Related to NZ_WEIO01000005.1
MVDFKLSKLYGINNKKYLSELLKVELSKLKDIETHFSTTPFYQKNQKGKRRRLYNPHPDYKKVLQRLNIHLSRIVAPDYVLGGIKKRSYVMNANLHKENDYFLLLDLKDFFPSTRDNHVYYFFRNKLKMSQDIAKICTLLTTEPSEDRTFRHLPQGYSTSPYLSFLSYFDMYNGIKNISDNQNIIFSCYYDDLTFSSKKRISFKFKETISNIVADYHLTINKDKTRFYTKKRKVIKITGAIINKGQLLKAPNSLQKKMYIYFKELTQKTQQRPVEKEHIIKLCNKVIGCLTAIQHIEPKREFPHIRKKVKEIRKALR

SEQ ID NO: 3392 - protein, 315 aa, Bacillus atrophaeus
  source 1..315: note = Related to NZ_CP021500.1
MNYSTSKLFGVTNKKYLSELLSIDINELKNIEEFYNTSPFTKIIKGKERTLYNPPFKYKKVLNKINIYLQQITPPSFVFGGIKGRSYVMNATLHKDHSNFLLLDLKDFFPSTRDFYVYNFFKNKLRMATDIAKICTLLTTVKLGLNTQERNLPQGFATSPYLSFLCYYDMYNSIYKISNHKQIVFSCYYDDLTFSSSSYISKGFKRNIVKVIKEYGLVVNDKKTRLLFNKHGIKITGAIVKDNSLLSPNNTQLKMYSHFEKLMVLYSTDPTKQQEILELCNKVNGLLIALKIVETNRDLGYIKNKVKEIRKTING

SEQ ID NO: 3393 - protein, 316 aa, Paenibacillus marchantiophytorum
  source 1..316: note = Related to NZ_BMHE01000064.1
MLNIQLCKLKNLKSKKMLSLYLRIELYKLKDITKHYSTAPFEKEFDNGKKRMLYNPNKDYKQVLKRINLILQQIPIPNYVFGGIRERDYVQNATVHKDNNFYLLMDLKNFFPSTSDSYVYDFFKNKLGMSMDNAKIVTLLVTVPNEGNSGIRSLPQGFSTSPVLSYLSYSDMFEKIHDLAVSQGIKFSCYYDDLTFSSSNMIGKSFKNRVIEIVEQFNLKVNNKKTHLTRNINGTRITGTIVKNNTLFAPNKLQRKLTEKFNELEKMEQVDILNKREVIQLLCNTVQGCCSAIMSVERTRKFPHILRRVREIRRSV

SEQ ID NO: 3394 - protein, 314 aa, Paenibacillus sp.
  source 1..314: note = Related to NZ_CP010976.1
MIDYTVCTLYGVKNKKYLSELLKIELFKLKEIEKYYITLPFSKKMGNNKIRLLYNPSKEYKDILKRLNYFLQKIVLPDYVFGGIKKRDYIQNASKHKDNKFFLIIDLKDFFPSTSDTYVYNFFKNKLNMSIDVAKICTLLVTEQSEINTRYLPQGYSTSPILSYLCYFEMFNSINSLSINNNITYSCYYDDNTFSSKNIIIKDFKNKIVEIIKSYNLQVNPKKTILLKNTKGVRITGTIVNNNILSAPNPLQGKMYINFNKLVNSDLTDMNEAKNIIKLCNIVQGCSSAIKSIERQRKFPHILKKVKEIRSLIK

SEQ ID NO: 3395 - protein, 317 aa, Cytobacillus oceanisediminis
  source 1..317: note = Related to JAHHWV010000004.1
MEYQKCKLYGISNKKYLSELLHIDAFKLKDIDRHFSTDFYISKSRNKERHIYPPKPYYKKVLKRLNWYLSRIAVPDFVNGGIKNKSYIMNGLYHINSNHFLLLDIKNFYPSTSDYFVYRFFKNRLNMSTDIAKICTLLVTEPHPMHDNYRHLPQGYPTSSLLSFLAYSDMYIHLYNYAMLNNITFTCFVDDLTFSSDDYISKSFKRNINKIVRQYNLEINSGKTMHRRINKGINITGTYIKENKLFAPNRLQKDMSIAFSELCAAYEANPKDINQLKLLCNQLQGYIVNVKLIEEARSLDYMQNMITKVRRYIKNKA

SEQ ID NO: 3396 - protein, 319 aa, Paenibacillus sp.
  source 1..319: note = Related to NZ_LT985747.1
MDINNCKLQNISNKKYFSELIRIPLSHLKNVRKYYTTVPFTQMTQKNKPRTLYNPSTEHKRILKSINRHLQKIIIPEYVIGGVKGKSYINNGEIHNGQSFFCLIDFTDFFPSTNEKYVYNFFRYKLNNSVDIAKILTLLVTETSPSTGVDILPQGYPTSPILSYLSYHGMFSKLKILADANNYKFSCYYDDVTFSSNTFINKNFKKQVIRVTSDYGLKVHPQKSGIYILKNGIRITGTIVRKEGLYAPNKLQLKMINQFKELEQKAKVSADHDEIISLINRVQGTVSAIKSIEKDRSFPHITRRLKEIRHSSKINNIAK

SEQ ID NO: 3397 - protein, 309 aa, Exiguobacterium sp.
  source 1..309: note = Related to VWVR01000006.1
MDYSSCKLYKIETKKSLSYILQTPKSSLKNVNLCYYPKVNIFNKNTSSGKVRTFYNPTGEHKKALRNINRSLSVLPIPPYVIGGIKKQSIISNASKHMSSRFFLSMDIKDFFNHVPQKYIYSFFKNDLKMSIDSAKICTTLVTYEIDNHSILPQGYPTSPILSYLTNKKMFDKISQLSSQNNIIFSLYVDDLTFSSPNPISKKFENEVRKILNFYSYKVNSSKTKRQYITKPVLITGVIINNGELLPQIKHTKQMIDYIHNIKSRDLHEVNIDSWGKKIRGYYYYHQAFESYSGIKFPQIKNFLGNYKK

SEQ ID NO: 3398 - protein, 342 aa, Sinobaca qinghaiensis
  source 1..342: note = Related to NZ_RAPK01000002.1
MFIDEKNSLANLQKKTKLAKILNCDVEYLKNFSDYSEVKSFDKRVGPKTRRLFNADPNHKKILRKINKLLLSMNIPDYVYGGRPNRDYLSNAFLHKKNPYIQTADIRSFFPSTHESYVYGFFKNKLLMSEDVSKILTDLTTYSSSESPHYPEKSLPQGFPTSTIMSYLAYFDMFNGIYKQCRDRNIHFSLFVDDMTFSSDVKIPKSFIRHINNIVTQYDLSLHPNKIRRFSVDQPKLVTGVIIDPKTNNFHIPNKLHKKIYTNIQNFHSLNVNTYTDYVNLKRIILSLKGQLASCSRIDQEKTFNHIIKVIQDVEIHFIVPSVKGATHRQLYEEYISFVSFR

SEQ ID NO: 3399 - protein, 338 aa, Salinibacillus kushneri
  source 1..338: note = Related to NZ_FOHJ01000001.1
MLISQPHSLFELHNKRRLASLLKTDVENFNRIEERYTVYPFKKKVGKKVRTLFNTDQHYKSLLRRLNKMLCKTNIPDYVYAGIPKRDFLDNALIHRQKPYIQTADIQNFFPSTRDSYVYGLLLHKFHTSPDVAKIITQLTTYPLDSKTALRHIPQGFPTSTILSFLSYFDLFNGIYNLCKQNDIHFTLFVDDMTFSSHKRIPKSFLRHINSIVKKYDLQLHPSKIHRMNPYNYKTVTGVVIDPCTGLLKAPNKLQRKMFNNFKAIHNYSINTFNDYIQFKQLVLKLEGQLKSINRIEPNRQMPYITTVVKDIKRNFITHSVKGSSRDVLKSEYEFFVK

SEQ ID NO: 3400 - protein, 421 aa, Alkalihalobacillus gibsonii
  source 1..421: note = Related to NZ_JAEUZA010000002.1
MDDKSIGRDRNHYLETRPSRKEKHGRKKTKLRSVLIDVFIRTLLSRLFTEVFNIVSRFVLRIIDMISNLLYQKNKVIFMRIPENHAFYQLKSKKRLAAILGIDSPAFFKHLDLHFTCTEFSLTKNNKTRTLLNPSKQYKRILRKINQLLQGINFPTYLHSGVKQKNALSNACYHNSHSHICTMDIKNFFPSTSEAFVYKFFKDKFKMSEDVAKIMTLLVTYKNENEVARLPQGFPTSSILSYLVYFDFFNGVNALAHSRNMKFSIYVDDLTFSSNRAFTPSFLNRIVTIAQQYELTIHPDKTQFYNRHAHKKITGVILKQETVRAPLFIHKQINQHYLDILDCDLLTFSNFIKFKQKVIKTLGQIQYVRSIEGTHKYISIERNLNDFKEHFSVLSVKDKYRIQLKQEYKHFQGMFTHSIIF

SEQ ID NO: 3401 - protein, 350 aa, unidentified
  source 1..350: note = Related to JAFWLO010000012.1; note = Candidatus Saccharibacteria bacterium
MLNQGYPKLNLYTKKQLADAIRGKDLSFDSAMKLIDDCLINKDKYWSDNSEESKSNENKWVRNASGTPLGKLQKRIDQKVLALHDSELPIFIYGGVGKKGIKNAVIALQGKRNKRTLLKLDMSHFFEHISYGDVIKILVCHCGCGKDVAHIIAEIACIQSGKKSSNNTNEKVLARGFSTSSRLAVWRNLSLFRSLFYCMAKRLNKHDPRIAVYMDDIGITASRIDPVSLSSLYKDITKLIENSSKLVVNKNKTKIIDYLQHEYDVTDGHLLEDKIAQFEFLGIGIGRNRLYPGVKIRSKMAKLIKKSHLSDEELRTLKGQKRYVKFITGKKLGLPPNDASLNRKGLLWQN

SEQ ID NO: 3402 - protein, 331 aa, unidentified
  source 1..331: note = Related to JAFUEB010000001.1; note = Candidatus Saccharibacteria bacterium
MINQGYPKLNLYTRKQLANAIRDKDLSFDAAMKLIDDCLINKDKYWSDNPKESKQDDDKWVRNASGTPLGKLQKRINQKVLAPHDSELPIFIYGGVGKKGIKNAAIALQGKNNKRTLLKVDMRRFFEHITYEDIVRTLVCHCNCGKDVAQIIAEIACVRMGKKSLDNTNEKVLARGFSTSSRLAVWCNLILFRKLFYCISKRLKGHDPRIAVYMDDIGITASRVDPAMLSSLYKDIVNLIENTSKLEVNKNKTRIIDYLQREYDIIDGHLLEDKTAQFEFLGIGIGRSRLYPGVKTRSKMAKLIKKPNSSDEERRTLKGQKQYVKYITSKN

SEQ ID NO: 3403 - protein, 333 aa, unidentified
  source 1..333: note = Related to JAFWIP010000002.1; note = Candidatus Saccharibacteria bacterium
MNMINYPNFNIRSKNEIAKRISSRKLPQSEALALINDCLVDFDSLWVDNLKMSEPGKKKWVRDASRTKLGNLLSLIDKRIFAPYDTKLPSFIHGGVAGKGVKSAASSLLGKRRKRMLLKVDMSRFFEHVSSERLKYALIHKLGFSREAALIICKLCCVDAGPKNGLEKGKTIARGFATSNRLAIWCNLELFYRIKWLTEKRLGRYDARLAIYVDDIGITASRIPPKTMANFYSGLIVLVNKYGNGLEINHGKTRIINYLGNQFSVNGEPAVDNGGSPVKGSYEVLGIRMERNRVTAGRRTIGKIQSLKSRKSLTIPQKKSLKGLEKYKRYIGS

SEQ ID NO: 3404 - protein, 334 aa, Prevotella nanceiensis
  source 1..334: note = Related to JABZTB010000283.1
MKKKDNPLIPINIRSKNELAKRISNKYLSVKDALTLINEVKNNFDDLWKDNLKDSKPEENKWVRNAKGTKLGTLLSLINKRLFAPYDNYLPCNIFGGVSGKNTKSATLHLLGNKRKRTLLKMDLHRFFEQNDYEKVLDFFHKKAGCSLRMSHFFATICCVPLGQKGTLGTKRVIARGFSTSPRLAIWCNLQIFKQIDRKSRSMLKGFDPRVSFYVDDIGITASRVNLKKMTDVFHCVKSLLDGSGNYRLELNTKKCFIVDYLNNTYDTNGEYIGKGHFEHLGNELMRNYVTPGIKTMSKLRSDEAKLKALSGQKYKRCLNSIRARKRYVHYTKS

SEQ ID NO: 3405 - protein, 334 aa, unidentified
  source 1..334: note = Related to SHNI01000007.1; note = Candidatus Saccharibacteria bacterium
MALKPNNYPAIRIRSKNELAKQISSIKRNPSSSLKLINDVVGNYDNYWKDHPKLSQPEKGKWVRDSSRTNLGKLLRDIDKHVLRPHDNLVPKFIFGGLTGLNHKAAVLHLLGRRRNRTILKLDITKFFEQISQERVYHLFYSKCECSKVASNLLASLCCVPYGPKEKPEDYNTIARGYPTSPRLAVWCNLDTFIKIERVVTRELKGKDPRIAIYVDDIAITASNVSIEDMMKLYPKIKDILENGDKNQKLPLNHAKTKIVKHSGETYDIEGEYQGKWAFEHLGLQMNRNSVTLGTKTRRKLRNTNQDFKKSGRKDRIIRRKRKSLLLYKSYIEK

SEQ ID NO: 3406 - protein, 333 aa, unidentified
  source 1..333: note = Related to CP040000.1; note = Candidatus Saccharibacteria bacterium oral taxon 488
MKNNQRNYPKIAIRSKRELAKRLSDKRDSVEDMARLISDVKTNYDNYWTDHPTQSQPEKGKWVRDASRTDLGKLLKLINVKVLAPHDSLIPTFVFGGVSGRNHKVAVTHLLGVKRKRIILKLDVSRFFEQIKYERVYSFFLAKGRCGQRGARLLADLCCVPIGAKDNPGTYKTIARGFSTSSRLAVWCNLDTFLRLERLVKKELQGKDPRIAIYVDDIAITASGITKEDMMKLYPKIKTILESDKNQKLPLNDAKTKIIYHSGDEYDIDGIYQGKRGFEHLGLQMNRNSLTLGTKTRWKLANLTHRYKESRRRNTTIRKKRKSTLRYKEYVER

SEQ ID NO: 3407 - protein, 325 aa, unidentified
  source 1..325: note = Related to JAAXVH010000004.1; note = Candidatus Yonathbacteria bacterium
MTVRRYPKLNIRSKNELAKHLSTKKISKESRLALINDVLTNFDTYWKDNLHESKPQERKYVRNAKHTHLDKLLRAINEQVLSPHDNLLPEFIFGGIKGKNHIKAAGHLLGEKRNRTLIKLDIQTFFEKIDDKRVYYFFKNKCGCSSKASRILANLCCIPEGPKDKPGTKKVLARGFATSSRLAIWCNLDTFLKLDWMIKKELKGYDSRIAIYVDDIGITASRVGKQKILNLEQKIEMILCSDKNAELPLNKEKTRVIPHQEGMEHLGIILRRNKLSLGKKTRSKLEETKKRISRAKDKDKVKKIKTQKRSLMSYKRSVETYKPAK

SEQ ID NO: 3408 - protein, 323 aa, unidentified
  source 1..323: note = Related to JADLDS010000026.1; note = Chitinophagaceae bacterium
MKHEDGYPKLCIRSKNELAKHISHKGFLPDEALALINNVKSNFNDYWKDSKKASKPQNDKYVRNAKGSPLGKLLRKIDRLVLTPHDSLLPNFIFGGVKGKNHAMAAYNLLGNKRRRRLLKIDISRFYERVELHRVINFFQYKCGCQYRAAKLLAEFCSVPFGAKDSKNPRITIARGFATSSRLAIWCNLGVFKKMERLVMRRLKGHDPRISVYVDDIGITSSGVTKEQMENLRDEVIQLLQTHDKNQPLPVNKKKTAIQSHEEGLYILGIKLNRNNLTIGRKTHSRIHNFKHKLKVSKAKKERDKLKQLIRGISRYKNYVENM

SEQ ID NO: 3409 - protein, 328 aa, unidentified
  source 1..328: note = Related to PFPL01000018.1; note = Candidatus Magasanikbacteria bacterium CG_4_10_14_0_2_um_filter_33_14
MLNKTYPKINIRSKCELSKRISHKKLPRQDALTLINDVKNNFEKYWKDNISKSKPEKNKYVRNAKRTPLGKLLKIINSKILAPHDNIVPNFIFGGPKGRDHVKAAYSLLGTYKKRTLLKADLQGFFEQIDEKNVIDFFLKCDCDYKTAKFLGYICCVFDGQKGSNSKKRVLARGFSTSSRLAVWCNLDVFIELDRLVKKRLKGYDPRLAIFVDDIGITASRVPIDLMDNLYKEIKELFEGKKQKQPLILNDKKKDIKQHFEGMEILGSFLYRNKLKLGKKSFSNKQKIKSLLKEKNVTNMKKIKNKYRSIKQYEKYVEMQGKQKNKIL

SEQ ID NO: 3410 - protein, 320 aa, unidentified
  source 1..320: note = Related to LCFU01000010.1; note = Parcubacteria group bacterium GW2011_GWA2_43_17
MQNRRYPKIFIRSKSEFAKHISHKNFTKEDALKLINDVKINFEKYWKDSKRSDPKKEKYVRNAKGTPLGMLLKKINSLILAPHDKILPNFIFGGLKDLNHAKAAKHLLGNKRKRTLLKLDIKHFFEQIGLGRVFIFFQNKCGCSKKASKLLSSLCCVSLGPKGSNNPIKTIARGFATSSRLAVWCNLDIFIALNKLIQKRLKGHDPRIAIYVDDIGITASRINKETMEKLYIEIKKLFYSFDKNQLLPLHDIKDKGGIITHNENMQILGLQLNRNTLSIGSKTRSKKNKLMNKLKISTDKKILKNKYMSLIRYKNYIESL

SEQ ID NO: 3411 - protein, 308 aa, unidentified
  source 1..308: note = Related to MFKM01000024.1; note = Candidatus Jorgensenbacteria bacterium RIFCSPLOWO2_12_FULL_42_11
MQTSRYPKLYIRSKNELVKHLSHSKFPKKEVLALINDVLNNFTRYWRDNEYRSEPEKEKYVRSAKRTPLGRLLDNINKAVLAPHDKMIPDFIFGGVKNMNHAKAAKYLLGKKRKRTSLKLDITRFFEQISEERVYHFFRDKCACSKKAAALLASFCCVPEGPKGNASERKTIARGFATSSRLAVWCNLDTFIKLDRLIKKRLKGNDPRVAIYVDDIGITASRVSKEEMGKLSLEVESLLLNTDRNQKLPINKRKTKISSHEEGIEHLGLRLYRNRLSIGAKTKSKIDRIRNRSERKPLIRYKHYIEKI

SEQ ID NO: 3412 - protein, 321 aa, unidentified
  source 1..321: note = Related to DMVZ01000029.1; note = Candidatus Moranbacteria bacterium
MQSRRYPKLFIRSKNELAKHISHENFPKEKALVLINDVIANFDFYWKDSVHSDPLKEKFIRNAKHTKLGLLLRKLNTLVLAPHDKLLPKFIYGGVKEMSHAKAAKNLLGSKRKRILLKMDLKKFFEQVSSERVAYFFQNKCECSKKTSEMLSCLCCVPIGPKNNGASKKAIARGFSTSPRLAAWCNLDIFIKLERLIQKRLSGHDPKISVYVDDIGITASRLPREVMEKLRDEVSSFLLTADSKQQLEINQDKTIITSHEEGMEYVGARLYRNKLGLGKKAKSKRDQTKNKLKKNSDPKVRESLRRKLNGMNHHKKYIETT

SEQ ID NO: 3413 - protein, 322 aa, unidentified
  source 1..322: note = Related to JAHKLX010000106.1; note = Candidatus Micrarchaeota archaeon
MSNRYPQLGLRSKNEIAKRICSKKLSQNEALELINDVIKNFDDYWKDSKESEPRKQKYIRSAAGNPLNKLLKAIDAKILQPHDHLVPNFIFGGLKGTSHIDAAYSLIGRQNARTILKMDIKRFYKQITRERVFFLFYRKCGCSVKAANLLADLSCVPVGKKGSGSTKKTIARGFPTSSRLAIWTNLDTFLRLQWEVSRLLRKHDPKVVVFVDDIGVSASRVSGKLFKHVKHVAQTILAAYDENQPLPVNKRKTQVIPFSDGAEHLGLLLGRNKISIGRKTKSKMARVKNKIASAVGLERKSLLKKRSSYYSYKKQIKKAYDN

SEQ ID NO: 3414 - protein, 321 aa, unidentified
  source 1..321: note = Related to JAACWQ010000004.1; note = Candidatus Pacebacteria bacterium
MANIYPQISIRSKNELAKQISSVKLPFEGALSLINNVIENYDTYWKDSKKSEPQKRKYVRTAVGTPLDTLLKAIDKKLLQTHDKLIPGFIFGGVKGKSHIAAAYHLVGNRNKRILLKMDISRFFEKITRERVFYFFNKKCNCSVKASNLLADLCCVPKGKKGSTDPTKTIARGFPTSSRLAIWTNLETFLKLRHTVTKKLKNHDPQTVIFVDDIGISASRTSKESLDEIRKSVQKILLSHDRNQPLPANKGKTKIIPFSEGAEHLGLLLGRNKISIGRKTKSRMATIRSLVGKSRGETKKSLIKREASYYRYKKQIEETII

SEQ ID NO: 3415 - protein, 326 aa, unidentified
  source 1..326: note = Related to DOZC01000042.1; note = Candidatus Pacebacteria bacterium
MQTNSRYPIINIGSKNELAKRLSSKNFSKDKSLELINNVLANFDKYWYDSKKSDPEKQKFFRSSVGTPLHKLLKLINAKILKVYDKSLPEFIFGGVSDRNHILAARELIGNKNDRTLLKIDVSRFFEQITMQRIVRFFHQKCNCSLRASYLLASLCCVPGGQKDSSANMQKYLARGFPTSSRLAVWTNLDTFLRLKWETNKRLKNHDPKIVIFVDDIGVSASRVDIKTINCLKESLIGLLESYDINQPLPVNHKKTEIIAFKNGAEHLGMRLGKNKISIGRKTISNKSKLNNSIKTSDGLGKSLLLKKKAAYYQYLKQIEQVNDMA

SEQ ID NO: 3416 - protein, 323 aa, unidentified
  source 1..323: note = Related to PFOQ01000006.1; note = Candidatus Pacebacteria bacterium CG_4_10_14_0_2_um_filter_40_20
MKKNNYPQFGIRSKNELAKRISSKSLPANEALILINDVLENHEGYWKDSKMSEPEKGKYVRSCVGTPLHRLLNLIDKRILRPYDKLAPHFIFGGLSKKNHIQAAHYLIGSKKRRSLIKLDIKRFYEQITQERIFYFFYKKAGCSVRASRLLAYICCVTQGAKGNPGVQRVLARGFSTSSRLAVWANLDTFLKLRWKLQAELGKNDPKIAVYVDDIGISVADVSQTKLEEIALMMAEILESSDANQPLPINNEKLDIMSFEKNAEHLGLRLGRKAIFMGNKIMSKIRKIKNDYQRAENNTKFKLMSKRIAYRLYQKQIDKQNEQ

SEQ ID NO: 3417 - protein, 323 aa, unidentified
  source 1..323: note = Related to JAHIUG010000089.1; note = Patescibacteria group bacterium
MFEQLRYPKIGIRSTCELAKRISDSYLPYDKALLLINNVILHFDEYWHDSKSSQPKKEKYVRSAVGNQLGELLRRIDRKILAPHDGKLPEFIFGGLSGRDHIQAGKRLLGKKRKRVLLGLDITRFFEQIKESRISYFFHKKCGCSLEASTLLARICCVPLGPKGGSSTNRVLARGFATSTRLAVWCNLDTFLRMSWKAKRLLRHHDPKVMTFVDDIGITASRVSHEEMKEIEKKVISILSHFDKNQPLPINPTKTKICSFSNGAQILGLGMGKRLSVGARSRSRISKTRLALKLATSPLEKRYLLQKKRGQDSYRRQVAQASD

SEQ ID NO: 3418 - protein, 325 aa, unidentified
  source 1..325: note = Related to VMFR01000001.1; note = Parcubacteria group bacterium Gr01-1014_31
MFSRPRYPRLRIGSKNELAKTISDSALPYPQALTLINDVIRNFDYYWRDNSENSQPNRGKFVRSAARTPLGVLLERIDKKVLAPHDRLVPNYIFGGMTGRSHIQAARSLLGQERGRILASLDITHFFEQIREQRVFFFFYRKCGCSPRASRLLASLCCVPVGQKGSMSTEKTLARGFATSTRLAVWCNLDTFIHLDREVKKLLKKYDPRVAIFIDDIGISASRVSQEKISAVVKIVEKILSDFDNNQRLPVNPAKTKIRTYASGAEHLGLKLGRNKLAMGSKSRSRRDSVINLLKKRGAYSPTRARRLLLKKQAYQRYQGQIRSA

SEQ ID NO: 3419 - protein, 328 aa, unidentified
  source 1..328: note = Related to PFMK01000011.1; note = Candidatus Gottesmanbacteria bacterium CG_4_10_14_0_8_um_filter_37_24
MQNNGRYPRINLRSKNELAKRISDKSFSFQSSLKLINDVLKNYNDYWYDSRQSQPEKGKFVRSSVGKPLGKLLKRINRKVLIPYDKLVPNFIFGGISKKDHIQAAYSLLGKQKNRMLLGLDISTFFEQIRKERVFYFFHAKCGCSARVSRILASVCCVPAGKKGSGSKVEVLARGFSTSSRLSVWTNLDTFLRLKWVTDRNLRNHDSKIVIFVDDIGISASRVTKNNLEILSRKIQAILSDFDRNQKLPINNKKTKIRSFTEGVEHLGLRLGRNKITAGYKTKKKLDKIKTEIKSSSGLNKKDLINKVKAYYVYKKQIKNVYSNSSNV

SEQ ID NO: 3420 - protein, 329 aa, unidentified
  source 1..329: note = Related to PFPK01000038.1; note = Candidatus Magasanikbacteria bacterium CG_4_10_14_0_2_um_filter_37_12
MPLEKRYPTINLRSKNEIAKRITDNKLPFKESIKLLNRVINNHSELWHDVISFSEPSKGKYVRSAKNTPLGKLLSLFDKKILRPHDKLIPKFIFGGVSGGSHVQASYHLLGICKKRTKLGLDITKFFEHNSEQRVFYFFHKKCNCSVQASKILSKLCCVPLGAKGSNNSKTLARGFATSTRLAVWCNLDLFLRIYWEAKKTLKYKDVKIAVFIDDIGISASRVDKRTMEDLSLKIRDILENYDKNQCLPLNNKKTEVKSYLDGEIEHLGLILGNKKLSFGRKTRKKLSDLKKDLDNKQIKGKQRKSLYTAKKSYYSYKKYIKNPIDDKK

SEQ ID NO: 3421 - protein, 326 aa, unidentified
  source 1..326: note = Related to JACROC010000008.1; note = Candidatus Harrisonbacteria bacterium
MRKEARYPKINILSKNELAKHISGSKLRFSDALKLINNAADNFNNQWYDSEHSEPEKEKFVRSAVGTCLGKLLELIDKKVLAPHDNLVPDFIFGGVSSKNHIQAAHHLLGNKRERVLLRLDIKRFFEQIHEDRVFNFFYAKCRCSARASRLIARLCCVPLGPKGQGSATKSLARGFATSPRLSLWCNLDLFLRLSWMVKKELRGHDPKIAIYVDDIGVTASRVSLERMEEISRIAENILENFDSNQKLPINPSKKEILSNVDGMEHLGLRFGRNKLSFGGKTRFNLNKIYSKLKSPLSKSEKLRLLNQLRSYQRYKQQIVKTSNAI

SEQ ID NO: 3422 - protein, 323 aa, unidentified
  source 1..323: note = Related to JACQFD010000021.1; note = Planctomycetes bacterium
MLKDRRYPVIALRSKNELAKRISGKDLPYPDALALINDVLQNFDAYWYDSDRSEPKKEKYVRSAIGKPLGKLLKLIDRKILAPHDSKVPGFIFGGLSGKNHIQAAYHLLGEKRKRTLLRLDIKGFFEQIHEERVFHLFNKKFGCSVEAAQLIARLCCVAVGPKNSGSTKKTLARGFATSPRLALWCNLDLFLRLQWKMKRVLRHHDPRITIFVDDIGVTASRIEEDQMRKFSTELENILAHHDPNQSLRINPQKKEILTAGMHKEHLGLQLGRNRLSIGKKTRFKRNEIAKALKQPQSEADKKALLKKRHSYFAYQEQIKNIS

SEQ ID NO: 3423 - protein, 325 aa, unidentified
  source 1..325: note = Related to MFAQ01000041.1; note = Candidatus Collierbacteria bacterium RIFOXYD1_FULL_40_9
MSDLRYPQINLESKNELAKRISDRYLPYSESLKLINDCLENLDHYWYDSRASEPEKEKFVRSARGKPLAELLKRINLAVLAPYDRLVPDFIFGGLSYRNHVQAAANLLGFQKKRTLLKLDISRFFERIGDGRIFHFFNKKCGCSVRASRLLSKICCVPKGPKGSGEVSKTLARGFATSPRLAVWANLDIFLKIDLTVHKMLRGHDPRLVVFVDDIGISASRVEMSKMQEVKEKVIDILQNYDPNQTLPVNQDKTKVIPFQKIPEHLGIKLGRNKLSPGKKTQLRMKNVSLLLGEAKSKKERDRLMIKKQAYRQYKRQLSSVNIPK

SEQ ID NO: 3424 - protein, 334 aa, unidentified
  source 1..334: note = Related to JAGOON010000014.1; note = Candidatus Pacebacteria bacterium
MGKQYTHKHPKLNLRTEKDLLRFLNAAKTVKTKNKTLKKQVTSKDLHFLSENAHLEWSDHPTESNPIKKKYVRFVKPGSSLNITNRRLNAALKLTLDKKVPGIFYGSVSKKSHIQAAEVLCNGKNTTIISLDITRFFESISPSRVARFFGKAGCSPEIIKVLVDITCVPLGSKNEPLSDYSLARGFPTSPRLALWATYEIFVKLNRVLLKNFPHLSPKMVIFVDDVGISIKNATIIDVEAIKETAFSIIENDKNGINLEVHKKPPKLKVRHISQTAEHLGLVIGKKSLAPGFKTRVKIGDVKTKLSDKSLSKTERETALQHKRGLMNYKRSVRP

SEQ ID NO: 3425 - protein, 335 aa, unidentified
  source 1..335: note = Related to JAGQLY010000031.1; note = Candidatus Kaiserbacteria bacterium
MRKQFAHKHPKLNLRTEKDLLRFLNASKEIKTKRGTLKRPVLFKDLTYLYEEPRLDWSDHPTESDSTKEKYVRSIKPGSILNTANRRLNEALRRTLDEQASQIFYGSVSKKSHIQAAGSLCNGKNTTIVSLDITRFFESISSDRVARFFCKAGCSPEIAKKLVAVTCVPVGPKEKPEEKYSLARGFPTSPRLALWSTFEIFVKLNRVLQKKFAHLSPKIVVFVDDIGISLKNATGEDIQAVKEIAFSVIESDTKDLSLKVHKNPPKLKIQHISENPEHLGLVIGKKNLSLGFKTRSKIGDVKVRLSDRTLSQEDRYKALQNKRGLMNYKRSITRP

SEQ ID NO: 3426 - protein, 335 aa, unidentified
  source 1..335: note = Related to nan
MRKHYTHKHPKLNLRTEKDLLHFLNARKTVKLKGKTVRRQVATKDLSYLDKNSRSDWNDHPSESKPENGKYVRYIKQGSTLDISNRRLNAALKQTLDKKVPSIFYGSVSKKSHIQASRALCNGKSTVIISLDVTRFFESVSLARIFRFFRKAGCSTEIADILVELTCVPLGAKEHPQSGFSIARGFPTSPRLALWATFEIFVKLNRILQKRYGHLSPKLVVFVDDVGISLKNSTPEEIEEIKALSFETIESDKNGIHLVVHKEAPKLKVQSIDQNAEHLGLVIGKNSLSPSFETRHKIGYVKAQLSKQTLSTENRDRARKNKRGLMNYKRSVSNG

SEQ ID NO: 3427 - protein, 343 aa, unidentified
  source 1..343: note = Related to MFLF01000011.1; note = Candidatus Kaiserbacteria bacterium RIFCSPHIGHO2_02_FULL_50_50
MKKNYTHTHPKINLRTEKDLLLFLNAKATKDRRYKIPRKLVSQKDVAYIRQNVHLDWKDYAYGGDSLKFESAAEKGKMTRSIKQNSCLDVVNRRLNASFRRVLDKHVPDVFYGSVSGRTHILAAKELTNGKKTVFLSFDIQKFFESISSNRVQRFFVKAGCTKEIADFLVSITCVPLGVKGLQKDKLSLARGFPTSPRLALWCTFEIFSKLNRILQKSFSHLFPKIVLYVDDIGISLKNPSEDEIVQIRDLVFELIESDKNGLSLTVHRDPPKFRVQKVEGRAEHLGVAIGKSKIAVGSKTVRNIAIVKNQLLSTNDKDERGRVLQKKRGLMNYRKTVTKNNL

SEQ ID NO: 3428 - protein, 319 aa, unidentified
  source 1..319: note = Related to AMFJ01028863.1; note = bacterium (gcode 4)
MCKLNIYSLKTLSERSWISRDFLLSCSDGSGRFRKKFFSDHKNSKITDDITTCKYIRVVKYGSQMQKFHKWINWELKRFDSKLPLTIYGWVEEKSTIDAISIHIRGVPFVFIKSDLSRFFESIPKEQIFSLFCGKFNCDKIVAEVISNSITFPQWPLGSKGELFLARWLHVSSRIAVWSALNFFKDLCYFFQKKYKKYKPKISYYVDDIGISLVTTDQIIIDEFMADLVWFVWQIHKNSDFLNLHPDKTNCTIIKDNNDFVEYLWGKIYMNRKDISNKTTEKTKQLYFLYKKAKTIEEKNFYAKRLTPLRSYKKRMRSS

SEQ ID NO: 3429 - protein, 302 aa, Pantoea ananatis
  source 1..302: note = Related to NC_016816.1
MTKQHKIGLVKVLEIVTTILAFINESWTFVEKVLSLFNIVPNYMNSSMKPASDWLHKFEIKENRWVFIPNEDTLTLGRKIHKYIKSKWKFPLYMFHLRDGGHVAAANYHIENTYFCLIDISDFFGATSQSRITRELNKFIPYDRAREIAKLSTVKNLNSNGLKKVLPYGYPQSPILASFCFRQSYCGKVIHTLSKSGNISISVYMDDILLSSDDIEQLVYAFNSIKTALKKSGYTVNEAKTQSPSTSVNVFNLVLSKNLLKVSSIRIVEFLQAYISSQNPAEKKGIASYVGSVNKTQAKLFQ

SEQ ID NO: 3430 - protein, 302 aa, Klebsiella pneumoniae
  source 1..302: note = Related to CABFWX010000001.1
MTKQHKIGLVKVLETTTVVLAFINESWTFVEKVLSLFNIVPNYMTLSMSTPSDWLHKFEIKTERWVFVPSKKTLERGRQIHAYIKQKWKYPRYMFHLRNGGHVAAANFHLKSNYFSLIDVSDFYGATSQSRVTRELGRLVPYVKARQIARLSTVANPNRNGFKHVIPYGYPQSPILASLCFHHSFCGGVISSISKSERVFVSVYMDDILLSSDDMNLLVEAFDTVRQALRKSGYKVNENKTQSPSPKIQVFNLELGHNHLRVTPKRIVEFLKVFISSANEHERKGIASYVGSINKSQAKLFR

SEQ ID NO: 3431 - protein, 309 aa, Serratia marcescens
  source 1..309: note = Related to CP028949.1
MKKFKLGLVKVLWGVYALYHFLKDFVPFLNESISLFEKLLSYFNIALNYLFLRRFFLMVKWESKFEIKKDRWVYVPTDEVRLYGEKLHNYLRKRWVPPLYFYHLRDGGHVACAKKHLANEYFALIDIKNFFESTGQSRVTREIKNYFKYNDAREIAKLSTVRNPLPVGPKYIIPYGFPQSPILSTLCLHKSYCGGLFKKIDSSFGIDISIYMDDIIISGNDLELCNLNYKLLCDGLIRSGYEVNENKSQAPSKSIRAFNLELKKDSLRVLSSRVIEFLVAYIKSDNPHVRKGIASYVGSINAEQAKLFR

SEQ ID NO: 3432 - protein, 312 aa, Bradyrhizobium ottawaense
  source 1..312: note = Related to NZ_LT629693.1
MRKGALRRIPRGFTAIPAKWRWGRFHLAPIVIFLENMRNVARSFLKDGTRYFVLTKSYAGWRTFSEGGRAAYDGEEEWRLLKERVFSHWQPNAAFTAFAKRAHVAALRPHLVNKCFAVIDLKGFFDHVTRTKVCRALEAIGLARSSAFKIAGESTIRQGDKCTLPRGFRQSSLLATLVLEKSLFGSALTGNRFESKVTVYSDDIIFSSNDFETLADEHSQAIALLRRSHFAINPTKTQTARAEVDIFNLRMSHRTLRFTDERMWKFLEQAASFVKGEDAEHKLHLYEKLFGDYIRSINPEQEKRLRTSLGLP

SEQ ID NO: 3433 - protein, 310 aa, unidentified
  source 1..310: note = Related to PFDU01000094.1; note = Candidatus Peregrinibacteria bacterium CG10_big_fil_rev_8_21_14_0_10_54_7
MPKGLNFQRKSDIVKRLGIEPKVLEEILYDKEKLFYVEEEIIKGKTRDFHKCRGSLYGFLPQLNKAIMSLDALPPELCGGVRGKSIFKSASQHQKKKFVLKLDLKDFFHSVKPYQVQAVFERLGCTPSMSKLLTYTCTANNHLPQGFSTSPILAAHVLAPFVEDMRALLRPHHLSFTIWVDDITISGYTNPVRLLPTIRSICKKHKVHLNEKKRKLLRAGKQTQEVTGVRISYDKLSTGATFFRDTERMVYVLKKFGWHEVKKKFAFNVTDKRKVIQKIKGRINHIRQANAHQAGKLDTALRDTLEVQAH

SEQ ID NO: 3434 - protein, 319 aa, unidentified
  source 1..319: note = Related to MFXY01000035.1; note = Candidatus Peribacteria bacterium RIFCSPHIGHO2_12_FULL_54_10
MNDTRLNLRSENDVVNRLHLRDKKFLQTLCENRDRYFQKRMLNTGTKEREICIPHDPLGHFLRKFNAVLRTLPVPPECYGGVPGRSVKDNASKHTNKRFVMNLDIQNFFPSVTANQVFEVLRRHGCYRETSELLTKLVMIDNRLPQGFNTSPLLSIQVLTPIIEELRPLLSEQDATFTVWIDDIAISSDKSPEPLVKRIAEKCRRHGFRLNTDKYHCGERGVSVQEVTGVVINGDELRPAGGFIKQTEKMIHVLVKYGLEDLNAAFDREFLDTAKAQAHIEGRIVWIDEFDSAKADKLKQQLHKLVVPASFRSVLVTAQ

SEQ ID NO: 3435 - protein, 301 aa, unidentified
  source 1..301: note = Related to PFDR01000059.1; note = Candidatus Peregrinibacteria bacterium CG10_big_fil_rev_8_21_14_0_10_49_10
MRNALNFQFPNQIARRLKIKSSMLQNALHNMTDLYCHQERDIDGKVRDIYMPYPPLKTVQRKLHLTLRKIPFPAEFIGGMPKHSIFDNARRHVGRNFVLNLDLKNFYPSIKPSQVESVFLRLGCNKGMSRLLTYLTTADGHLPQGFPTSTMLSALVLVPLADDLRALLQPKFVFSFWVDDLTISGDSDPTPLIPAVRKLCRKHGFRLKEEKKHLGVRGKVPQEVTGIIISGKDFSPANGFLPHTKNMLRALNKEGWEYLNTIERWGCTSKREVTSRLKGRIRFIGQFDKSRAEKLYDSLNM

SEQ ID NO: 3436 - protein, 320 aa, unidentified
  source 1..320: note = Related to SABB01000002.1; note = Candidatus Saccharibacteria bacterium
MPRCKIMVTKSANKTIISTRRLCVEILQIHKDELLSLVADTDSYYRPYVQKKKRADGTAKERRIEPSYGYLKTAQRLVNKRILKPAMADLPIEIMGGRPGVSVVNNANHHAQSKSLMKYDVKNFFPSIKYGHVYHIFRYRLGFCEEAANILTKLTTYPSTGDVHVPQGAPTSTSLAMFALEPMCDRLKVYCDDNDLRSSIWIDDITISGDPKALRQHRPRINHIVNGTPFQIHPDKDTGVLVKGGKAGHEKGRKITGVVIDNNNRLTIGRQKLRSLRSKVRRSKVVSDKLEGSLQFLRHVNPTQGNKLLREYRSKHKRSA

SEQ ID NO: 3437 - protein, 305 aa, unidentified
  source 1..305: note = Related to NZ_CP040004.1; note = Candidatus Nanosynbacter featherlites
MVNQKCITTTKLCRDILKIPKEELLALLADRQSYYVPFEKKKITAGGRVKIRTIEPPHGYLKRVLKKINITVLQPQMERLPYGVMGGRKGYSVVDNAKYHASAPALMKYDIKDFFPSIKYADVFHIFRYQLNYCEEAANILAHLTTFENSQHGVHVPQGSPTSMSIAIFAVEKMSCAVDDYCRENGLKFSIWVDDITISGPYDKLCRHRSTINHILNSTHYRINPDKDSGIVKKGQKGRSVTGVIISNDGRLTVGHSKLSRLRRQVKRSTRPSDKLRGRLQFLLQVNKHQARRLIHEYAEKHRKN

SEQ ID NO: 3438 - protein, 305 aa, unidentified
  source 1..305: note = Related to JAHJMQ010000120.1; note = candidate division Zixibacteria bacterium
MNTSSKKVCLWGSVEALAKTLKVPVDDLFAWCGRKKRFVTEEERLIGAKYRQLKVPHGEFKELLRKIDQQLKRCPIPNYFYGSRKGVSAIDCALVHLHSPYILKLDLKDFFPSTDYRRVSNSLSQVCDKEAVLKLLTELCTFQHHLPQGFPTSTTIAELTLIPLAQRLFGMCNQYGLQLSIYVDDICISGSPVLLRLEARILRMFQEMHFRLNLKKKELRSKQEGIAVTGVFMQNGFCTTKPKFDEKLLKKIWAYELAQMICDSTLAEDLLGSIRGQLLWTRQLDESKYLCFLSELRQGQMMSGT

SEQ ID NO: 3439 - protein, 308 aa, unidentified
  source 1..308: note = Related to QZJA01000016.1; note = Candidatus Parcubacteria bacterium
MKKRQLLNINTLNELALQLEIPYDFLIKMADRMDNNYYTFDKKLIKKNGKIKIRKFFEGNNNLKIIHRKINQLLDHINYPDSIQGGIVGKSIVTNASIHASRKYVANFDISNFFPSIDYRVVYRVYRFLKCSPDVARILTKFTTADAHLPQGFGTSPKVSGLVLFEVDMRLNKLLSRYGLKHSFWIDDLTISGDHSIKKFKNIICKIFQQSGFKLNHDKTEFTNSKQKQVCTGLTINYQPNADKAIRDKVRKELFLCKKFGVENFLNEHGYSIDKDKYLRSMAGKISFLYSINPKYLTYKKTFQEITT

SEQ ID NO: 3440 - protein, 305 aa, unidentified
  source 1..305: note = Related to DOZJ01000002.1; note = Candidatus Falkowbacteria bacterium
MKKRQFLKINTVKELSYQLGLPEAFLISSANKIDNCYRKFTDKDKKGKERTFYVANENLKKVHQKINKLLDTLDYPINIQGGIAGRSIVTNASVHVGKKYVANYDIKNFFPSVNYKIVYRSFEKQKCMPEVCRMLTRFTTADGCLPQGFATSPKVSGLVLYSSNFRIETLLKPYDLIHTFWIDDLTVSGNRPIKKFQKLFYKIFKQEGFSLHDDPKKARITDSQHRQTCTGLIINQELNPEKGLKDKVRKELFLCKKFGVNNFLKEHNSPFDKDRYLRKLAGNISFLCSVNKKNFIYKEQLKLIK

SEQ ID NO: 3441 - protein, 316 aa, unidentified
  source 1..316: note = Related to MFGH01000021.1; note = Candidatus Falkowbacteria bacterium RIFOXYC12_FULL_34_55
MKRKKYFKFYSIKSLAKHLGVSEGFLIDLANKQDGNYKFCQGVMIKNKSRDLYKANTSLKIVLNLIDKKILNYYDFPKTFQGGIRGRALRDNAQFHTGKKYILKIDIADFFPSISPEKIFKTLKQLQIADKPASLLTTLVTVKNPHPHLPQGFCTSPKIASLVLLNLEKRFHNLFKEKKCDYSFWVDDITFSSDMPIGKFKNLILKILKDEGFSVNQKKIELLTNKERMVVTGVVVNSFPTLSNDRKKEIEKPLYCLVKFGIVDYFKKNKIEISEASITKIRSSLLGKINFAKSINPELGIKYKKDFLKITWELKK

SEQ ID NO: 3442 - protein, 383 aa, Lampropedia sp.
  source 1..383: note = Related to STFG01000036.1
MNALCKALDLTLDEISEALSLTAADRYKERSVPKPNGSIRIVHNPHHLIRKIQRRINRRIFSNPDIILWPDHVFGSIPNEEFSDSPAAEKDYVNCARQHCRAKSVLSVDIKDFFDNIHRDRVHQIFSDFLKCEEEVSDVLANICCRGDNLVQGALTSSYIATLCLYSNEGLVVERLRNKGVAYTRLVDDITISSKIADYDFSFAMRQIERMLDEFGLPLNTNKTKLQNAGMQPLIVHGLRVDFDQPRLPPDEPRRIRAAVKNLELLASTPGYRASRAYRKDFNRCLGRVNKLDRVGHKQHKVLLARLRSVIPLPSHMDIERAEQQVTRLQNDSAKAGYKETYWFYRRWYVASQRIGILKRSFPGKASELRERLNQLRPIKNYE

SEQ ID NO: 3443 - protein, 402 aa, Rubrivivax gelatinosus
  source 1..402: note = Related to NSLA01000001.1
MHSPIRLQPIKVARGSVPTLAALCSALDIQRAELDAALALTAAERYQVRTVPKADGSERIVHNPHHLIRKIQRRLNRRFFANPDVIKWPDHVFGSIPNDDLSTSPAADKDYVNCARQHCGAKSILSVDIKNFFDNIHRDKVRDVFTLFFKYPTDVAEALADVCCKEDHVVQGALTSSYIATLCLYDVEGLVVSKLRHKGLVYTRLVDDITVSSRVTGYDFSYALRLIESMVDSAGLPLNTRKTRIQSVGMRPLLVHGLRVDFAEPRLPPEEPRKIRASVKQVELLAASPGYRASRAYRRDFNRCLGRVNKLARVKHTQHLPLLKRLQKIVPLPSHKDIERAEKQITRLERDSLKPGYKDTYWFYKRWHVASERLTILKRSFPKTASDMRDRLRKLHPKKAYE

SEQ ID NO: 3444 - protein, 402 aa, Comamonas sp.
  source 1..402: note = Related to JAHUXB010000001.1
MTYTAKLHPEKVALSSISNIDNLCDALDISVAELTAAMKLSPEQRYTSGVVPKKDGSDRIINNPHHLIRKIQRRINKRIFSDQDVISWPDHVFGSIPNDDLSISPASDKDYVNCARQHCCAKSVLSVDIKDFFDNIHYEAVVSIFESFLKYPADVADALANVCCKGEHVVQGALTSSYIATLCLHAVEGDLVKRLRHKGLVYTRLVDDITISSKLANYDFGFSLKQVEKMLHGADLPLNDGKTRIQHASMQPLIVHGLRVDFSQPRLPPSEPRNIRAAVKNLELMANSPGYRASRAYRRDFNRCMGRVNKLGRVKHNQHSELLARVRRVLPLPSHKDIERAERQVDRLEVDFLKPNYRSTYWFYKRYYVAMERLGILKRSFPKKAAELRARLIVMRPSGKYE

SEQ ID NO: 3445 - protein, 402 aa, Burkholderia ubonensis
  source 1..402: note = Related to NZ_LOXM01000118.1
MAHTPRFHPVKESAGSIADVASLCVALDVALSELSSARNLPADQRYFRREVRKKDGSIRVVYNPHYLIRKIQRRINRRIFSNSSVVSWPDHIFGSIPNDDFSESDASEKDYVNCARQHCGAKSVLSLDIRDFFDNIHREIVRGIFSRFFNYPDDVSDALADVCCMGDHVVQGALTSSYIATLCLWDVEGQVVRKLGYKGLVYTRFVDDINISSKVARYDFSYALRLVEEMVSEAGLPLNGKKTKIQYASIKPLIVHGLRVDFDQPRLPPEEPRNIRAAVKNLELLAASPGYRASRSYRKDFNRCLGRVNKLARVGHQLHEFLMQRLRKILPLPSNMDIERAEKMISRLERDAVKSGYTETYWFKKRYFAASERIGILKRSFPNKAKELREKLKNIGPSTYRE

SEQ ID NO: 3446 - protein, 401 aa, Ralstonia insidiosa
  source 1..401: note = Related to NZ_PKPC01000024.1
METPKFNPVKEAPGSISSIAGLCSALDISQSELDEALALPVEERYKKGEVPKKDGSMRIVNNPHYLVRKIQRRINKRIFSDSNVISWPDHIFGSIPNDDLSDSVAADKDYVNCARQHCGAKSVLTLDIRDFFDNIHRDRVFGIFFKFLKYSEDVSNVLADICCKGGAIAQGALTSSYIATLCLHETEGDLVRRLRYKNLTYTRFVDDITISSRVANYDFKYALGLTESMLSEAGLPINGQKTKIQYTSMKPLIVHGLRVDFDQPRLPPEEPRKIRAAVKNLELLAAGPGYRASHAYRKDFNRCMGRVNKLGRVGHSQHSILLNRLRKILPLPSHMDIERVERLIARLEKDVAKPNYSETYWFRKRYYAASERIGILKRSFPKKAEEFRGKLREIRPSSQYE

SEQ ID NO: 3447 - protein, 402 aa, Variovorax sp.
  source 1..402: note = Related to VIVL01000004.1
MTQPQRFDPIKVSAESIATIDSLCGALGIGAAELAQARGLAPSERYIQKELPKKDGSTRIVHNPHYLVRRIQRRINRRIFSNPSVISWPDHIFGSIPNDDTYESLVYEKDYVNCARQHCGAKSILSIDIKDFFDNIHRDQVSRIFKNFLHYSDVVAEALTDICCKDASIVQGALTSSYLATLCLFREEGALVKRLGYKGLVYTRLVDDITISSKISNYDFSYALGQAVQMLSEADLPLNAKKTRIQYASMKPLMVHGLRVDFQQPRLPPEEAKRIRAAVKNLELLAASPGYRASRAYRKDFNRCMGRVNKLRRVEHNQHPVLIARLRKILPLPSHSDIVRAEQIIQRLKKDMSRPNYQGSFWFHKRCHVAAERLGILGRSFPKKAKELREQLKLIRPSTGYE

SEQ ID NO: 3448 - protein, 401 aa, Variovorax boronicumulans
  source 1..401: note = Related to NZ_MRCN01000006.1
MPQFQKLHPIKESSGSIANIDALCRALDISSTELAQVRALSSSQRYEKKEVPKKDGSTRTVHNPHYALRKIQRRINRRIFANPDVVSWPDYIFGSIPNDESAEDPIDRDYVNCARQHCGAKSILSVDIKDFFNNIHRHQVIGIFKNFLKYSEEVSVILADICCDDEHVVQGALTSSYIASLCLFETEGDLAKKLGYKGLVYTRFVDDITISSKIAKYEFSYALTLTEQMLNDAGLPLNSGKTKVQNASMKPLIVHGLRVDFEQPRLPPDEARRIRASVKNLELLAASPGYRASRSYRKDFNRSMGRVNKLARVGHSQHSILLSRLRRILPLPSHADIGKAEELIQRLQKDFWRPNYQTSYWFHKRYHVAIERLGILKRSFPKKAEELNRILKLIRPASRND

SEQ ID NO: 3449 - protein, 401 aa, Acidithiobacillus ferrivorans
  source 1..401: note = Related to NZ_CP059488.1
MEARQIDIYNPKKISLESIGSLAKLASCLDVTLEEIQEAQELSASERYKIKETPKRDGSLRKVYSPHFLIRKIQRRINARILSNSDVIAWPDHIFGSVPNQHCGESLVVERDYISCARRHCGAKSVLTLDIRNFFDNIHQSYVENIFTEFLKYDVEVSKVLSDLCCLDGHVVQGALTSSYIASLCLWDVEGELVVKLGHKNLVYTRYVDDMNVSSVISDYDFTYAVRAIEVMLDKKGLPLNPNKTKIQHISTEPLTVHGLRIGFKEPRLPSSEVRNIRAAVKNIEILASEHRYRTSHAFRKDFNRCMGRVNKLGRIGHNQHQKLVLRLKKVIPLPSKKDIVRAKKIVERLEKDYSANKSTFWYMKRFYLAHERLNILQRTYFKTSAELRGRLKSISPTYGF

SEQ ID NO: 3450 - protein, 395 aa, unidentified
  source 1..395: note = Related to PDHS01000438.1; note = Candidatus Accumulibacter phosphatis
MTQYNPEKKASGSIAGLDNLCSALDIHRSELDEALALSSSARYTARSIHKKDGSLRVVHNPHYLIRKIQRRINRRIFSNASLIRWPDHIFGSIPNQSSDDGVPIAKDYMSCASRHCEAKSVLTLDIKNFFDNIHATLVRSVFLDFFKYCPEVSDALSDICCLDSHLVQGALTSSYIACLCMHDIEGSVVEKLNRKGLVYTRLVDDINISSRISQYDFYYAISMVDNMLLEKGLQLNLDKKRVQYISTEPLTVHGLRIAFKEPRLPADEVRRIRAAVRNIETIASERDYRTTHAYRKDFNRCMGRVNKLSRVGHNQHKLLVGRLKRVFPLPSKKDIDRVTTIVTKLEADSGQKKGTYWYWRRFYLAHERLTILNRSFPHAAQDLRQRLKLLKPLYE

SEQ ID NO: 3451 - protein, 400 aa, Janthinobacterium sp.
  source 1..400: note = Related to SORD01000001.1
MIPVSSTTRLYPVKTATHAITTIQGLCEALDIVVEELDDVLLIPPKDKYSSQERRKKDGSVRVVHNPHHRLRVIQRRINKRLFSNQNFVSWPDHIFGSIPNQKFEGSKHPKDYVACAKVHCGAKSILTLDIENFFGNIHVSQVIKVFTQLLKFSPEVAEVVSKICCHEDYLIQGALTSSYIAGLILFDVEGMVVERLLRKNLRYTRLVDDINVSSVVSDYNFSYAKTIIEDMLIGKDLPVNHSKTKIQYSSTVPLTVHGLRVGFKEPRLPSDEVRKIRAAVHSIELMAKEPNYKTTHSYRRDFNRCMGRVNKLCRVGHNQYDKLLLRLQKNYPLPSKKDIERAIKIVTKLEVDYPTKQGNFWFAKRFYLAHERLNILQRSFPNVAYDLRFRLKAIKTVYE

SEQ ID NO: 3452 - protein, 397 aa, unidentified
  source 1..397: note = Related to JACYUQ010000003.1; note = Oxalobacteraceae bacterium
MVRVPQLFPKKTAVGSIATIDQLCNALSITEDELREVILLPDILRYSSRPIPKKDGSLRFVHNPHFRLRRIQRRINNRLLSNQSFLSWPDHIFGSIPNQQFDDGIHAKDYIACARVHCESKSILTIDIANFFDNVHISHVLQIFRDLLKCSEIVSEVLADICCHNDALIQGALTSSYIAGLALYDVEGRVVERLARKGLRYTRLVDDINVSSKNSEYNFDYAKKIVEDMLFSKDLPVNTSKTKVQFSSTLPLAVHGLRVGFKEPRLPGEEVSRIRAAVHSIEMMAREPNYRTSHAYRRDFNRCMGRVNKLSRVGHKQHGGLVHRLHQIMPLPSQKDVQRAIKIVEKLEADFSLKRHTYWYAKRFYLAHERLNILKRSFPGITDMLRLRLKPIKARYE

SEQ ID NO: 3453 - protein, 398 aa, Massilia rivuli
  source 1..398: note = Related to WKJJ01000006.1
MPTVPQLNPVKVSTESIITVENLCSALSITLEELNEVRSIPNGERYIASQIPKKDGTMRVVHNPHFRLRRIQRRINKRILSRQSVVSWPDHIFGSIPNQLDSERIEHEKDYVACARVHCEAKSILSIDIANFFDNIHITKISKIFCEFFKYSTEVSNILAEICCHNDNLIQGALTSSYLATLSLYEVEGKVVERLLKKNLRYTRLVDDITVSSRLAGYNFDYAKALIEEMLIDMDLPMNSSKTRIQYNSTVPLTVHGLRVAFKEPRLPGDEVRKIRAAVHSIELMASEPNYRTTHPYRRDFNRCMGRVNKLSRVGHQQHSVLVNRLRKVMPLPSPKDIERTIKIITRLERDYPTKRGTFWFSKRYYLAHERLNILKRSFPGISKELRKRLKPLRSKYE

SEQ ID NO: 3454 - protein, 396 aa, Chromobacterium phragmitis
  source 1..396: note = Related to NZ_CP029495.1
MIILRPYKKIPSSIANIDNLCSALDISTTELDEAISLAETDRYQVREIAKKDGSPRRIYNPHYLIRKIQRRINHRIFTDQNFLGWPDYIFGTIPNQKKSDGRIVQRDYISCAKIHCKSKSIASIDIQDFFDNIHIDHVENIFSKFFKYPDEVSEVLANICCLNSHVIQGALTSSYIASLCLFDVEGDAVERLIRKNLRYTRLVDDITISSTVSNYNFDYALSIIRKMLESKDLPINENKTKIQYASTVPLTVHGLRVAFSEPRFPSDEVRRLRAAVKNIETLSQEKNYRTSHAYRHDFNRCMGRVNKLSRIGHKQHAALVKRLQKVMPLPSQKDIERAFMIIERLEKDYSTHNSSYWYSRRYYLAHERLNVLQRTYTRIASDLRSKLRYLRPSYEK

SEQ ID NO: 3455 - protein, 398 aa, Paraburkholderia aspalathi
  source 1..398: note = Related to NZ_CAJNBE010000044.1
MEKQPQLNPVKTAVDSIASVANLCHTLNVTQEELDAALTLDPEEKYERRAIPKKDGSDRLVFSPDRRLRKIQRRINKRIFAAQSVVSWPDHLFGSIPNQNGPENIKIEKDYVACARRHCQSKSILKIDIKNFFDNISEFHVKDIFVNFFKYSDDVANVLANLCCLNGHVIQGALTSSYIAGLCLYDVEGDVVRRLARKGLVYTRLVDDITVSSKSADFDFGFAKSIIEQMLVGKDLPINESKTAVHYVSTTPLTVHGLRVGFKEPRLPSDEVRRIRSAVKNIETLAKEDSYRITHGYRHDFNRAMGRVNKLGRVKHKQHEPLVRRMRKVLPLPSKKDIERATRIIDRLQADHAGKHDTYWYWKRFYLAHERLNVLQRSFPEVSKKLRTKLRLLRSSYE

SEQ ID NO: 3456 - protein, 398 aa, Paraburkholderia caribensis
  source 1..398: note = Related to NZ_CP012746.1
MAHIPLLNPLKTALGSISSIDSLCEALNITREDLEEALQLDPSEKYVRLTTPKKDGSDRVIFKPDYRLRKIQRRINKRIFSNQNVVTWPSHLFGSIPNQFDADKTKIEKDYVACARSHCESKSILKIDIKNFFDNIHQHYVEDIFLNFFKYPEDVSSTLAEICCHESHVVQGALTSSYIASLCLYDVEGETVRRLTRKGLTYTRLVDDITVSSKIADYNFDYTKNVIETMLVGKELPINSSKTITQYISTTALTVHGLRVGFKEPRLPSDEVRRIRSAVKNVETLAKEDSYRTSHGYRRDFNRVMGRVNKLSRVKHKQHASLVKRMRIVLPLPSKKDIDRTTRIVERLLTDYASRHDTYWYWRRFFLAHERLNVLQRSFPEVSKHLRKKLKLIKPTYE

SEQ ID NO: 3457 - protein, 396 aa, Burkholderia stagnalis
  source 1..396: note = Related to NZ_LPNA01000081.1
MAAILNPIKVATGSISSIDNLCAALDITRAELDAALELDILTRYQRDETPKKDGSMRVVYKPDYRIRRIQRRINRRIFSRADVILWPDHLFGSIPNQESDDGDEIQKDYVACARLHCEAKSIVSIDIQNFFDNIHSDLVLDIFEKFLQYPSDVARTLTDICCRGDHIVQGALTSSYIASLCLYDIEGKTVERLSKKGLTYTRLVDDITVSSKIANYKFDYAMSVIEDMLTSKDLPINTSKTKIQYVSTTGLLVHGLRVSFQQPRLPSDEVRRIRAAVQNIETLAAEKGYRQTHAYRQDFNRCMGRVNKLSRVEHNQHANFLRRLQKILPLPSKKDINRATKIIENLERDFEKKSGTYWYAKRFYLAHERLNVLNRSFPAITKRLRARLKPLKQNYE

SEQ ID NO: 3458 - protein, 396 aa, Pseudomonas vranovensis
  source 1..396: note = Related to NZ_AUED01000023.1
MALLNPRKVSTGSISSIENLCSALSVSLEEIYAALSLPDEEKYAVSQVFKSDGSVRLVHNPHFLLRKIQRRINKRIFSRLSIIEWPDHLFGSVPNQREQDTKRLINKDYVSCAAKHCGAKSLLKVDVKDFFDNIHKDLVLDIFSNFMKFDREVSELLAEICCFRSHVIQGALTSSYLASLCLHDIEGAVVHRLSRKGLVYTRLVDDITVSSKISNYDFSFALDIIRAMLTSKDLPLNIVKTRSIYVSSEPLTVHGLRVAFPQPRLPSGEIARIRAAVRNIENLASERGYRTTHAYRHDFNRCMGRVNKLVRVGHDRYDSLLARLKQIFPLPSKKDIERARAMLDRLARDCATKRSTYWYAKRYYKLQERLIILKRSFPAVTKEIRKSLKGLKPDYE

SEQ ID NO: 3459 - protein, 396 aa, unidentified
  source 1..396: note = Related to SEFL01000928.1; note = Sphingobacteriales bacterium
MVLLNPKKISAGSISSIENLCSALDITLEEIYGALSLSEEDKYAVTEISKSDGGIRLVHNPNYLLRKIQRRVNKRIFSRPSVIQWPDHLYGSVPNQRNRQNSEMLNKDYVSCAAKHCGAKSLLKIDVKDFFDNIHQNLVLDIFNNFMKFDGEVSGLLAEICCFKSHVIQGALTSSYLASLCLYDVEGSVVERLMRKGLIYTRLVDDITVSSKVSNYDFGYALDIIRTMLTSKDLPVNLAKTRAIYVSSEPLTVHGLRVGFSQPRLPSGEVARIRSAVRNIESLASERGYRTTHAYRHDFNRCMGRVNKLVRVGHDRYESLLKRLRKVFPLPSKKDIERAHAMLARLNRDYSDKRGTYWYAKRYYKLQERLIVLKRSFPAVTKEIRKAIKGLQPDYE

SEQ ID NO: 3460 - protein, 397 aa, Pseudomonas sp.
  source 1..397: note = Related to NZ_BPLZ01000021.1
MATQLAPKKVSKRSIASIENLCSALDISLSEIYSALSLSDEEKYKVSTRAKSDGTDRIVHNPHFLLRKIQRRINKRIFSKPSVIKWPDHLFGSVPNQLDQSMTHIINKDYVSCAAKHCGAKSILKVDIKDFFDNIHEDLVLDIFRNFLKFDQEVSETLTNICCFHSRPVQGALTSSYLASLCLYDVEGSVVEKLSRKGLTYTRLVDDITVSSKSNNYDFSYALDIIKGMLTAKELPLNVAKTKSIYISSEPLSVHGLRVSFPQPRLPSGEVSRIRAAVKNIESLASERGYRTTHAYRHDFNRCMGRVNKLVRVGHNRHQPLLDRLRKVFPLPSKKDIDRARAMLKRLMRDKDSKRDTYWYAKRYYKLQERLIVLERSFPASAKEIRASLKGLKPSYD

SEQ ID NO: 3461 - protein, 395 aa, Pseudomonas sp.
  source 1..395: note = Related to NKIG01000020.1
MAAVNPKKVTSESIANIDRLCAALDITAEELCQVQNLHEDAKYQASTVEKSDGSFRKIYNPDFRLRKIQRRINKRIFSNSKVIAWPDHLYGSVPNQINDDFDLINKDYVSCAAKHCGAKSILKLDIKDFFDNIHKIIVHDIFLNFLKYPQDVSSALASICCLNDHVVQGALTSSYLASLSLYDVEGYVVEKLHRKNLVYTRLVDDITVSSKTSNYDFSYAINLIEGMLTEKELPLNKKKTKVQYTSSEPLTVHGLRVAFKQPRLPSDEVARIRTAVKNIETLAKEVGYRTTLSYRQDFNRCMGRVNKLSRVNHEKHLGLVKRLVKVYPLPSKKDISRAEAIVARLEKDYASKHSTYWYSKRFHTAHERLNILKRSFPCAEKALRKRLKSLRPIYD

SEQ ID NO: 3462 - protein, 399 aa, Pseudomonas sp.
  source 1..399: note = Related to JACASD010000120.1
MTRNVTARSFKISTRSISNLENLSSTLSIPLKTLQKTLVLPKPDRYRRDELPKSDGGIRIIYNPSQMIRLVQRRINSRILSNNQILAWPPFLFGSIPKSKDALGNEITRDYITCAAQHCGAKSLLKLDVKDFFDNVHADLVYGVFSQLLKFPHLVSASLTNICTFESHLIQGALTSSFLANLCLHDVEAFVVDRLAKKNLTYTRFVDDITISSKTSKYDFSYALSIVEEMLTSKDLPLNRQKTKVYFSSSTPLTVHGLRICFAEPRLPSDEVRRIRASVKNLETIANERSYRMTHAYRHDYNRCMGKVNKLARLKHNQHIPLLDRLRKIPPLPSKKDISRAIQIVSRLERDFFLKKNTYWYYRRFYIAYERLNVLKISYPRMTKLLKIRLKKLKPIYEK

SEQ ID NO: 3463 - protein, 398 aa, Pseudomonas mucidolens
  source 1..398: note = Related to LS483433.1
MTRTVAARSFKVSNSSIADLQNLATALSVPLLTLQKTLTLPKSERYRRDELPKSDGGLRIIYNPSHEIRLVQRRVNTRIFSNSHILAWPPFLFGSIPKSRDALGNEVTRDYITCAAQHCGAKSILKLDVKDFFDNVHSDLVYGVFNKLLKFPHLVAASLTNICTLDSHLIQGALTSSFLANLCLHDVEAFVVDRLAKKNLVYTRFVDDITISSKVAKYDFSYAQAIIEEMLISKDLPLNSQKTKVSHASSTPLTVHGLRVSFSKPRLPSDEVGRIRAAVRNIEKIADERSYRMTHAYRHDFNRCMGRVNKLARVEHNQHRPLLKRLLKLPPLPSKKDISRAIQIVSRLERDFYLKKNTYWYSRRFYIAYERLNVLKISYPRMTKLLKLRLKKLKPVYE

SEQ ID NO: 3464 - protein, 398 aa, Pseudomonas sp.
  source 1..398: note = Related to NZ_BCBR01000170.1
MAGIAEVQRYKASVHSISSIENLASALGVSLSFLQEVLQIPDEHRYKKSELPKSDGGIRTVYSPDYRIRLIQRRINKRIFSNSRVITWPDFLFGSIPNHKDKCGQEVTKDHIACAASHCGAKSLLKLDVKNFFDNVHSDIVYGVFRDLLKYPDEVSRALTNICTFKSHLVQGALTSSYLASLCLHDVEAYVVDRLSRKGIVYTRFVDDITLSSKISSFDFGFARGVVEQMLTAKDLPLNSGKSRTQYLSSEPLMVHGLRICFNEPRLPADEVRRIRASVKNIEVIANERGYRLTHAYRHDFNRCMGKVNKLARLGHTQHTALVARLVKVYPLPSKRDISRAIQIIMRLERDVSAKASTYWYAKRFYMAHERLNILKRSYPRITLLLRNRLRKLRPNYE

SEQ ID NO: 3465 - protein, 399 aa, Pseudomonas sp.
  source 1..399: note = Related to NZ_RXHX01000002.1
MAMDASAAGGFKVSKNSIGSVDNLIQILAVSLKDFESVLMMPSELRYIKTEIPKSDGGVRRIHNPHFLIRLLQRRINTRILSNPRVIGWPSHLFGSIPNQRDEKNNIDSRDYIACAKAHCGAKSLLKLDVKDFFDNVSEDLVYGVFHDLLKYSEDVSSVLTDICTYNSHLVQGALTSSYLASLCLHDVEAHVVDRLRKKNLVYTRFVDDITISSRTSNYDFAFARSVVEQMLISKDLPLNSGKSRVFYTSSEPLTVHGLRVSFSEPRLPSDEVRRIRAAVRNVETISSERAYRLTHAYRHDFNRCMGRVNKLARVGHNQHKPLKNRLLAVYPLPSKRDISRSIQIVSRLERDVAEKRATYWYSRRFYIAHERLNILKRTYPRMTKILRARLKKLTPTYF

SEQ ID NO: 3466 - protein, 398 aa, unidentified
  source 1..398: note = Related to nan
MIKDKAHRIFKASTSSISSLESLASALDLQVDDFERVWAKEESSRYTRKEIPKSGGGVRVVFNPCVEVRKIQRRVNTRIFSNPHVVKWPGYLYGSIPKSLNSEDELASRDYISCAKQHCEAKSLLKMDIKNFFDNVHDDLVYGVFKDVLKYPEVVSNVLTRICTYRSSLVQGALTSSYLAMLSLYKEENDVVSKLKRKGLVYTRFVDDISISSKVSGYDFSYARSLVEKMLLNAGLPLNSNKTKVLYATATPLTLHGLRICFKDPRLPPEEVRRIRAAVKEIEIVAGESNYRNTYAYRRNFNRCLGRVNKLSRVKHKQHSNLVRRLSKVLPLPSQKEVNYVQHALVKLEGLFQSRGDTYWYRKHFYQLGDRLNLVARSYPRLAEEIRRRLREVKPTYE

SEQ ID NO: 3467 - protein, 398 aa, Pseudomonas stutzeri
  source 1..398: note = Related to NZ_JAGQFP010000002.1
MRRSSAHRAFKVASGSISNVENLAAALGLTTLHFEKLWEIPEELRYSSKTIPKLSGELREVHNPCRELRIIQRRINTRIFSNPDVVKWPSYLYGSIPKGDNPEDEFNSRDYVACAKLHCRAKSILKLDIKDFFSNVHDDLVMGVFSEVLKYPDVVSQVLTRVCTYKSSLVQGALTSSYLAMLSLYGAEDDLVHRLRKKNLIYTRFVDDITISSKVANYDFSYAARLVEQMLVEKGLPLNTKKTITQYASLAPLTVHGLRVCFAEPRLPADEVRRIRAAVQSIEIVAKEKNYRQTYPYRKDFNRCMGRVNKLARVGHNQHSKFISRLHKILPLPSAREVEYVKAATLKLESLYATKRESFWYKKLYYRVGDRLNLVGRSFPNLAKSLRERLREVKPAYE

SEQ ID NO: 3468 - protein, 398 aa, Pseudomonas kunmingensis
  source 1..398: note = Related to JAAMQS010000014.1
MKKDFAHRAFKASSGSIASVENLASALSLEVSDFERLWEIPEEKRYKLKELPKSSGGFRTVYNPCVALRVIQRRINTRIFSNPYIFQWPVHLYGSIPKSPNADDEYRSRDYVACAKQHCGARSLLKLDIKDFFDNIHEDVVLSIFRKVLKYPEDVSLVLTRICTHNSKVVQGALTSSYIAMLSLHQEEQGVVDRLRRKGLVYTRFVDDITVSSKCTNYDFSYAQSIIEQMLNNADLPVNTKKTEVQYATAAPLMVHGLRISFNEPRLPSNEVKKIRAAVQGLEIVAKENNYRQTYPYRKDFNRCMGRVNKLGRVKHNQHQKLVRRLVKILPLPSAKEVAYVKTAVERLEATYETKKSSFWYKKHYYRVNDRLNLVKRSYKTLAVTLRKRLQCIPPLYE

SEQ ID NO: 3469 - protein, 398 aa, Pseudomonas mendocina
  source 1..398: note = Related to NZ_LR134290.1
MKRTLAHREFKAASGSISSISNLAKALNLQVSDFERLWEIPEESRYKSLEKPKTSGGMRVVYNPCPQLRLIQRRINTRIFSNPYVIRWPSYLYGSIPSSPNKSDINHSRDYVACARLHCEAKSILKLDIQNFFDNIHEKLVIEIFSDILRYPEDVSEILARICTYKSRLVQGALTSSYLAMLSLYKEEPEIVAKLKRKDLVYTRFVDDITVSSKIANYDFSYAQKIIEDMLSNAEFPVNSKKTQTQYASASPLTVHGLRVCYKEPRLPSREISNIRAAIRSLEIASKHGNYRQTYAYRKDHNRCLGRANKLARVKHPQHSKFVARLSRILPLPSQKEVNYVKSSVEILERDYLHKKDSFRYKRHYYRTNDRLNVVQRSYPSLVRDLRKRLRPIKPTYE

SEQ ID NO: 3470 - protein, 387 aa, Pseudomonas aeruginosa
  source 1..387: note = Related to CP080287.1
MTTRHTFKVATGSIATLDNLSLALGVSHCELENALSMPQDERYTRLERHKADGSVRSVYKPHYLIRLLQRRINHRILANPDVIAWPSYLFGSIPSFKNEDGEWVAKDYVASARLHCGAKSLLKMDIKDFFDNIHSSVVEDIFLGLLNYPGEVAKALTNICTYNSHLAQGALTSSYIANMCLHGLEDEVFTKLSRKNLRYSRFVDDITVSSVVNRYDFSYVKSIIEGMLLERGLPVNSRKTKVQYSTTEALTVHGLRVCFPEPRLPSDEVRRIRAAVKNVEMLAQENGYRMTHAYRRDFNKCMGRVNKLSRVSHKQHGNLVRRLVKVYPLPSKKDISRARSMVARLERDYLEKRDTYWYSRRFYIAHERLNILKRSYKASAIELRGAS

SEQ ID NO: 3471 - protein, 396 aa, Serratia sp.
  source 1..396: note = Related to NZ_CP033831.1
MKKNNYLKISKSSISSVENLCLALDLTLDDFLNLKMMSGCDRYVLNEKPKPGGGIRKTYNPNNLVRVFQRRINNRIFSNPHIIKWPDHIYGSIPNDMNSDGGIRRRDFVACASVHCGAKSILKVDVKDFFDNISKDIVYDIFNGFLKFNSEVSEALTDICTYDRSHLVQGALTSSYLATLALFNIEGRIVQRLALKKLKYTRFVDDITISSVNSRYDFDFAKSIVINMLHEKDLPVNLSKTKVYYSGSEPLTVHGLRVSFNQVRLPSDEVRKIRAAVKNIEIIANDTSYRKTGSYRKDFNKCMGRVNKLSRVGHKQHESLVARLNKVYPLPSFTDIKKTKDLIEKIRSKYDDGKNYFYYHKMYYAAMEKLNLVKRSFPNTAKNLRLRLRGLRPEYD

SEQ ID NO: 3472 - protein, 407 aa, Citrobacter portucalensis
  source 1..407: note = Related to CP055089.1
MSLPIRHTKKKTVSSINSISSLCSTLSITRAELETALSTPDKERYTPSEVEKSDGTIRNIYNPKSLIRKIQRRINRRIFNIYTPKGREKKNPPIIWASYLFGSIPNQFLDEDIEQKDYIACARVHCQSKSLLKVDIKNFFDNVQAIHVESIFSKFFFFSDDVSQALTNICCYEGHLVQGALTSSYLSCLCLHDVEWKIVDRLSRKNLRYTRLVDDITVSSTVSNYDFSYAKDIIINMLHEKDLPVNFKKTQQYYTSTTPLTVHGLRVSFSEPRLPSDEAKRIRASVRNIESLAAERNYRTTHAYRKDFNRCMGRVNKLKRVNHSQYESLVNRLFKLFPLPSKKDLDRVFISIANLEDDFHKGKHDTYWYWKRYHRVHERINILQRTFVREATIFRNKTKNIKPSYIQ

SEQ ID NO: 3473 - protein, 407 aa, Serratia marcescens
  source 1..407: note = Related to JTBU02000001.1
MSFQIRHTKKNTVSAINSIQGLCNALDISLHDFNIALSTPDSERYTPSEIEKSDGSFRKIYNPKSFLRKIQRRINRRIFNLYTKKGREIKNPPITWASYLFGSIPNQFLDENIEQKDYIACARVHCQSKSLLKVDIKNFFDNVQDVHIEDVFRNFFLFDEEVSRALTNICCFEGHLVQGALTSSYLSCLCLYDIEGKIVDRLARKNLRYTRLVDDITVSSVVSNYDFSYAKDIIINMLHEKDLPVNSKKTQCYYTSTSPLTVHGLRVSFSEPRLPSDEAKRIRASVRNIESLSSETNYRTTHAYRKDFNRCMGRVNKLKRVNHSQYESLFNRLFILLPLPSKKDIERVSVSLLRLENDYKLGKHDTYWYWKRYHRIHERLNILQRTFTREASVFRIRLRLVKTTYIQ

SEQ ID NO: 3474 - protein, 407 aa, Pantoea vagans
  source 1..407: note = Related to MUJJ01000002.1
MSYHIRHTSKRNITAINSIEALCKALSISKEELENALATPDHFRYTPSTAIKSDGSPRKVYNPKPMIRMIQRRINRRIFNSYNNKGREKKNPPIIWASYIFGSIPNQYYDLDLENKDYISCAAIHCGAKSLLKVDVKNFFDNIHDIYVKNVFENFFHFSNEVSEALTNICCYQGHLVQGALTSSYLACLCLYDVEGDIVQRLARKNLKYTRLIDDITISSEISNYDFSYAKSIVIDMLHKKDLPINNEKTKASYISSEPLMVHGLRVAFKEPRLPSDEVRRIRASVRNIECLASETNYRTTHPYRKDFNRCIGRVNKLKRVNHTQYDNLVARLLRILPLPSKKDIERISEQIDRLENEYSNNLHGSYWYWRRLNKVHERITILNRTFKSEAKTYRDRLKKINHCYIQ

SEQ ID NO: 3475 - protein, 393 aa, Lysobacter gummosus
  source 1..393: note = Related to NZ_CP091194.1
MAVLKRVAKKSISSLTNLCDALSITIHELNGALALSDDQKYLRSTTPKPDGSLRIVHNPHRLLRKVQRRLNSRIFSNSAVVTWPDYVYGSIPNQIDVGGAIVEKDYIACARVHCGAKSMLKMDIKDFFNNVHEEAVRDIFLRFFKYSKEVSDALTSICTFEGGLVQGALTSSYIANLCLFDVEDSAVERLRRKKLRYTRLVDDITVTSTIANYDFSFAKDVITTTLVDKDLPVNERKTRVLYISSEPLTVHGLRVNYKEPRLPAKEVARIRSAVRNVELLASEGSYRTSHSYRHDFNRCMGRVNKLKRIGHRQHMVLIKRLLKILPLPAKRDIERAEKLLIRIKKDWLSNPDSYGYAKRFYILHERLNVLARSFPAVSAVMRKEMRGLRPVYD

SEQ ID NO: 3476 - protein, 400 aa, Stenotrophomonas maltophilia
  source 1..400: note = Related to NZ_VLXO01000050.1
MARDSMSFRGTSGPIASVEKLASALRLPESLLLEVSERPIWRNYKPASAPNRRGGRPRLVFSPSRDVRLIQNRIVRTFFKNPKVINWLPFIYGGIHKDALKSGDSRDHVACARRHCGAKSILKLDIEDFFGNVSFDLVEDVFVGLLGWSKDAGSLAAKLCTRDGVLPQGGITSSYLALLCLHDIEPKLVRQLSYKKLTYTRYVDDITISSGSFTQEFSGPMRMVEQQLASKGLGINSAKVESLTVGLEAMSVHGLNVAYRDPVLPKSEVKRIRSVCRQTILDAREVGRRSINYRRRYNRAMGLVNKLSRVNSSSHKKLVQSLRLVSPLPSQADFEYATKIAYDMRDDYDKKKLGYWYWRRFNRLMARLTLIGVDNPGWAGNLRKYMKSHFLPGFKDDKDK

SEQ ID NO: 3477 - protein, 397 aa, Stenotrophomonas rhizophila
  source 1..397: note = Related to WELC01000020.1
MGKDSMSFRGTSGPIASVEKLADSLRLPISLLKDVAARPEWKKYKPAKAPDKRGGRPRLVFSPSKDVRLIQHRLVRTFFKNPKVVNWLPFLYGGIHKDALAAGDSRDHVACARRHCEAKSILKLDIEDFFGNVSFDHVEGIFVRLLGWSREAGHLAALLCTRDGVLPQGGITSSYLALLCLYDMEPALVRQLAYKKLVYTRYVDDITISSSSFNQDFNGIKRLVEQQLGAKGFTINSSKVEDLTVGLEALKVHGLNVAYANPVLPKSEVRRIRSVCKQTIMDAREVGRRSINYRRRYNRAMGLVNKLARVKSSSHAALVSKLRAVSPLPSHADFSYATEISYNMREGYDKKKYSFWYRRRFNRLMARLSLIKSDNPVWAANLRNYMTSHFLPEYKEE

SEQ ID NO: 3478 - protein, 393 aa, Stenotrophomonas maltophilia
  source 1..393: note = Related to NZ_CP052863.1
MTLRGSAGPIRSNCALARALGCTEKFLSDVIARDTSSKYRLVEAPAKLDGTRREVYSPSRDVRLIQRRIVNRFFKNPRVIKWPPFIYGGIHRDALAPGESRDHVACAQKHCGARSMVKLDIRSFFDNVTHDMVVETMVMQLGWSRGPAILLADLCTRDGSLPQGGITSSYLALLSIYDVESKIFNIVGYKKLVYTRYVDDITISSRNSGYDFSPIVKMVDQFLLSKGLSINDAKTSVSVSGLEPLVVHGLNVANKHPVLPKAEVKRIKSVSRQTINDASEEGRRTHGFRRRYYRSMGLINKLSRVRSSSHKSSLSKLKSVSPLPNFADYDIATVVAYRLRDLYGAKKGGRWYWRKFNVLMARLDLIAVENPGWAKTLRRYMRRHYRPDYRRPE

SEQ ID NO: 3479 - protein, 367 aa, Stenotrophomonas maltophilia
  source 1..367: note = Related to NZ_JABDRS010000003.1
MRDVASRASTTNYRSVDAPIKSDGLPRRVYNPARDVRLVQSRIANRFFKNPAVIKWPAHIFGGIHKKALPAGDSRDHVACAAKHCGAHSLLKLDIRNFFDNVTHEIIVETMTRQLAWSRSPAVLLADLCTREGVLPQGGITSSYLALISIYDIESKLVRNLEYKGLAYTRYVDDITISSKVASFDYAPIVRMVDNLLLSKGLSINEAKTSARISGLEPLVVHGLNVANRSPVLPKAEVARIKRVGRQTILDAQEEGRRSHGFRRRYYRSMGLINKLSRVGSASHASSLEKLKAVSPLPSFDDYKISTNVAHKLRADYDIKKSGVWYWRKFNVLMARLDLIGAENPRWAKTLRRYMRQHYRPEFKRPK

SEQ ID NO: 3480 - protein, 369 aa, Lysobacter sp.
  source 1..369: note = Related to NZ_CP063658.1
MNLLLDVAERSAEENYRPVSAHSKLDGTERRVFSPSRDVRLIQRRLVNRFFRKPQVVSWPPFLFGGIPNDALPQRDAPRDYVACAAQHSIARSALKLDVRSFFDNVHSDVVEPIFSGLLRWDEEPAVLATRVCTRLDSLPQGGITSSYLALLCLFREEGNVARTLRRKGLTYTRYVDDITISSTSVLQEFDFAHALVERMLMNHGLFINSSKVNLQKAGSSPLEVHNLRVGCGPPRLPQREVKRIKQVCRQTELDASEGRRSYSYRRRYFRAVGLVNKLARVGNNQHRHLITRLSTIRPLPSQKDYELATNVAHDLRERYVLGHDRYWYRRRFHILMERLNLIGVEDPAWAANLRIYMKAHYAPTSVDA

SEQ ID NO: 3481 - protein, 400 aa, Luteimonas sp.
  source 1..400: note = Related to NZ_LR733312.1
MKSKPYSSMRGSNGPIRNLDHLCTILDVERRVLDRVLAMPGSQRYALARSRAAKSDGSAREVFNPCREVRRIQLKIVKRILKVPGAVRWHDFLYGSMPNQIDAHGNELKKDYVTCAAQHCDARSVLKIDIKDFFGNIHSDTIMRIWTELFGYPGDVAFVLTNLCLKDDNLPQGGITSSYLAMLCLFDLEAKTVATLRLKGLRYTRYVDDITISSPLSNYDFELALALVRAMLISRALPINESKVKRVSLSTEAITVHGLRVNFETPRLPAAEVGRIRASVKTIELLAADTSFSSTPGFRKSFNKCMGRVNKLKRVGHSQHSKLLKRLQAVRPLPSRRDIKKAVASIRTLSAEFHSRGNTFGYRKRYYILMERLNLIARSHKELAAMLRAHVKRIKPSYVD

SEQ ID NO: 3482 - protein, 373 aa, Rudaea sp.
  source 1..373: note = Related to JAFRGP010000385.1
MAITQDELFQALRLTDDVRFQPIPEKRKPDGTIREIYNPHPLIRKIQRRLVTRLLSGSAAFQWPDHLYGSIPNVSSPDGEVQSKDYVACARRHCGAKSLLKLDIKNFFGNVHHDTVYRIFRELLGYGSRVSKVLACLCTHKGSLPQGGLTSSYLAMLSLHDLEGYVVERLRLKSLVYTRYVDDITISSKVLNYDFGYALKIVDNMLVERGLPLNLKKNRIERISTSPLIVHGLRIAFDKPRLPADEVGRIRASVRYTELIYLEANFRFTSSYRKAFNRCLGRVNKLKRVGHSQHGVLLRRLLRVRPLASKKDLIRAHVTASRLANEYGRYKETYGYHRRFYLLQERLNLIQRTYPKIAKSLRLKLNIIRPEFN

SEQ ID NO: 3483 - protein, 372 aa, Xanthomonas arboricola
  source 1..372: note = Related to NZ_MDDY01000002.1
MDVPISDFRAALLLSEEERFRLLPDKKKADGTDRIVYNPDPLIRKIQRRFLTRILSRPSAVKWPEFLFGSIPNHSFNGIDVSRDYVACAARHCGSKSLLKLDIKSFFENVHSDLVLEIFRGVFSYGDLVSRVLTRICTHKGGLPQGGIVSSYLAMLCLHDVEARVVERLRQKRLTYTRYVDDITVSSKSSNQDFDFSKRIIEEMLLSKNLPLNYKKVLVSRVSTTALTVHGLRVGFKEPRLPADEVKRIRASVKYLEILYVDGDYKYTSSYRKNFNKCMGRVNKLKRVGHSQHGQLKSRIIRLMPKASRSDLARVFKISKRLQSDYLEKKDTFGFYKRFHILAERLNLVARTHPGIARLIRRRLREIKPTFE

SEQ ID NO: 3484 - protein, 351 aa, Thioalkalivibrio sp.
  source 1..351: note = Related to NC_013889.1
MRQPKLNGSDRIVNNPHYLIRKIQRRLNKRFFANPDFIRWPRHIFGCIPNYVDDDGELVTTDYVSCASKHCQSKSILKMDISDFFGNVHQDHVYKVFLNLLSFPEDVSKILTDLCTLRGSLPQGGLTSSYLASLCLHDKEGSVVRRLENKGLVYTRLVDDITVSSHVANYNFSYAKKIITDMLIEKDLPINEDKTIVQRLSTEPLTVHGLRVGFKEPRLPAGEVKRIRASVQSMEQLAREPNYRVSHAYRRDYNRCMGRVNKLSRVGHKQHSILVRRLKSIRPLPSRADLDRLEVMVSRLEKDHAEKRATFWYWKRYHRAHERLNVLQLIYIAKAKKFRERLKKVKPLYDS

SEQ ID NO: 3485 - protein, 399 aa, Marinobacter sp.
  source 1..399: note = Related to JAGPVE010000007.1
MDDFLFHKVSTASISNVKNLCTALDITETDLEKALSLEPSARYEEVQVNKSDGSLRTAFKPHYLIRRIQRRINKRIFAPQKNEPNTIQWPNYIFGSIPNQIIDGEEIQKDYISCARRHCKAKSLLKIDIKSFFDNIHSDLVYDVFNEFFKYPKSVCEVLTDICCHENRVPQGGLTSSYLASLVLHDIEPTVVKRLLRKGLHYTRLVDDITVSSKIHDYDFSFAKKIITDMLYEKDFPINEQKTRIEREASTPLCVHGLRICFNEPRLASHEVKNIRAAVKNIEIVAMERHYRTTHPYRKDYNRCLGRVNKLARVGHNQHAKLVSRLKKVEPLPSERDIKRCTTMVTNLEMDHSTKGSRYWYWRRYHKAHQRLNILQRTFVHTANDLRARLKVIRPSYES

SEQ ID NO: 3486 - protein, 397 aa, Pseudomonas aeruginosa
  source 1..397: note = Related to CP071730.1
MGQFQPTKNPKGSIATIDALCAALSISIDELNQALAMPIDERYTLPKKELFKSDGSPRVAYKPHHLIRKIQRRINKRILGQEGYIDWPNHIFGSVPNKKVPDGEDIVKDYINCARQHCLAKSMLKMDVKDFFDNIHVDLVFSIFNSFLSFSDVVSNTLANICCRGEFVVQGGLTSSYLACLCLFDVEADVVVRLKNKGLIYTRLIDDITVSSKRSGYDFSFARQIIEDMLFSRNLPVNSKKTAIHYHFSAPLMVHGLRVSFNEPRLPASEVKKIRAAVKDIEVLAKDHLYRITHAYRHDFNRVMGRVNKLSRIGHTQHENLKNRLLKCYPLPSFKDITRARLAVERVERDYEEKCATYWYKKRFYRAHERLNLLKRSFPDTASELRDRLRDLRPEYD

SEQ ID NO: 3487 - protein, 399 aa, Salinicola aestuarinus
  source 1..399: note = Related to NZ_PZJP01000003.1
MSTNNNLYFQKNASNSIGSISNLANALNLTVNEIVRAVNLPNEVKYTANPQQKADGSQRMAYNPHRYLRKVQRRINKRIFADPSVVSWPDYIFGSVPNTTLSLSEVIKKDYVSCAARHCLAKSLLRLDIKDFFPNIGEHLVRAVFEDFYHFPPDVSEILVSLCTKDGGVPQGALTSGYLACLCLFDVEPEVVRRIEMKGLTYTRYVDDIVVSSKVHDHNFSLQEKLISSMLEDKDLPVNDTKTLIQRSSTAPLIVHGLRVSFKEPRLPSDEVRRIRSAVRNLEKQASEPNFRTTRVFRSAHNRCVGKVNKLKRVGHKQHSEYLRRLNLIKPLARRSDVERVVSMIRRLENDHGSISDTYAYHKRYFRAHERLNIIQRNYENIAFKLRQRLKSIPSNYVK

SEQ ID NO: 3488 - protein, 395 aa, Cobetia sp.
  source 1..395: note = Related to CP059843.1
MIIMNNYKIKGSVIASPQNLAKALNLTLEEINAANALSTEKRYKEKNLPKADGNFRKIYKPNHRIRTIQRRLNKRIFSSSNVIEWPSYLYGSIPNTIGDDEIEMKKDYVTCASIHCQAKSVLKIDVKDFFDNIHSDLIFNIFIKLFKYPQEVAELLTDLCTYKNKLPQGGLTSSYLACLSLFDVEPDVVKRLENKDVKYTRFVDDITISSQHPNYDFSFAKKLVFDMLHSKDLPINEAKTTVQRLSSAPILVHGLRISFKEPRLPPEEARQIRAAVRNIEKLSKHPDYRTSNAYKKDYNKCIGRVNKLARVKHIQHKKLISRLRKVKPLPNRQAVIRARSMIRQLEHIYPTHLHDYWYKKKYFQAHERLNIIQRSFPNIAKTLRFKLKTIRPQYE

SEQ ID NO: 3489 - protein, 411 aa, Pseudomonas fragi
  source 1..411: note = Related to JABEMH010000004.1
MSWVGRATFISNGLVILLTNPIKHSKNSISNRENLCKALRVSDDFLGSVLALSQSERYTKKDHVKKAGGGSRPIYNPHRFLRKIQNRINIAFFSNYYVIRWPHFIYGSVPNQKNGDGYDSKDYVSCAGRHCGAKSLLKVDVSSFFDNIHQDVVFAIFNDFLKYDAEVSSILTDLCCHHSHLVQGGLTSSYIASLCLYDVEGAVVDRLNRKGLTYTRLVDDITVSSKSLNTDFTYALKIISDMLTGKDLPINESKTRVFRTSTEPLTVHGLRVSFDTPRLPADEVGRIRAAVRNVESLAAQPGYRISHDYRHDYNRCMGRVNKLLRVKHTQHKVLLRRLNAVKPLPSRRDVNRAKDMVARLEMDFDSKKHTHWYKSRYHRVMERLIVLNRIYDKTSVQLRSKLRRLRPVVEN

SEQ ID NO: 3490 - protein, 397 aa, Pseudomonas viridiflava
  source 1..397: note = Related to NZ_UUEU01000227.1
MLLNPIKVSKNSVSSRENLCKLLRVSDEFLTSVLALSQEERYTKKDHVKKAGGLSRPIFNPHRFLRRIQKRINIAIFSNNYVIRWPHYIYGSIPNQKNGDGYDSKDYVSCAGRHCQAKSLLKIDVSSFFDNIHADIVFSIFNDFLKYDREVSVILTDLCCHNSHLVQGGLTSSYIASLCLYDVEGDIVERLNRKGFTYTRLVDDITISSKSLGTDFTYPLKIVGDMLVAKDLPINEGKTRIYRTSTEPLTVHGLRVSFDSPRLPADEVGRIRAAVRNIESLAAEPGYRTTHNYRHDYNRCMGRVNKLHRVGHNQHGPLLDRLDAVRPLPSRRDVNRAKDMVARLEKDHKGKGHTHWYKARYYRLMERLVVLDRVYDKTCYQIRLKLKTLRPEREVEK

SEQ ID NO: 3491 - protein, 401 aa, Pseudomonas sp.
  source 1..401: note = Related to NZ_CP027762.1
MLANPLKISKNSVSSRENLCKLLRVTDEFLASVMTLSQEDRYTKKEHVKKAGGISRPIYNPHRFLRKLQKRINIAIFSNHYVIRWPHFIYGSVPNQKNNDAYDSKDYVSCAGRHCGAKSLLKVDVSSFFDNIHQDIVFSIFSNFLKYDEEVSRILTNLCCHNSHLVQGGLTSSYIASLCLYDVEGDVVERLNRKGFIYTRLVDDITVSSKSLNTDFTYALKIISDMLTAKDLPINESKTRVFRTSTEPLTVHGLRVSFNTPRLPADEVGRIRAAVRNLESLADQPGYRTTHGYRHDYNRCMGRVNKLLRVGHNQHKPLLARLNSIKPLPSRRDVNRAKDMVARLEKDFDAKRHTHWYKSRFHRVMERLIVLNRVYDITSKQLRSKLKRLRPESEDIIDKHV

SEQ ID NO: 3492 - protein, 394 aa, Pseudomonas sp.
  source 1..394: note = Related to JAGYWD010000006.1
MLTNPLKFTKNSISSRENLCKALRIPDDFLATVLALPPDDRYTKKDHVKKAGGISRPIYNPHRFLRRIQKKINIAIFSNNYVIRWPHFIYGSVPNQTNNDGYDRKDYVSCAGRHCGAKSLLKVDVSSFFDNIHQDIVFSIFKDFLNYEKEVSEILTNLCCHNSHLVQGGLTSSYIASLCLWDIEGKVVERLNRKGLTYTRLVDDITVSSKSLETDFTYALKIISDMLTTKDLPINESKTRIYRTSTEPLTVHGLRVSFSTPRLPSDEVGRIRASVRNLESLAAEPSYRTSHGYRHDYNRCMGRVNKLHRVEHNQHKPLLMRLRAIRPLPSRRDVNRAKDMVARLEKDYDTQSHTHWYKSRFHRVTERLIVLDRIYTKTSTLLRSKLKKLRPVGE

SEQ ID NO: 3493 - protein, 402 aa, Pseudomonas sp.
  source 1..402: note = Related to PCQD01000007.1
MVRLFPQKVSTASIANVDSLCQALSIPRSVLDQVLALGLDERYKEVMHIKKADGTNRPIYNPHHLLRRIQKKINERIFSDTKIIKWPGFLYGSIPNQTGSSGQDVSKDYVACAAVHCGAKSLLKIDVESFFDNIQRDIVLNIFSKFLKYPEDVADVLTNICCYKGRLVQGALTSSYIASLCLWDVEGNVVRRLNLKGLRYTRLVDDITVSSVGLATDFSYAKKLVEDMLSDRDLPIKASKTKVYRMSSEPLTVHSLRVNFSSPRLPADEVGRIRAAVKHVERLASEPNYITTHSYRKVYNRCVGRVNKLSRVGHNQHKILLARLNKIKPLPSFSDIRRAKAMLARLKSDFGSKGHTHWYRSRYYRLDQRLRILSRRYERTSDQIREEIRGIKPFKKHSSETH

SEQ ID NO: 3494 - protein, 364 aa, Pseudomonas aeruginosa
  source 1..364: note = Related to NZ_RWLL01000003.1
MLSLPDNILYTEKEIPKAGGKVRVVYNPHRLLRRVQRKINTQIFSSSNIIEWPTYLYGSIPNQEYEAELKHLNNKDYVSCAARHCGGRSVLKLDVESFFDNVHEDVVRSIFADFLKCSPEVSDVLTSLCCKGEHIVQGALTSSYLASLCLYDVEGTVAERLRRKGFVYTRLVDDITVSSKKLGVDFSYAKSLIVDMLKEKDLPVNEGKTKVYRASTAPLTVHGLRIGFSTPRLPSDEVRRIRAAVRNVELLAKENNYRTSHAYRHDFNRCMGRVNKLERVKHNQHQSLVRRLKDIKPLPSIRDIGRAKKMLERLRKDYKLRSHTYWYRARYFKVLERLNVLQRTYEHVAFDFRVELKGLKPTQN

SEQ ID NO: 3495 - protein, 400 aa, unidentified
  source 1..400: note = Related to nan
MNLVGNNLDIPRKISTGAIASLNSLYNTLGCTESEITSVLNIPPDQLYTEIRISKAGGKQRVVYNPHRLLRRLQKKINEQIFSNSDVISWPCYLYGSIPNQNYEDGLEIYSRKDYVSCAARHCGARSLLKLDVENFFDNIHYDVVYAVFSDFLKCSSDVSDILSRLCCKGEHLVQGALTSSYLASLCLYDLEGAVAERLRRKGFVYTRLVDDVTVSSKKLNVDFTFARNTVVSMLEGKDLPVNESKTKVHRVSTVPLSVHGLRIGFSTPRLPADEVRRIRAAVRNIESLATESNYRTTHAYRHEFNRCMGRVNKLLRVEHSQHPSLASRLERIRPLPSFRDIARAKGMIDRLRSDHTSRAHTHWYKTRYHKVLERLIVLQRTYKHVSYEFRVELKGLKPI

SEQ ID NO: 3496 - protein, 404 aa, Pseudomonas putida
  source 1..404: note = Related to NZ_JAETZZ010000009.1
MIDARFVNPIKLSADSISSVSSLCDVLDISQKELGEVLALSGEERYSSKEISKAGGKSRIVHNPHKLVRKIQRRINNRIFTAENYIQWPSYLYGSVSNQEYDVEDDQTYLNGKDYVSCAARHCQASSILKLDVQDFFDNIHIGLVEQVFKDFLCFPEPVAKVLANLCSRNEHLLQGALTSSYLASLCLWDVEGKVAERLGRKGLVYTRLVDDITVSSKSIKTDFTYAKNIIIGMLESKDLPVNEAKTQVHRASTKPLTVHGLRVGFSTPRLPADEVRRIRAAVRNVESLAEEPNYRVKHAYRKDFNVCMGRVNKLQRVGHSQYDALVSRLEKVQPLPSKRDIGRVRSMIERLRSDYPKRAHTYWYRVRFYKVHERLNILKRTYRHEALDFRIELKALKPPKSGQ

SEQ ID NO: 3497 - protein, 396 aa, Variovorax boronicumulans
  source 1..396: note = Related to NZ_JAAAFX010000009.1
MAVLVPYKKTNTSIGSIESLCGTLGITQEELARAIAMPLVMRYTTVEAQPKADGSVRSVSNPHFLIRKIQRRLNKRIFSNGALIGWPDYIFGSIPNQFDALGVEADKDYIACAARHCGAKSILHLDVQSFFDNIHRTQVLAIFEDFLKYSEAVSDQLADICCNGENLVQGALTSSYLATLCLWDVEGEMVNRLNRKSLTYTRFVDDITISSKVASYDFSYAQGIVQDMLASKDLPINSGKTRVRRISSEALTVHGLRVNFSQPRLPSDEVRRIRSSVQNVEKLAVESNYRQSHSYRKDFNRCMGRVNKLKRVGHKQHADLLKRLREILPLPSFKDIERAHLMVARLKDSYQAKGDSFWYRRRFYATHERLTILDRSFHAIAVKLRGELRLIRPSYD

SEQ ID NO: 3498 - protein, 408 aa, Psychromonas antarctica
  source 1..408: note = Related to NZ_JAHNZV010000018.1
MSYKYDFGKRSKRSIGSIAKLIAVLDITQKELDIVNLLTETQKYKKKETVKSDGTVRVVYNPDKTLRKIQRRINKRIFNQRGNKGGLISWPNYIYGSIPNTPQYNSNQKNLDFSKDYVACAANHCGSKSLLKMDISDFFDNIHSVHVKSVFTDLLKIPDDVSDLLTALCCLKGNVVQGALTSSYIASAVLFDVEGDVVRRLHFKGLTYTRLVDDITVSSQKLNYEFTFAQNLIADMLSKKDLPINLNKTIISNCSTEELIVHGLRVNFKEPRLPSSEVSRIRASVKHLELLSQDSIYRVSRDYRKSYDRCLGRVNKLGRLGHKQHATLLTRVLRIWPLPNKKDINLASNLIKKLEGWHLTTKADEYWYYRLCNKAHSELNILQRSYSKTALSLRKRLKNITPNREDYL

SEQ ID NO: 3499 - protein, 337 aa, Shewanella frigidimarina
  source 1..337: note = Related to DNQQ01000166.1
MSYKYDFGKRSKRSIGSIAKLLDVLDIKQEELDLVNSLTEDQKYKKNEIPKSDGTVRVVYNPHKTLRKVQRRINKRIFNQRHNKGGLISWPSYLYGSIPNTPQQNSTTKTFDLSKDYVACAANHCGSKSLLKMDISNFFDNIHETHVKNIFSNLLKFPEDVSNTLTSLCCLKGNVVQGALTSSYIASAVLFDVEAQVVRRLHFKSLTYTRLVDDITVSSQKLNYDFTFAQRLIADMLQSKDLPINLSKTIIFTCSTEELIVHGLRVNYSEPRLPSSEVARIRASVKHLELLAQDSVYRVSRDYRKSYDRCLGRVNKLGRLGHKQHSILLERTVKIKP

SEQ ID NO: 3500 - protein, 400 aa, Shewanella oneidensis
  source 1..400: note = Related to QFOM01000049.1
MAFRYDFIKRNRNSISSIPNLLDALGIEQVQFEQFQNLRDLDKYKASSVPKSDGKIRTVYNPAQLIRLFQRRINTRIFHPKHSQGGLITWPSYLFGSIPNNPQSPESSSRNYITCAGMHCGAKSILKMDISDFFDNIHHREVINIFEKLLKFPNDVSRTLADICCHKGNVVQGALTSSYIASAVLFDVEPNVVRRMHEKHLVYTRLVDDITISSKIYDYDFSYAKNIVIDMLRKKGLPTNENKTIVINSSTKEGLVHGLRVCFKEPRLPADEVGKIRASVQHVERFARDAEYRTSREYRRIYNRCLGRVNRLKQLGHNQYQNLKDRLIKIEPKPCKADIKKARNLVRKVKTLHKDYGSGYRYRRLYYKAQYELNILQRTFSVTADSLRKQLRRVKPTYEQ

SEQ ID NO: 3501 - protein, 408 aa, Aeromonas veronii
  source 1..408: note = Related to NQMB01000054.1
MENTLNYRKRYTSSIGSVSNLLSCLDITQQEYDAFCALASEEKYKSFKLPKPDGTSREVHAPHKLVRKIQRRIVRRIFGSPNRNQWDKKRPKGGAIIWPEYIYGSVPNDYYNNTPISKDYVACASNHCGCKSILKMDLKDFFDNITPDLVFNVFNNLLKYPRPVSNALVKICCHNGKLIQGALTSSYIASAVLFDAEPKLVKRLKSKNLIYTRLVDDITVSSLNQDYDFSYATELIRQVLYEKNLPLNESKTIVLRVSTSDILIHGLRVSFSKPRLPADEVSRIRASVKNLESLAKIADYRVSRDYRRSFNRCLGRVNKLKRLGHNQYKALQRRVIKILPMPSRMDITRLDSFVYKLEGWYQNHSDSYWYKRLYHRAYYDLNILNRTFKASAEKLKARLRLIKPNCDD

SEQ ID NO: 3502 - protein, 408 aa, Aeromonas sp.
  source 1..408: note = Related to NZ_PGGC01000010.1
MENTLNYRRRYKNSISTVSNLLSCLDVSSSEYEDFKALAHSDRYKEFYVPKADGTSRHVHAPHKLVRKIQRRIVRRIFGSPKRNPWDKHRKKGGAIIWPEYIYGSVPNDCYNNTMISKDYVACASKHCGSQSVLKIDIKDFFDNITPELVFNVFNKLLKYPRAVANALVDICCHNNMLIQGALTSSYIASAVLFDVEPAIVQRLKSKGLSYTRLVDDITISSRNPEYDFSFSLELVRQMLYGKNLPLNETKTNIIRSSTIDILIHGLRVSFKEPRLPSDEVSRIRASVKNLESLAKIADYRVSRDYRRSFNRCLGRVNKLKRLGHKQYISLQTRVLNILPLPSKMDITRLDSFIHKLEGWYANHKEEYWYRRLYHQAHYDLNILNRTFEHSSRRFRSRLNDIKPMCDD

SEQ ID NO: 3503 - protein, 407 aa, Pseudoalteromonas sp.
  source 1..407: note = Related to JAKRFW010000006.1
MTSKYEYHVRKRTNRSIPSIKSLKRALSISDTEIDSFYELIKEGKAYKRVLGHLKSSGDERLVYDPHPLVRKIQRLINSRVFNPRKPKEGLIVWPPYLYGSVPNTVKVIKGKVEVTSRDYISCAKNHCLTKSILKIDIKDFYENIHKSDVFDIFSKVLKYPDDVSTLLADFCTYKDKIPQGGLTSSFIASAVLHDVEPKLVQRLHKKKLIYTRLADDITVSSFTNNYDFNLCISLIKEMLISKDLPINEDKLVISNHSNSATLVHGLRVNFKEPRLPEDEISKIRASVRSLEKLAQDSKYRTSRDYRRSHSICMGRVNRMQSIGHNKARQLMVRVLKILPLPSYQDIITSHKLVYKLEKSFKKDKCEYFYKRLYNLAQYELNILQRSFSREAHELRNRLKRVKPNEV

SEQ ID NO: 3504 - protein, 407 aa, Pseudoalteromonas sp.
  source 1..407: note = Related to LKDX01000018.1
MKTHFQYHIKKRTNRSIPSIGVLKRTLSITDEEFDSFYTLIANDDAYKKVSGHFKSSGDERLVYNPHPLVRKIQRMINSRIFNPKKPKEGVVIWPKYLYGSVPNTLKWVDGKLEVFHRDYISCAKNHCLTKSILKVDISDFYENIHWQDVYEIFNKVFKYADDVSKALADFCTYDNKVPQGGLTSSFIASAVLHDVEPKLVQRLHKKKLIYTRLVDDITVSSYTKNYDFTLAVGLIKEMLLSKDLPINEEKLVISNHSNSSTLVHGLRVNFKQPRLPEDEVSKIRASVRSLENLAKDSKYRTSRDYRKSHAMCMGRVNRMQSIGHNQAKQLLNRVLKILPLPSYQDIITAHKLVYRLEKNFENDKGTYSYKRIYNLAHYELNLLQRSFSSHAKGLRLRLKEVRPNEV

SEQ ID NO: 3505 - protein, 386 aa, Oceanobacter sp.
  source 1..386: note = Related to NVWL01000003.1
MKHLEKVPSAKSIGSLNKLSHALGIEKSILIDVAESIGGYRKSERTKDNGKIRVVYSPSRIVRKIQSAINERIFTDPRIISWGEYLYGSIPNDEYVTRDYISCAARHGMCKSILKMDISDYFDNIHEDAVFDVFNGFLKYPNDVSTILAGICTHEGRVPQGGLTSSYLANLVLYDVEEIVINKLEKKKLTYTRYVDDITVSSLSYGYDFTYAQDLIKNMLHGKGFPVNEEKCVIERSGTIGLSVHGLRVGYDRPRLPREEMRRIRANVQKVEIISKEPGYRTTHSYRRDFNRCMGRVNKLVRLKHDQGAKFIKRLNAIKPLPSIKDINRCRKMVWFLAKDYENKKRRLSYERRFYICHERLNILKRSFYQEEQYLRSNLRTIRPVS

SEQ ID NO: 3506 - protein, 422 aa, Pseudoalteromonas piscicida
  source 1..422: note = Related to CP011924.1
MDKVFLDSSYSMGRPSLLVRSENMELIDYYDKDSGNSISSIKNLCLALDINESELDEISQLGDDRYVKSEVPKSSGGVRIVYNPHRTLRKVQRRINNRIFNPKSGAIIRWPSFIYGSIPNQHLLHGELEHKDYVACVKNHCLRSSILKVDVQDFFNNIHIDHVVEIFTSFFKYPDDVSNCLAELCCYKDFVVQGALTSSYIASLCLFDVEPDVVRRVKRKGLVYTRLVDDITISSMDRDYDFSYVKSLVIDMLHEKDLPVNVEKTNVFRVSEGPLLVHGLRISFQEPRLPADEISRIRASVKNVERLASEPKFRTTHAYRQDYNRCMGRVNKLKRVGHNQHKKLTERLLKVHPKPSKKDLKRIKVMISTLERDYEKKGDNYWFYKRFYRAQERLNLIAKSYPNYVNKLRPRLKKVFPNYDKS

SEQ ID NO: 3507 - protein, 399 aa, Pseudoalteromonas sp.
  source 1..399: note = Related to PNDP01000055.1
MEVIDYFAKDSDNSISSIKNLCRALDLTESEINEVRALGSDSYIQSEIPKSSGGLRRVYNPHYKLRKVQRRINNRIFNPKSGAIVHWPSFIYGSIPNQNLLDGDIDHKDYVACVSNHCLSRSLLKIDVQDFFNNIHIDHVTDIFKNFFKYSDDVSECLAEICCYNGFVVQGALTSSYIASLCLFDIEPEVVKRVRRKGLRYTRLVDDITVSSLERDYNYSYVKNLIIDMLHQKDLPINEEKTNVFRVSEGPLLVHGLRVSFREPRLPSDEVSRIRASVRNLEKLASEPKFRTTHAYRKDFNRCMGRVNKLKRVGHNQHRKLITRLLKVSPKPSKKDLKRIEVMLERLERDYDKKAGNYWFYKRFYRAQERLNLIAKSYPNLAKNLRLRLKCVFPIYDKH

SEQ ID NO: 3508 - protein, 399 aa, Arsukibacterium sp.
  source 1..399: note = Related to LAHP01000027.1
MATDVLFKKVSAPIVSIEKLCLALDISKEELNDALKLTSSERYTKSEVPKPNGKVRIVHNPHKLIRKIQRRINTRLFNPKPTGRGVVEWPYYIFGSVPNVKDPIKPIERDYIACARQHCLSQSILKIDITDFFDNIHIDHVYYIFRHLLDYSDEVCNVISDICSLNGALLQGALTSSYLACLCLFDVEPNVVIRLQRKGLRYTRLVDDITVSSIKDGYDFTLAKNIIVEMLESKDLPVNDAKTQIIHKSSVPLVVHGLRVNFKEPRLPSSEVSKIRASVKNIEQLAKERHYITTHAYRKDFNRCMGRVNKLKRIGHNQHQSLVERLRKILPLPSKKDIERCKEMVSGLESDFPNKKGHFWYHRRFYRANERITILDRTFKSIAKELRLKMKDIRPLYKD

SEQ ID NO: 3509 - protein, 399 aa, unidentified
  source 1..399: note = Related to PBYW01000011.1; note = Alteromonadaceae bacterium
MFDRFTFSAAKAPITSIDKLCETLSVSREELYDTLDLPDELKYTETQIPKSFGKVRKVHNPHKKLRKLQRRINRRLFNPKGKSDSVINWPVYIYGSVPNQEIEGVTYNRDYVACARQHCGSRSILKLDISDFFDNVHEDHVKNVFANLLKYEEEVAEVLTQLCCFNGSLVQGALTSSFLACLCLYDIEPKLVKKLSRKNLRYTRLVDDITISSTQPHFDFSMVKDIVLRQLYEKDLPVNKDKIVELYSGTSPMLVHGLRVNYSEPRLPSEEVSRIRAAVKRIELQAIEPNYRTSHTFRKDFNRTLGRVNKLARMGHNQHKKLSARLSNVRPLPSKKDIERCWSMLARLQRDYNSQKNSYWYKRRYHRLSERLIILKRTFHKTEARIREALKKIKPGFVD

SEQ ID NO: 3510 - protein, 425 aa, Pseudoalteromonas sp.
  source 1..425: note = Related to NZ_LJSO01000004.1
MANVYTDEMELCQLPLNNKYNFKYIINSGPIKSIQDLCEKVLDIPISELYKALSIAEEERYQRASVPKKDGTIRVVYNPHYLIRKIQRKINSRIFNPKVKLGKNPGVIKWPPYIFGCIPTQYQEVDEGELITDSRDYIACAKKHCLSKSILKIDISNFFDNVHKSIVEDIFKELLKYPDDVAEVLADICCKGEHLVQGGLTSSYLASLALWDVEPEVVKRLNNKGLKYTRLIDDITVSSKKQNFQFDLVKDVIVNMLHNKDLPVNNSKTEVSYASTKPLIVHGLRVNFKEPRLPSDEVSRIRANVHNVEKLAKERHYRTIHPYRKDFNRCMGRVNKLKRLGHNAHKPLLKRLQAILPLPSKLDISRCEKMITRLEADFDKGKGNTIWYWRRYNRASQRLIVLKRTFIHQALDFRERLKNVKPTVV

SEQ ID NO: 3511 - protein, 328 aa, Aliidiomarina indica
  source 1..328: note = Related to NZ_JACAVQ010000006.1
MTYRMYFERKVSGPIDSRAKLCQALSIGDEELTQALALTEAERYTESSVPKADGTTRTIYNPHHKIRKLQRRINTRFFNPSKKIHGNDSGIIRWPSYIFGCVPNDIGDDGETEVQKDYVACARVHCPSKSILKMDISDFYNNVHRDLVLEVFKDMLGFTDDEVASLLTDICCKGDSLVQGGLTSSYLACLALYDEEPEVVRRLKRKGFRYTRLIDDITISSPNENVNFDYVKDLVVNMLHAKELPVNRDKTKVQYVSTEPLLVHGLRVNFKEPRLPKGEAARIRANVHNVERLAKERHYRTIHPYRRDFNKCMGRVNKLARVNPPLAG

SEQ ID NO: 3512 - protein, 402 aa, Alcaligenes faecalis
  source 1..402: note = Related to NZ_UFSQ01000006.1
MTTALINDKIKKSNSALIGNFKNLLHALEISDDDVSKLRAFLPHDRYKEKTIKKKDGSDRKVYAPIPVLKKIQNRIKNRILANQDVISWPSYIFGSIKNQKIEGGGIDSRDYVSCAAKHSGAKSLLTVDIKDFFDNVHEDIVAAVFERYVSTDKEVINWLLDVCCYEQHLVQGAPTSSYLANMSLYDIEPQLVHKLARKGLIYTRLVDDISVSSKIYDYNFSYALKLIEDALSEKGLYLNPEKISQRSVGSAPLTMHGLRIDYQTARLPAAEVGQIRAHVKNLEDAAKSYKSRTSYAYRQDYARCMGRVNKLARVKHNQHSKYLARLRAIQPLPSGNESTYCLKKLEVLEKTYLEAKETFSYRKNFYRLQEKINILSRSFPRSAEDMKKRMKLIAPPPKDGK

SEQ ID NO: 3513 - protein, 405 aa, Shewanella algae
  source 1..405: note = Related to JAKCOW010000055.1
MSRPTIRNSAPINTLETLLKTLSISSDQLEEILALSAGERYTKPLNDVHKKDGSIRKIRCPHHSLRVIQRRISKRLIYDKVIWPEYLFGSIRTRDYEDLSERDYISCAAKHCGAKSLIKIDVENFFDNVSRETVVGIFKDLIRCSDKNSELLSEICCYEDNLVQGAITSSALAMLALWDIEGKVVDRLARKGLVYTRLVDDITISSKSHNFNFDHALNIVKQMLYEKDLPFNQAKTKIERLSSEALTVHGLRVAFKEPRLPSSEPRVIRSYVQRLEKLASDGFHRRTADYRKDYNRCVGKVVKLHRVKHNKYRPLKDRLDRIPPLPSKRDLKVVEKLICRLERDYNSETKGIGGGKYQDTYWYKKRYSRIMYRLSIVKRSYKNKYDEYIERLDKVKPDTKGLYND

SEQ ID NO: 3514 - protein, 400 aa, Marinobacter zhanjiangensis
  source 1..400: note = Related to NZ_BMXV01000003.1
MIDPRFPLFPEKTTEKSISTLQSLADAFSIPLADLEKARQLSPIERYRAKEIPKAGGGIRQVYNPSYLIRLIQSRVNKRIFLDLVRWPGYLYGSLPNTYIDDEPVYRDYIACAKNHCLSKSLLKIDISNFFDNIHRDHVYRIFNGLLKFPPPVSEYLTDICCYEDFLVQGALTSSYLATLCFWNCEGDVVKRLSRKGLVYTRLVDDITVSSRRHGFNFDYAEHHIKMMLIDLDLPANDRKKQILRDGIEPLHVHGLRVNYQTPRLPADEVRRIRSAVHNVVKMAKINNYRTSSSYRSLHDRCVGRVNKLARVGHNKHKIFKDQLLGVLPLPSRRDVEKAEGAISFLESLDRSRIKERRYTRKYHLVRYRVSIIARTYEKEARSFESRLYALSDCVGSYDW

SEQ ID NO: 3515 - protein, 400 aa, Marinobacter salexigens
  source 1..400: note = Related to NZ_NIHC01000001.1
MIDPRFPLFPEKTSKQAISSLESLAEALSVTVKDLEEVRSLESDKCYRLKEIPKNGGGLRKVYDPHPLIRRLQSRINKRIFLDLIQWPGYLFGSLPNINIDGQLVSRDYIACAQKHCKAKSLLKVDVNNFFDNIHRDHVFDIFRMFLKFSDEVSNCLADICCYNGFLVQGALTSSYIATLCFWQNEGYVVKRLSRKGLIYTRLVDDITVSSKRHDFNFEYAEHHIKMMLVDLDLPANKRKREILRDGIEPLQVHGLRVNYASPRLPADEVRRIRAAVKNVVRMSKINNYRTSLSYRAMHDRCMGRVNKLARVGHNKHGDFKRELVDVIPLPSVRDLEKAESSISFLEKLDPERLKLRKYTRRYHLAKYRVSIVARTYCQEADDLSFRLQKLSVFVGDYEL

SEQ ID NO: 3516 - protein, 398 aa, Shewanella algae
  source 1..398: note = Related to CP034246.1
MNTMISSLYPQKSSTSSISNLENLAESLSLDKNLLEYSQKLTQEERYKKIKIPKSNNSYRTVHDPIDIIRKIQNRINTRIFTQLVDWPDYLFGSIPNDIIDSRDYISCARKHCLAKSIFKLDISNFYDNIHRDFVYDIFNNFFKFPTEVSDFLTDICCYDDYLPQGALTSSYIATLCFWNVEGDLVKRFQRKNLVYTRLVDDITVSSKKHDYDFEYVEKHIKNMLLHFDFPVNNSKTKIMRDGLEPLNVHGLRVNYPEPRLPSAEVNKIRAAVHNVVKMSKINNYRTSKSYRNLYDRALGRVNKLARVGHNKHSELINKLKKVTPLPSKRDLNYIKNNIRTLKNLNELDCKKLRQLKYKRKYHLINYRISILNRTFPNKASTLRNELKLLKDKILDKQ

SEQ ID NO: 3517 - protein, 368 aa, Zhongshania sp.
  source 1..368: note = Related to JAGPVP010000081.1
VAELEAIRGIPLSERYREKPLQKGHGKIRLVYNPSFKIRLIQNLINTRLFKDLIWWPEFLFGSLPNSLHEERLIERDYIACASVHCGAKSIYKIDISDFFDSIHKDFVYEIFSKLFSYPHEVAEYLTDVCCYENKIPQGGLTSSYIATACFWDLEGEVVKKLSRKGLKYTRLVDDITVSTTVSNYDFSYVDRHVRDMLIAKDLPVNESKTLALYSGMAPLFVHGLRVDFKQPRLPAKEIANVRASVHNVCSWAKVDSYRTSVTYRAAFDRCLGRVNKLARVGHEKHAVYVAKLRKVAPLPSQFDIDSAEASISRLEKISTAKLVSVKYKRHFALVRYRITIIKRRFPSIAEKFKLRLRALEVRRNAAL

SEQ ID NO: 3518 - protein, 425 aa, unidentified
  source 1..425: note = Related to nan
MTVTPCYSALDYGGVGHDIKLPRMAVEMTDLRPEKITKSSIGSISKLSVVLSIPESDLSAILKILPENRYKKITIPKGVGGERIVYSATPLLRKIQHRINTRIFKKLIKWPPYLYGSLPNDKELVGGQTKTTVQRDYIACAQNHCGAKSILKLDIANFFENIHRDTVKKIFRKFFHYPENVSDYLTEVCCYGDTLVQGALTSSYLASLCMWDTEYKVIQKLSRRNLVYTRLVDDITISSKHRGYDFRNAESHVRAMMLKKDFPLNLSKTKIMRAGSSPLLVHGLIVNFRTPRLPSSEISRIKASVNNLVKASATDNYRTTYSFRAQYFRCLGRVNRLARVNHNKHEYLINKLKKIRPKPCKTDIERVENAIDRLKSLKDKTTDSYRRIYNIARYRIGIVSRSFDRKSMILLSELKKLEKPVSKID

SEQ ID NO: 3519 - protein, 409 aa, Pseudoxanthomonas suwonensis
  source 1..409: note = Related to NZ_PDWP01000037.1
MIHTYFSGAAMLPGKGVQKIARHSIGSVRSLCRTLSIEESELDELLTWPADARFKKKKIEKSSGGHRTVFVPNWKFRRIQRKINKRILGNTKIIRWPKYIFGSVPSSSADAEEVVGRDYIACAAVHAGSKSILKVDISDFFDNVEHDVVSDVFEKFLKYPPEVVEALCNVCCLKGRLPQGAPTSSYLANLAFWDVEHRLVRRLHQKGLRYTRYVDDITISSRKHAQDFSLALRLVDGMLIDKNLSRNEKKTLTLRSGINPLVVHGLAVEHSVPRMPAQEYKRIRASVRALENFVTDPGFRTYNAYRRMFNTCQGRVNKLSRLKRVAHASYVNRLRRIRPLPSHRDLAWCKKVAERLLARFKVPGATDGYFFKRDLFRLRERLNLLRRTYLHEAAELKNRISHIRIFSHE

SEQ ID NO: 3520 - protein, 399 aa, Luteimonas sp.
  source 1..399: note = Related to NZ_VSSP01000009.1
MSLKSHVTKVSRHSIGSVRSLCRTLSIDEPELQALLSWVPESRFKKKAVTKSSGGSRTVYVPHWRYRKILRKINKRILGNTKIIRWPDYVFGSVPSSDADDARLIGRDYIACAAVHSSSKSILKVDICDFFDNVEQPLVRNIYTDFLKYPPAVAETLCNLCCIHGKIPQGAPTSSYLANLVFWDLEANLVARLKQKGLTYTRYVDDITISSRKYSQDFSLALKLVDQMLMDKDLTRSEVKTQVLRSGTKPLLVHSLRVEHATPRIPSPEYRRIRSAVRTLENFAADAGFRTYDAYRRMFNVCLGRVNKLSRLRKKSHTAYITRLNRVGPLPSHRDLRWCQRTAREVLKRFAIPGESERFFFRRKLFRLRERLNLLQRTYVHEASAIRDSLAQIKIYSHE

SEQ ID NO: 3521 - protein, 388 aa, Comamonas sp.
  source 1..388: note = Related to VWWQ01000001.1
MTKLIEDFTKRVAGSISSIPTLANALDINLSEIENLLNTPADQRYKEKFIEKKHGGVRKVYNPSALVRKIQQRIINRIFKPLVDWPFFVYGSIPKSNGQPAKDYVAAANVHAGAGSLLKMDIKDFFDNIQREVVFDVFFDFFKYPYPVSEILTDICCRDDRLCQGALTSSYLAALCIFDVEAKMVKRIEKKGVTYTRYVDDITISSKNRSYDFSYVEKVVEEVLMSKDLPVNKGKTSVINLTSKPLLVHGLRVNTSNARLPIAEVKRIRAAVQHLEVASREPNYITLPTYREEFNKCMGRVNKLARVGHIQHSALVNRLKRIRPKSTRSDLYVAIQMLKIIRRTSQQRRQHYFFKKQCAQAKTLLTLIKKNNKYSRRAAILLNYLRKI

SEQ ID NO: 3522 - protein, 395 aa, Proteus sp.
  source 1..395: note = Related to DPFJ01000041.1
MLTDLPINRSSSGISTLISLSKTLGFSLEELEDIRNIPLDKRYFKLEKPKIDGTKRVVYRVHHKLKRLQRRINSRIFRELVIWPEFLFGSIPNDNDEVSLKRDYISCASRHCSAKSILKIDIKNFFDNIHRDLVSDIFSDFFRIKSEANEYIVDICCLENFIVQGALTSSYIASLCLHDLETNVYRRAKRKGLIYTRLVDDITVSTKVNDFDFTQIKKHIETMLAEKDLPINYEKSGVFQISTKPLLVHGLRVDYSKPRLPSDEVKKIRASLHNLIGNAVKNNNKTTIAYRTEYNRCMGRISKLGRLGHEKHKVFMGKIKCIRPMPSYLDVKNCKKKLKGLESLYSRGFNRSNKYSREFNVVSHYITLIKRSNSFMKIANEFRERLNKIKPNVEK

SEQ ID NO: 3523 - protein, 396 aa, Leclercia adecarboxylata
  source 1..396: note = Related to NZ_CP035382.1
MSNDLPSNKSNSGISTLTSLSKALGFSIDELVEIRSIPLDRRYHKLEKPKSDGSMRIVYRPHHKLKRLQRRINNRIFRELVIWPNFLFGSVPNDNDGEDSLNRDYITCANQHCGAKTLLKVDIKNFFDNIHKELVSDIFSDFFYINAEANDYITDICCAGEFIVQGALTSSYIASLCLHDVETTVYRRAKRKGLVYTRLVDDITVSSKVYDYDFSQIKKHIEDMLAEKDLPINIVKSGVFQVSTKPLLVHGLRVDHNKPRLPSYEVRKIRASLNNLIGNSIKNNNKTSLAYRVEYNRCMGRINKLGRLGHEKHAVFMGRIKKVRPMPSFQDVRECKKKIKWLEIQYSKGFNKSDKYFRVFQITGHVISLINRSDAFSTIAKELRTRLNKVKPDVEK

SEQ ID NO: 3524 - protein, 396 aa, Yersinia kristensenii
  source 1..396: note = Related to CP008955.1
MPSDIPINKSNSGISTLNALSKTLGFSLLELDEIRNIPLDKRYVKLEKPKADGSVRVVYRPHHKLKRLQRRINSRIFRELVVWPDFLFGSVPNDNDEEQSLKRDYITCAGQHCSAKSILKIDIRNFFDNIHRDLVSNIFNDFLCIKSEANEYIVDICCAGDFIVQGALTSSYIASLCLHDVETKVCRRARRKGLTYTRLVDDITVSSKVYDFDFSQIRKHIEDMLAEKDLPINSDKSGVHQISTKPLLVHGLRIDHSKPRLPSDEVKRIRASLHNLINNSSKNNNKTSLAYRVEYNRCMGRINKLGRLGHEKHTVFMGKIRKVRPMPSYRDVRECKKKLKRVEYLYSKGLNKSEKYFRNFQLVGHNISLINRSSSFSVLAKEFRVRLNKVKPDVEK

SEQ ID NO: 3525 - protein, 396 aa, Enterobacter quasimori
  source 1..396: note = Related to NZ_JAHEVU010000002.1
MSSELPIKKSNSGISTLDSLSKTLGFSLEELEEIRSIPLEKRYFKLEKPKTDGTMRTVYRPHHKLKRLQRRINKRIFRELVIWPDFLFGSVPNDNDDEDSIKRDYITCASLHCSAKSILKIDIKNFFDNIHKDLVGDIFEGFLCIKSEAKEYMIDVCCAGEFIVQGALTSSYIASLCLYDVETQVYRRAKRKGLTYTRLVDDITVSSKIYDFDFTQIRKHIEDMLAEKDLPINFDKSGVFQISTKPLLVHGLRIDHNKPRLPSNEVRRIRASLHNLINNATKNNSKTSLPYRIEYNRCMGRINKLGRLGHEKHAVFMEKIKRVRPMPSFSDVKECKKKLKKLEELHAKGFNKSERYLRNFQLVGHSISLIKRSDSFSILAKELRMRLNRIKPNVEK

SEQ ID NO: 3526 - protein, 396 aa, Klebsiella variicola
  source 1..396: note = Related to LR134235.1
MSPDLPTKKSSSGFSTLTSLSKTLGFSLEELNEIRDISIDKRYVKLEKPKTDGSMRIVYRPHHKLKRLQRRINKRIFRELIVWPSFLFGSVPNDNDEEDALKRDYITCASQHCSAKSILKIDIKNFFDNIHRDLVGDIFENFLCIKSEAKEYMVDVCCAGDFIVQGALTSSYIASLCLYDVETTVYRRAKRKGLTYTRLVDDITVSSKVYDFDFTQIRKHIEDMLAGKDLPLNHDKSGVFKISTKPLLVHGLRIDHDKPRIPSDEVKRIRASLYNLTSNSKKNNNKTSAAYRVEYNRCMGRINKLGRLKHEKHVIFMEKIKRIRPMPSFRDVKECKKRILWLEKLYSKGLNKTERYFRVYQVTGHNISLINRSASFSDIAKEHRFRLNKVKPNVER

SEQ ID NO: 3527 - protein, 397 aa, unidentified
  source 1..397: note = Related to nan
MLSDLPRNKSISGISTLLSLARALGLPREYLEEIKNMPLETRYSKLEKPKIDGSMRVVYRPHHKLKKLQRRINNRIFRELIIWPEFLFGSIPNDNDSDDDALKRDYITCAGQHCSAKSILKMDIKNFFDNIHRDLVDDIFENFLHISLEAKEYLVDFCCSGDFIVQGALTSSYIASLCLYDIETKVYRRAKRKGLVYTRFVDDITVSSEIYNFDFSQIRKHIEDMLADKDLPINLEKTGVYQVSTKPLLVHGLRIDHSTPRLPSYEVRNIRASLHNLMKNSTKNNNKTSLAYRVEYNRCMGKINKLGRLGHEKHDVFMKKIKKIRPMPSYKDVKHCKEMLKKLEDLYEKGFNKSNKYYREYQIVGHNISLIKRSNSFLVVSEDLRKRHNKIKPNFEK

SEQ ID NO: 3528 - protein, 395 aa, Escherichia coli
  source 1..395: note = Related to NZ_LR778152.1
MSSDRPIKTTASAIPSLKKLSQTLGFSIEELEEIRAIPLEKRYVKLEKPKIDGTMRTVYRPHFKLKRLQRRINSRIFRPLVIWPVYLYGSVPCDNDDESIKRDYITCASQHCAAKTILKIDIKNFFDNIHQDIVRDVFDKVLNIKDDALDYIVDVCCAGDFIVQGALTSSYIASLCLHDVEADIYARAKRKKLVYTRLVDDITVSSKIHDFDFSQIRKHIEDMLAKKDLPINVEKSGVFITSTKPLVVHGLRIDHSKPRLPSDEVKKIRASLHNLIANASKNNNKTSLAYRIEFNRCMGRINKLGRVGHEKHLVFMSKIKLIRPMPSYKDIVDCKGKLVKLEKLHAKGYNTSDIYFRRYQLVSHLLSLINRSSSFHEVVKDLRKRLNRIKPNVQR

SEQ ID NO: 3529 - protein, 395 aa, Pectobacterium aroidearum
  source 1..395: note = Related to JACFXZ010000002.1
MPSDIAINKSDSGISTLQSLAKTLGFSLQELQEIQSIPLDKRYQKLEKPKVDGTKRIVYKPHHKLKRLQRRINSRIFRELVVWPDFLYGSIPGDNDEDDLIKRDYVNCASQHCAAKSILKVDIKNFFDNIHKDLVRSIFENFLHINSDALDYLVDVCCMGDFIVQGALTSSYIASLCLYDVETKVVRRARRKKLVYTRLVDDITVSSKIYDFDFSQIKKHIEDMLADKDLPLNQEKTGVFQTSTKPLTVHGLRVDHSKPRLPSDEVKKIRSSLHNLVINSKKNNNKTTAAYRVEYNRCMGKINKLGRVGHEKHEQFMLKIKSIRPMPSKRDIIECNKKITTLEKLFKAGLSSHESYKRKFYLVSHQISIVKRSNAYKNIADELRERLSKVKINEN

SEQ ID NO: 3530 - protein, 396 aa, Serratia marcescens
  source 1..396: note = Related to NZ_HG738868.1
MTTDVPIKKSSSGISSLESLSKTLGISLLELSEIRGIPTNKRYEKILVPKADGSQRIVYKPHYKIKKIQRRINSRIFRELVIWPDFLFGSIPNDNDTEESIKRDYVSCSSLHCGAKSILKIDIKNFFDNIHKDLVSDIFCNFFCIKGDALNFLVDICVKDDFIVQGALTSSYIASLCLHDVESKIVRRARRKNLVYTRLVDDIVISSKVFDFDFSQIRKHVEDMLADKDLPLNHEKSGIFYNSTKPLTVHGLRVDHHKPRLPSDEVKRIRASVHNLVTLSRKNNARTSLAFRKEYNRCMGRINKLTRVKHEKDKVFKKMVEFIYPMPSYGDIISCKKDISSLETSFKNGFNKTEWYYRKYNLVSYKISIIKRSSAFINLADELRDRIKKVKPNEDR

SEQ ID NO: 3531 - protein, 395 aa, Phytobacter sp.
  source 1..395: note = Related to NZ_CP027225.1
MSSDLPKNTSSKGISSLSLLSKTLGIAVEELREIRAIPLDKRYEKILVPKSDGTNRIVYKPHYKIKKVQRKINSRIFRKLVVWPDFLFGSVPNDNDDEDSIKRDYVTCASLHCGAKSILKIDIRNFFDNIHRELVSDIFSTFFKCKSTALDYLVDFCTKGDFIVQGALTSSYIASLCLYDKETHVVRRARRKGLTYTRLVDDITISSTVFDFDFNQIRKHVEDMLADKDLPLNYEKSGVFHNSTTPLMVHGLRIDHLTPRLPSDEVKRIRASLNNLINLSEKNNSRTSLAFRKEYNRCLGRVNKLGRVGHEKHPIFLKKIKVIYPMPSYKDVISCKKAIASLETSYVNGFSDKDWYSRKFNLASHKISIINRSLAFQLIAKQLRVRLNKVKPDEE

SEQ ID NO: 3532 - protein, 406 aa, Serratia inhibens
  source 1..406: note = Related to CP015613.1
MGRPYVTLFGEIMDKFKPYSKSKAPISTLQKLAQTLSISIDELNEISALPEDEKYERKELPKADGSKRVVYSLHPKMRLLQSRINKRIFKELVIFPPFLFGSVPGKNDGANSNIKRDYVSCAKAHCGAKTVLKVDISNFFDNIHKDLVRDVFNNVLNIRDEALEYVTNLCCKGDFVVQGALTSSYIATLCLYEQEGNVYQRAIRKNLVYTRLVDDITVSSKINGYDFTQILSHIENMLSTHDLPVNKRKTKIFHCSSEPIKIHGLRVDYNSPRLPSDEVKRIRASLHNLKKLAVKNNTKTSMAYRKEFNRCMGRINKLGRVGHDKYELFKEQLLAIKPMPSPRDITIVESAVTSLEISCSKGNGNKHWYKRKYNLTLYKLIILTRSKAFDGIVDTFKERLKKVKPA

SEQ ID NO: 3533 - protein, 394 aa, Citrobacter freundii
  source 1..394: note = Related to CP040698.1
MDKFKPFSKSNAPISTLLKLSQTLSISVDELREIEALPDDEKYTRKDLPKADGSNRVVYSLHPKMRLVQSRINKRIFKELLVFPPFLFGSVPSKNDGVDSNVKRDYVSCAKAHCGAKTVLKVDISNFFDNIHKDLVRDVFSNVINIQDEALDYVTKICCKGDFVVQGALTSSYIATLCLYEQEGVIYQRALRKNLVYTRLVDDITVSSKINNYDFTQILGHIEDMLAEHDLPINKRKTKILHCSSEPIKIHGLRVDYKSPRLPSDEVKRIRASLHNLKKLAVKNNTKTSVAYRKEFNRCMGRINKLGRVGHEKYKVFKEQLLEIKPMPSLRDSKIIDAAINSLELSYSKGNSNKHWYKRKHDLTLYKLIILTRSQSFDKTVSLFRARLKKVSPT

SEQ ID NO: 3534 - protein, 394 aa, Escherichia coli
  source 1..394: note = Related to CP088348.1
MDKFKPYSKSNAPITTLEKLSKALSISVEELKAIAELSLDEKYTLKEIPKIDGSKRIVYSLHPKMRLLQSRINKRIFKELVVFPSFLFGSVPSKNDVLNSNVKRDYVSCAKAHCGAKTVLKVDISNFFDNIHRDLVRSVFEEILHIKDEALEYLVDICTKDDFVVQGALTSSYIATLCLFAVEGDVVRRAQRKGLVYTRLVDDITVSSKISNYDFSQMQSHIERMLSEHDLPINKHKTKIFHCSSEPIKVHGLRVDYDSPRLPSDEVKRIRASIHNLKLLAAKNNTKTSVAYRKEFNRCMGRVNKLGRVGHEKYESFKKQLQAIKPMPSKRDVAVIDAAIKSLELSYSKGNQNKHWYKRKYDLTRYKMIILTRSESFKEKLECFKSRLASLKPL

SEQ ID NO: 3535 - protein, 397 aa, Pectobacterium versatile
  source 1..397: note = Related to NZ_CAKLIV010000013.1
MFKPSLKNTNQGYISSLESLSRTLSIPIDKLIEISNIPVDDKYLLKEIPKADGSTRHVYKLHPDLRLLQSRINSRIFRELIVWPDFLFGSIPNDNDPSSEDVKRDYISCAGLHCQAKTILKVDIKDFFDNIHEDLVKDIFSNVLNIKDKSLEYLTQACCRNGFIVQGALTSSYIASLCLFDMEGKIVSRARKKNLVYTRLVDDITVSSKISNYDFSQIRQHIESMLAEKDLPINNKKTKVFYSSTQPLYVHGLIVDYSKPRLPSDEVRKIRASLNNISKLAVKNNSRTSVAYRKEYNRCFGKIGKLKRVGHNKYEVFLGKIKKIKPMPSLRDVKMAKATVKSLEVSHAKGNNNKYWFKRKYDLARYKIVILNRTKEFELLVAELRERMKNVKPNFER

SEQ ID NO: 3536 - protein, 404 aa, Proteus hauseri
  source 1..404: note = Related to AWXP01000008.1
MLNNENYCPHTPYSIAKKRITSLKILSDTLSISESELIRINSLSDHEKYTELKVPKIDGTDRIVYSLNSDLRKVQYRINKRIFRELIKWPNHLFGSVPSNNDSNKDQIKRDYVACASLHCGAKSILKIDINNFFDNIHKDIVTDIFSNVLKIEGYALEIITDLCCKGNFIVQGALTSSYIASLCLHDLEADIIKRAERKNLVYTRLVDDITVSSKLSNFDFSQIKSHIENMLANKDLPVNKNKSKILKESIQPLVVHGLRVDFEQPRIPSDEVKKIRASLHNLCNLAKKNNMRTSSTYRKEYNRCLGRINRLGRLNHNKHSSFIKIIEKIKPLPSWRDVQKTKAALNSLKASYSKGNNNKSWYIRKYHLTYYRTSILNRSTEFHDMVIYLREKLKKIKPKDKRG

SEQ ID NO: 3537 - protein, 395 aa, Providencia alcalifaciens
  source 1..395: note = Related to NZ_OU659150.1
MTSNKPISKSKKPILNLDVLSATLSIDKVELLRVDSLPSDEKYKQITLAKIDGSKRIVYSLSADLRKIQSRINKRIFRELIIWPDYLFGSVPNENDNDDSIRRDYVACAELHCGAKSILKVDIKDFFDHIHRDLVKQIFENVLNIHNDALELITNLCCKDDFIVQGALTSSYIATLCLFDQEHEIVTRTRRNGLVYTRLVDDITVSSKLSNFDFSHIQMHIDNMLASKDLPINKSKSKVTKVSMEPLTVHGLRVDFISPRVPSDEVKRIRASLHNLNMLVKKSNSRTSAAYRKEYNRCLGRINRLGRLGHNKYPIFLESIKKIIPLPSWRDVLKTKAALKSLESSYSKGNKNKSWYIRKYDLTYHRTAILNRSPVFNKLVIYIRNKLNGIKPDER

SEQ ID NO: 3538 - protein, 394 aa, Pantoea agglomerans
  source 1..394: note = Related to JACYNA010000001.1
MSIDIPTRKQNIKSLRSMHSLSSCLDISLGDLNEARALTSELRYKKKEVKKINGDTRDVYDPHQLIRRIQKRINNRIFKPLIIWPNYIYGSVPSNKEEKKLGIERHYIACAKQHCKAKTILKVDIKSFFDNIHKDIVRDIFNRVFKFKGDALEYLTDICCYEHRIVQGALTSSYIASLCLFDLEADVVNRTRRKQLTYTRLVDDITVSSPLVNFDMSQILEHIKNMLAQKDLPVNESKTQVYNISTESLKVHGLRISFNEPRLPSDEVGRIRASVHNLEGLAKKNNSLTSVAYRVEFNRCVGRVNKLGRVKHKKYKTLSDKLRLIQPKAAKRDLSKIERAICFLENSYLGGNSKKHYYKKKYDLALFNLIILRRTAAYISFADGFKARLSKIKY

SEQ ID NO: 3539 - protein, 394 aa, Lelliottia aquatilis
  source 1..394: note = Related to NZ_JAENMQ010000001.1
MITDIPIKKPNTNSLRSLHSLSSCLNISLSDLNEAREMPSHLRYKKKQVKKINGDSRDVYDPHPLIRRIQKRINNRIFKELIIWPGFIYGSVPTNKEEKKAGIERHYIACAKQHCNAKTILKVDIKNFFDNIHRDVVYSIFQRVFKFKGEVLNYLTDICCFDHKIVQGALTSSYIASLCLFDLEHNVVNRARRKQLVYTRLVDDITVSSKLVGYNMNQILEHIKSMLDEKDLPLNEDKTQVHNISTESLKVHGLRISFNEPRLPSDEVGRIRASVHNLEQLAKKNNSITSIAYRLEYNRCVGRVNKLGRVKHGKYKILSAKLKLIQPKAAKRDIDKIERAVQFLENSYKGGNSQKDYYKKKYDLAFFNLIILRRTAGFVSIADGFKKRLEKVKY

SEQ ID NO: 3540 - protein, 394 aa, Klebsiella pneumoniae
  source 1..394: note = Related to CP043932.1
MVARNPIKKPGAQSLRSLQSLSSCLDITLADLKTAIAMPSHQRYKKKQVKKINGELRDVYDPHQLIRRIQKRINNRIFKELILWPDYIYGSVPTNKDEKKKGIERHYIACARKHCNAKTILKVDIKNFFDNIHRDIVYSIFSKVLKFKGEALEYLTDICCYDDTIVQGALTSSYIASLCLFDVESDIVNRAERKKLVYTRLVDDITVSSKLVNYNMNQILDHIKDMLAGKDLPINEDKTQVHNISTESLKVHGLRISFNEPRLPSDEVGRIRASVHNLEKLAKKNNSITSVAYRIEYNRCVGRVNKLGRLNHNKYKVLSLRLKDIQPKAAKRDIVKIDRAIKFLENSYKGGNSKKDYYKKKYDLTLYNLIILRRTPGFLLIEKGFRDRLQKVKY

SEQ ID NO: 3541 - protein, 380 aa, Rahnella perminowiae
  source 1..380: note = Related to NZ_JAFMOV010000254.1
MRSLQSLSSALDISLQELEMAKNMPCNIRYKKIELKKVNGDIRDVYNPHSLIRKIQKRINNRIFKTLIIWPDYLFGSVPSNKEEKKQGIERHYIACAKKHCQAKTILKVDIKSFFDNIHRDVVYSIFKKVFKYKGDALEYLVDICCYESNVVQGALTSSYIASLCLFDVEYEVFRRAERKELVYTRLVDDITVSSKTVGYNMSQILDHIRNMLMEKDLPLNEEKTQVHNISTESLKVHGLRVSFDTPRLPADEVGRIRASVHNLEQLSKKNNSLTSAAYRLEYNRCIGRVNKLKRLGNNKHPMLRDKLKAILPKAAKRDIDKLKRAVSYLESSFASVNSGKFYYKKKYDLTIHGLIILRRTPAFSSIEASLRQRLSLVKY

SEQ ID NO: 3542 - protein, 357 aa, Providencia huaxiensis
  source 1..357: note = Related to NZ_JAGKOO010000001.1
MPYHERYKEIELKKSSGDVRIVYNPAHLIRKIQKRINNRIFKPLILWPNYLFGSIPKNELDKKEGIDRHYIACARKHCEAKTILKVDIKNFFDNIHRDIVYDVFKKVLKYKGEALEYLVDICCFGDKIVQGALTSSYIASLCLFDLEFDIVKRAARKQLVYTRLVDDITVSSKIVNFDMSQMLNHIKNMLLNKDLPINEKKTQVHNISTESLTVHGLRISFATPRLPAHEVGRIRASIHNLEQLSKKNNSLTSVAYRLEYNRCVGRVNKLVRLNHNKKDEFKRRLKAILPKASKKDIKEITRSINFLESSYALGNSNKAYYKKKYDLTIYRLIILKRTPSYHEMEAEFRNRLLNIKY

SEQ ID NO: 3543 - protein, 381 aa, Yersinia enterocolitica
  source 1..381: note = Related to HF933424.1
LRSLQSLSNALDISISDLNAAINIPVEKRYHRLELSKVNGEKRIVFDPDHRVRKIQRRINKRIFKELILWPEYLFGSIPTNQSDKENKIERHYIACAAKHCKAKTILKLDIKNFFENIHRDIVVSIFSDVFQYKGEALKYLVDICCYNEYIVQGALTSSYIASLCLFDVEYDVFRRAERKGLVYTRLVDDITISSRVVDYDMAQIKSHVENMLNEKDLPINQKKTEVHNISTEALTVHGLRVSFNEPRLASNEVKRIKASVHNIVNLSQKNNSKTSEAYRIEYNRCMGRVNKLGRVGHNKYKLLLDTLKKIKPKASLLDLQSVHKLVGELEKLHVKGSYNEFEFKRKYNLAVFKLIVINRTDSYKPFSDWIKSRLEKIKPC

SEQ ID NO: 3544 - protein, 325 aa, Yersinia alsatica
  source 1..325: note = Related to NZ_CABHWQ010000046.1
MSVNFPVKKPGAKSLRSLQSLSDALDISISDLQAAKKLTKEERYKRIEIPKVNGDVRVVYRPDHRIRRIQRRINKRIFKELILWPSYLFGSIPSTKPEKREGIERHYIACAQKHCNAKIILKLDIRNFFENIHKDIVEDIFSKVLKYKGDALNYLVDLCCFDDNIVQGALTSSYIASLCLHDLEYDVYRRAERKKLAYTRLVDDITVSSKTVNYDMGQIRGHIEEMLNKKDLPININKSEVHDVSTEPLTVHGLRVSFDKPRLASDEVRRIKASVYNITQLAMKNNSKTTVAYRIEYNRCMGRVNKLGRVKHNKHLVLLNILKAI

SEQ ID NO: 3545 - protein, 398 aa, Yersinia enterocolitica
  source 1..398: note = Related to CPZT01000016.1
MSIIRPEKLKDSGSLKKLESLSRALGLSVNELKEVKSLPLSKRYTEVKVPKIDGTFRIVYKPDYRLRKVQRRINNRIFKELVSWPYYLFGSVPSSPDDKKNGIKRDYVNCAKKHCNAKTILKVDIKNFFDNIHRDLVEDIFKNFFKYKGEALEYLVDLCCNGGYIVQGALTSSYIATLCLYDIEFDIVKRAERKNLVYTRLVDDITISSKVSNFDFSQIKMHVEKMMLEKDLPLNLEKTKIHHISTEPLSVHGLRVSFDTPRLASDEVKRIRASLSNLIALSKKNNSITSATYRKEYDRCMGKVNKLGRVEHNKHPIFLNKLKNIRPLPSEKDACRALANIHRLEVMYKNGNSAKYSYIRSFHLASYRLIILSRTACFSRLVNSLRVRLKKIEPKLQN

SEQ ID NO: 3546 - protein, 399 aa, Oceanisphaera psychrotolerans
  source 1..399: note = Related to NZ_MDKE01000022.1
MYIKKPQITTLNAIANVSNLCSVLDISEEELNQALALSDYDRYVQAKTEKNDGSFRTIHKPHYLLRKVQRRINTRIFQKIVRWPSYIFGSVPNTKDEGNNVVENKDYVSCAAQHCGAKSLLKLDIKDFFDNIDIFHVKKIFTGLFKYNCDVSNVLSDICCYRGVVVQGALTSSYIASLCLWDEEYKIIERLQRKGLVYTRLVDDITVSSRISNFQFDHAQSIISKMLQDKDLPINNNKTKVFHASIEPLMVHGMRVNFKEPRYPSDEVRRLRAAVQNIEKLSSEVGYRTTFAYRKDFNRCMGRVNKLKRVKHEKHQVLINKLNKILPLPSKTDLRRCKLAVKRLENDFNNKKESYWYKKRYYMAQDRLNVLQRTYYKTALKLRSRLNVIKPEYDNVENA

SEQ ID NO: 3547 - protein, 398 aa, Oceanimonas baumannii
  source 1..398: note = Related to NZ_SODO01000004.1
MQKDKPYITTTNVISSIPNLCKSLNITEDELSQALSLGSDMYVRDRVEKSDGSYRVIHKPHYLLRKIQRRINKRIFQKLVGWPSYIFGSVPNTVNYKGEVVEPKDYVSCAAQHCGAKSLLKLDIKDFFDNIHIYHVERIFSGFFHYNEEVSKTLSQICTYNNVVVQGALTSSYIASLCLWDKELEVVERLKRKNLVYTRLVDDITVSSKVSNYQFDNASALIVEMLRSKDLPVNNNKTKVFHATIEPLMVHGMRVNFKEPRYPSDEVRRLRAAVRNVEMLASEPGYRTTFAYRKDFNRCMGRVSKLKRVKHEKHKHLVERLNKVLPLPSRTDLRRCKLSVRRLENDYNKKRESYWYKKRFYMVHDRLNVLQRTYFKTAYQLRERLKKIRPWYDHVENE

SEQ ID NO: 3548 - protein, 395 aa, Pseudoalteromonas sp.
  source 1..395: note = Related to BADY01000010.1
MDRLIPEKSTFQSISNIKNLCAALDISEKDLSSALSLRDNEKYVIDHVEKSDGTLRKIHKPHYEIRKIQRRINKRIFKKIVLWPDYIYGCIPNEISSDGKLIKARDYVSCASQHCSTKSLLKIDIKDFFDNISAHLVFEMFSRFFKYNDEISQTLTKLCCFKGTLIQGALTSSYIAALCLWDLEHKVVSRLKRKQLTYTRLVDDITISSKTSNFQFDYALTLVSNMLLEKELPINLHKTKSSSSSILPLVVHGMRVNFEEPRYPSNEVKKLRAAVHNIEKLASEPGYRITHAYRRDFNRCMGRVNKLKRVGHNSHSKLVEKLLRVLPLPAKVDLKRSHTIVARLEKDFKEKHTSYWYHKRFYKAHDRLNILQRTYSKTAQELRLKLKAIKPKYEN

SEQ ID NO: 3549 - protein, 397 aa, Colwellia sp.
  source 1..397: note = Related to JAHKPR010000090.1
MERLSPIKSSSKSISNKLNLCKTLDITIDELDSALTLPNNQKYITAYIDKPNGEQRKIHKPHYKIRKIQRRINNRIFKRLVLWPSYIYGCIPNEKDETTNITIQARDYVSCAAEHCTSTSLLKIDIKDFFDNISFYLVNDMFLNFFKYPTEVSKILSEICCYKGNLIQGALTSSYIAALCLWDCEEKLVARLKRKGLRYTRLVDDITISSTISNYQFDYAISCVTNTLNEKELPINPEKTSISYESITPLMVHGMRINFPEPRYPANEVKKLRAAVHNIERLASEPGYRITFAYRKDFSRCMGRINKLKRVKHSSHGKLVSRLQKILPLPAKVDIKRAKIMVDRLVKDFDEKKDTYWYHRRFYRAHDRLNVLQRTYNKTSKILREKLKGKSPTYDNK

SEQ ID NO: 3550 - protein, 399 aa, Vibrio sp.
  source 1..399: note = Related to REBK01000001.1
MCNLSPKKTTEHSISSIANLCDALDITPNDLDELSLLSDQDRYTRDTVEKSNGTLRTIYKPHFLLRKIQRRINRRIFTRIVEWPDYIFGSVPNTKGPDKKVIQRKDYVSCAAQHCESKSLLKIDIKDFFDNIHIYHVKKIFLDFFKYPEDVSELLADICCFEQRVVQGALTSSYIASLCLWDTEPQLVKRLQRNNLTYTRLVDDITVSSKVSNFQFEMAMSQITRILEDKDLPINYSKTKVSYVSISPLMVHGMRVNFSEPRYPSDELRKLRASVHNIEKLASQTGYRTTFAYRKDFNRCMGRVNKLKRVKHNKHAVLLKKLKKILPLPSKTDLKRISLSVKRLESDYLDKKETYWYRKRFYMAQDRLNILNRTFNQSAAQYRERLNRIKPLYDRVENG

SEQ ID NO: 3551 - protein, 366 aa, Plesiomonas shigelloides
  source 1..366: note = Related to UGTC01000001.1
MNSLSPQKNTTESIASITNLCTALSISIDELNTVLQMEPSEWYVKDYVPKSDGSERVIYKPHHLLRRIQRRINKRILSRIIKWPEFIYGSVPNEKVDANTIIRKDYVSCAAKHCGAKSILKVDIKDFFDNIQQYHVLNIFRGFFNYSDEVSKTLANLCCYNERVVQGALTSSYIASLCLWDVETEVVKRLMRHRLVYTRLVDDITVSSTVSNFQFDSALSYIRSMLEGKDLPLNMAKTKSLYVSVEPLLVHGMRVNFPEPRYPSDEIRKLRASVHNLERLASQVGYRTTYAYRTDFNRCMGRVNKLKRVGHNKHAVLLKKLKKILPLPSKTDLKRINVTISRLESDFDRKRTRTGIRKDILRRMIG

SEQ ID NO: 3552 - protein, 395 aa, Aliivibrio fischeri
  source 1..395: note = Related to CP000020.2
MYQLEPIKKTKQVIASIPNLCSALDITIDELNKALSLSSEERYVQGKVSKSDGSYRDVYNPHNLIRKIQRRINRRIFIKLVGWPSYIFGSIPNNIDKNGKVLEAKDYVNCAAQHCLAKSLLKMDLKDFFNNIHIDHVKEMFEKFFNYPKDVSEALSNICCRGDSLVQGALTSSYIASLCLWDLEPHLVKRLKRKQLIYTRLVDDITVSSKISNFQFDMTIEHITSMLHEMDLPINNSKTKVAYTSIEPLTVHGMRVNFKEPRYPSDEVRRLRAAVHNIESLASEPGYRVTFAYRKDFNRCMGRVNKLKRVEHEKHQTLVNKLLKILPLPSEKDLKRCKASILRLETDFPLKGDTYWYRKRFYIVHDRLNVLQRTYKRTALKLRNRMKPIRPEYDD

SEQ ID NO: 3553 - protein, 395 aa, Vibrio cholerae
  source 1..395: note = Related to BODJ01000024.1
MYQLEPIKKTDESIASIENLCNTLDISLKEINEALSLSPDERYVYRKIPKSDGSYREVYNPHNLIRKIQRRINRRIFIKLVKWPSYIFGSIPNNVDSVGQVLEAKDYVSCAFQHCQSKSLLKMDLKDFFNNVHIDHVHDIFEGFFNYPSEVSRVLSDLCCREDSLVQGALTSSYIASLCLWRFEPLLVKRLKRKNLVYTRLVDDITVSSKISNFQFDMTIEHIKNMLYEMDLPLNNEKTKVIYTSIEPLTVHGMRVNFKEPRYSSDEVRKLRSAVHNIECLASEPGYRVTFAYRRDFNRCMGRINKLKRVGHEKHKTLVSKLLKILPLPSEKDLKRCKASILRLEADYPLKGDSYWYRKRFYILHDRLNVLQRTYNKTADSIRDRMKEITPKYDD

SEQ ID NO: 3554 - protein, 400 aa, Vibrio lentus
  source 1..400: note = Related to MCYK01000079.1
MYAFQFHPIKKSTSVIANFKKLCEALNISEVEMKKALSLPPEERYVASSVKKADGSTRAIFKPHNLIRKIQRRINRRIFKTLVIWPSYLYGSIPNTIDPTTKKVIEHKDYVNCAAQHCSSKSLLKMDIKDFFDNIHRDYVSDIFTVFFKFPPDVSEALTSICCRENTLVQGALTSSYLANLVLWDIEGDLVKKLNRKNLTYTRLVDDITVSSKVSNFQFDLAISLISSALISKELPINTSKTQVSYVSSNPLTVHGMRVNFPEPRYPSDEVRKLRASVHNLQCLASQPGYRQSHSYRKDYACCMGRVNKLKRVKHEKHAVLIKKLNKIKPLPSEVDQRRCKQMLRRLQNDYKNKHLDYWYCKRFYRLHDRLNVLQRKSCFRDLAEKIREEMRLIKPTYDQ

SEQ ID NO: 3555 - protein, 400 aa, Vibrio parahaemolyticus
  source 1..400: note = Related to ABGCYW010000004.1
MRNIRPALTTSKPIKSLASLESTLGLSSKQLSEILDIPECQKYVEKAVPKPDGSLRTVYRPHPLIRKAQRRINNNIFKEIVIWPSYVFGSLPNSVINQDEIERKDYISCAAQHCGAKSLLKMDIKSFFDNIHIDYVNHMFCNFFDYSSDVADILSRLCCRGDFIVQGGLTSSYVASLILWEFEPKLVKRLTRKKLIYTRLVDDISISSKISNFDFSMTKSLVTNTLHELDLPVNERKTKVSYVSTEPLSVHGIRVNFKEPRLPSNEVRCIRAAVHNLTVLASQPGYRTTHDYRSDFSRCMGRVNKLKRVEHEKHKDFLEILQNIKPLPSPKDLKRAREMLGRLERDYTTQSGSRGYRTRFFRLQERLNVLSRKKEYLNDAKKIRHKLKSLKPDETARSNF

SEQ ID NO: 3556 - protein, 397 aa, Vibrio diazotrophicus
  source 1..397: note = Related to NZ_POSL01000026.1
MRNLNPTLTTVKPITTLERTLGLDSNEISTILAIPENQKYVEKTVPKADGSLRTVYRPHPLIRKAQRKINNNIFKEIVIWPSYVFGSLPNSVIDKNEIERKDYISCAAKHCGAKSLLKMDIKNFFDNIHIDHVVSMFINFFGCKAEIANTLSRLCCKGEFIVQGGLTSSYVASLILWQLEPELVRRLSRKKLTYTRLVDDISISSKTSHFDFSMVISLVTNMLHELDLPVNETKTKVSHLSTEPLSVHGIRINFKQPRLPSNEVRRIRASVHNLTVLASQPGYRTTHDYRGDFARCMGRVNKLKRVEHEKHSEFLSILQKIKPLPSPKDLTRAREMLSRLERDYSDKNETRGYRTRYFRLQERLNVLYRKKDYICEAKSIRKKLKSIKPNENARNNF

SEQ ID NO: 3557 - protein, 400 aa, Vibrio navarrensis
  source 1..400: note = Related to NZ_CP051101.1
MYLSQPSLNTKNAINSMAALEKTLGLTAKEIQSIISLPESQKYFEKKVPKSDGSIRLVYCPHPQVRRAQRKINNNIFKKLVKWPSYIFGSIPNTKISKEQIEKKDYISCAGQHCGAKSLLKMDIKSFFDNIHFDHVLDMFVNFFHYDKDVSFTLAKLCCKSNYIVQGGLTSSYVASLILWRHEPELVKRLQRKNLTYTRLVDDISISSHVSNFDFSMVQQLVTNMLYEIDLPVNNDKTKVYHLSTEPLTIHGIRVNFNEPRLPANEVRKIRAAVHNLTILASQPGYRTLHSYREDYARCMGRVNKLKRVQHEKHSEFLKTLQNIRPLPSEKDLKRARVVYHRLMRNYSEKKDTRGYRTSFFKLQERLNVLCRKKCFREEAQKIRRKLKEIAPSKQAKENF

SEQ ID NO: 3558 - protein, 400 aa, Shewanella algae
  source 1..400: note = Related to NZ_CP068230.1
MTIIEPSLNTPNVIASIRALEKTLGLTQQDITTALEIPESKKYHVKQVPKQNGELRSVYRPHPLIRRAQRRINNNIFKKIVLWPSYIFGSLPNTINKNNEVERKDYISCAAQHCGAKSLLKMDIKDFFDNIHIDHVRSMFIHFFKCGDDVADILAKLCCKENHVVQGGLTSSYIACLILWNIEHKLVNRLARKNLTYTRLMDDITVSSKISNFDFSMTTNLIANMLQELDLPINTSKTKVCHLSTEPLTVHGVRVNFKEPRFPSNEVKRIRASVHNLTILASQPGYRLTHDYRSDYARCMGRVNKLKRVNHEKHKEFLVILQKILPLPSVRDKKRAKQMFIRLIKDYRIKYKTKGYRTRYFRLQERLNVLSRKKDYLNFTKYIRKKLKNIKPDEHSKTDF

SEQ ID NO: 3559 - protein, 401 aa, Vibrio fluvialis
  source 1..401: note = Related to JAHUCR010000005.1
MTIIKPQKIHPTTIASKSALCVTLGFTLLELNEVLSVPSSERYKRKEIDKPDGSKRVVYNPHPLIRRAQRRINTNIFKKLVSWPYYLYGSIPNTVIKESGLPKIIIRKDYVTCASKHCGAKSLLKMDIKNFFDNIHENHVRNLFLRFFHFSPEVAHILTNICCHESNVVQGSPTSSYIASLILWDVEHLAVKKISRKNLVYTRLVDDISVSSKSSKYDFSMIEDIITQMLTSRDLPVNKKKTKHCYLSTEPLTVHGIRINYKEPRFPSDEIRRLRSYVHNLQTLAKQPGYRTTHSYRTDYAICMGKVNKLKRVNHNKHFIFLEQLRAIRPLPSEDDLDRCRYVIARLDAYNTIHGNESFSYRKRFYRLQERLNVLQRLSKYKTAAKEMRARLKSLRPPNEV

SEQ ID NO: 3560 - protein, 408 aa, Endozoicomonas acroporae
  source 1..408: note = Related to NZ_PJPV01000060.1
MAKPLLFNLKTMYQILKPEKINSKSISSLDNLCEALNISVDELNEALNLPESEKYTEKTVPKSNGAIRHVFKPHHLLRKIQRRINKRIFTKLVKWPSYLYGTLPNDLDGNGDIILNRDYINCARQHCQSKSLLKVDIKDFFDNIHEDYVFEIFHVFLKYPDDVSKALTKICCHNKNVVQGALTSSYISCLSLWNMEHKIVKRLQRKNLIYTRLVDDITVSSKVSNYNFDAALSHIKNMLYERDLPLNIEKTRPYYISMEPLTVHGLRVNFDTPRLPSDEVRKIRAAVHNISKLSSEPGYRTTFAYRKDYNRCIGRVNKLKRIGHEKHEALLKKLIEIPPLPSRKDIERTRASIERLERDFQSKGSSYWYYKRFYRAHDRLNVLQRRFDVIASELRDRLKEIKPLYDKN

SEQ ID NO: 3561 - protein, 421 aa, Aeromonas caviae
  source 1..421: note = Related to NZ_KQ087566.1
MSILQYMNENQPIQAPIKPTLKTSKKISSPENLLVALGLSASELNCALYMTSAERYTAKKVPKSSGGERIVHIPHPLIKKIQRRINNRVLSKIVVWPYYLFGSVPSEIDVLYEDAILKRDYISCAQQHCKAKSILKYDIENFFDNIHYDLVNDIFINFFKFDCDTARILSDLCCIDSEDGSHIVQGAPTSSYLACLCLWDIEHDIVQRLKRKNLIYTRLVDDITVSSKIYDYNFENAKKSIEDMIHEKDFPINKAKSRALSTSSEPLLVHGLRVNFHTPRLPSDEVGRIRASVKNVELRAATNNFRTSKAYRKAFERCLGRVHKLARVGHNAHTKLRDRLLKIQPLPSQRDIDRVKHNVTRLEILAANGCDDLRYSRSYYISMYILNIINRTERYKPLVSELRARLHAIAPSKEVGGTYFD

SEQ ID NO: 3562 - protein, 408 aa, Aeromonas hydrophila
  source 1..408: note = Related to VHIX01000003.1
MAPLQPTLKTTKKIASSANLLTALGLDESELSSALAMTPAERYTAKKVPKSSGGERTVHIPHPLIKKIQRRINNRILSKIVIWPYYLFGSVPSEIDVLYEDEILKRDYISCAQQHCRAKSILKYDIENFFDHIHYDLVYEIFTNFFNYNDETSKTLSNLCCMESDDGHHIVQGAPTSSYLACLCLWDIEHKVVTRLERNNLVYTRLVDDITISSKIHDYNFENAKKSIEDMIHGKDFPINKAKSRTFSISNEPLLVHGLRVNFNTPRLPSDEVGRIRAAVKNIELRAAKNNFRTSKAYRKAFEKCLGRVHKLARVGHNSHIKLRDRLLKIKPLPSMRDINMVKRYIDRLEVQAKSGVDDIKYSRSYHITMYYLNIINRTERYQSLVSELRARLHLITPSKEDRGTYFD

SEQ ID NO: 3563 - protein, 408 aa, Aeromonas sp.
  source 1..408: note = Related to CP023817.1
MAPQKPTLKTDKKIASLANLLTALGLDESELLSALSMTYLERYTPKKVPKSSGGERTVHIPHPLIKKIQRRINNRIFSKIVIWPYYLFGSVPSEIDVLYENELLKRDYISCAQQHCKAKSILKYDIENFFDHIHYDLVYEIFTKFFKYDHEVSRILSDLCCIDGEEGNHIVQGAPTSSYLACLCLWDVECNIIKRLERKNLVYTRLVDDITVSSKIHDYNFENAKKTIEDMIHGKDFPINKEKSRTFNISNEPLSVHGLRVNFNTPRLPSDEVGRIRASVKNIELRAATNNFRTSKAYRKAFERCLGRVHKLARVGHEAHIKLKERLRKIKPLPSPKDVNKVKHYVDRLEVIAKTGCDNIKYSRSYHITMYYLNIVYRTEKYRPLVSELRSRLHAIAPSKEEKGTYFD

SEQ ID NO: 3564 - protein, 422 aa, Aeromonas veronii
  source 1..422: note = Related to JAIEYG010000002.1
MSILKNVTNSSVSVAPNKPTLKTTKTIASLANLCTALGIDSSELDAARSMTSSQRYVEKKVPKSSGGERTVFIPHPLIKKIQRRINNRVFSRIVVWPYYLFGSVPSEIEVTHHNDILKRDYISCANQHCKSKSILKYDIENFFDNIHYDLVYELFTDFFHYSDDVAEVLSDLCCINGVNGYVVQGAPTSSYLASLCLWDVEYKVVKRLERKNLVYTRLVDDITVSSKIHDYNFENARQAIEEMILNKDLPINKSKSKSFSISSEPLSVHGLRVNFNTPRLPSDEVGRIRASVKNIELRASTNNFRTSKAYRKAFERSLGRVHKLARVGHEAHRKLKDRLLKIQPLPSKRDVQRVKRAVDLLEQKSKGCVDEIRYARSYHIAMYYLNIVNRTDRYKPLVESLRTRLHLIAPDKEKHGDYFEEV

SEQ ID NO: 3565 - protein, 390 aa, Vibrio vulnificus
  source 1..390: note = Related to NZ_CP019291.1
MPKLISKNKISSVDNLCRALDISRCELDAIYALNDDEKYSEPSKLAFKKDGKKRVIKCPIPIIRKVQNRINSRIFKTLVKWPEFLFGSIPNDEFEDIELKKDYVTCASLHCEAKSLLKIDISDFFSNIHEDFVRELFLDFFNYDEDLVDYLIKICCYKGTLVQGALTSSYIASLILWNEERYVVRKLERWGLVYTRLVDDITVSSKRSKYNFSIAEHHIYEMLFKKDLPVNKEKSKTFFSSSSPLTVHGLRVSFKTPRLPSDEVRRIRAAVQCLENLYSEPNYNTSYSYRKDFQRCVGRVNKLARVHHEKHKPLMNRLRKIRPKPSEIDLKISKKILSKLKMEYDDKKDKYWYKKQYWQLVDRVNLISSTYHKEACYFRNELKNIKPEFD

SEQ ID NO: 3566 - protein, 390 aa, Vibrio campbellii
  source 1..390: note = Related to DS179564.1
MPRLISKNKISSVDNFCHALDIPRQELDLIYSLTDEDKYTEPAKLAFKKDGKKRVIKCPTPSIRKVQSRINSRIFKKLIKWPEFIFGSIPNDDFEEHELKKDYVTCASLHCEAKSLLKIDISDFFSNIHQDFVEELFKNFFKYDEELVKYLVHICCYKGTLVQGALTSSYIASLILWDEERKVVKKLDRWGLVYTRLVDDITVSSKTSRYNFSVVEHHIYEMLFKKDLPVNKEKSKIFFSSSSPLTVHGLRVSFKTPRLPSDEVRKIRAAVQSLEVLYSEPNYNTSFSYRKDFQRCVGRVNKLARVSHEKHKPLMNRLRKIKPKPSEVDIKIAYKVLAKLKKDYTNKKDKFWYKKQYWQLVDRVNLISTTFYFEAASIRKDLINIKPEFE

SEQ ID NO: 3567 - protein, 389 aa, Vibrio parahaemolyticus
  source 1..389: note = Related to JABCGZ010000001.1
MPKIIPKNKISKVDNFCQVLDISREELEAIIQLNDEDKYLEPKTLAFKKNGKKRLVKCPIQPLRKIQKRINNRIFKEIIQWPEFVFGSVPNDDELEIQKDYVTCASLHCEAKSLLKVDISDFFLNIHEDFVRDLFKRFFNYDEELCDYLVALCCYNGTLVQGALTSSYLASLILWDLERSVVNKLKRWKLTYTRLVDDITVSSKISKFNFEIAEHHIKNMLMLKDLPVNSNKSKVIYSSSSPLMVHGLRVSFKTPRLPSDEVRRIRAAVQSLERLYNEPNYNTSFSYRKDHQRCTGRVNKLARVKHEKHKALMRRLKKIRPNPSIVDVKIAEKILVKLKKDYPTKHSKYWYARQYWKLIDRINIINQSFIIDAKRLRAEASKIKPENTI

SEQ ID NO: 3568 - protein, 391 aa, Photobacterium damselae
  source 1..391: note = Related to JADQAO010000002.1
MPKITTTKKISNIDNFAKAIGVSKEYIDSVISLSDDDKYTDPKKKAFKKDGKIRIVKCPSSKLRKIQSRINTRIFKDLIKWPDFLYGSIPNDDDGEIEIKKDYISCASRHCEARSLLKIDISDFFLNIHESFVYDLFNKFFKYDDELCRCLVSLCCYKGTLVQGALTSSYIASLILWDVESNLVRRLERWQLVYTRLVDDITVSSKVEKYNFDIAKYHIKEMLFSKDLPINEKKTSVSYNSSTPLMVHGLRVSFKTPRLPSYEVKRIRSSVQSLELLFKEPGYNTSFGYRKDYQKCMGRVNKLARVQHNKFPILMNRLKKIRPKCSKLDVKISRRILRKLQEDYPQKKDMFWYKKQYYKLIDRINFISNTFKSEAHEIRLDAKKISPPEDD

SEQ ID NO: 3569 - protein, 395 aa, Pseudoalteromonas aliena
  source 1..395: note = Related to NZ_CP019628.1
MIQPKYKFGPIKDLNQLAASLSYTLKELNTLLSTPDDKKYSDPSQPAYKKDGSIRKIKNPSDDFRRVQGRINHRIFKQGIEWPSYLFGSIPKESAGRETDYIECARRHVEAKSICKIDITNFFDNIHEIFVYEMFLELFRFPEPVAKALTNLCCYNKSLVQGARTSSYIATLILWKEEGRIFERLSRKNLVYTRLIDDITVSSKIANYNFDVPKKHIENMLLEIDLPVNEDKFKIQYTSMTPLEVHGVRVTYSKPSFSKSEMMNIKAAVHHLEVLVKTPNTRTEMWYRKDYNRCMGRVNKLARVKSPRHKKLVKKLKVIRPLPSLKDLNYSKIRLKNLKEDSKNSKKIASYSYYKRYFLLMNRTNLIKLTYPDKAKALRNELYKIKPKYNPKDFK

SEQ ID NO: 3570 - protein, 390 aa, Colwellia sp.
  source 1..390: note = Related to JAHKPW010000058.1
MDIPKYNHPPFVELDKLCKMLRISRTELENILSSPSDVRYKDPKTTAYKKDGSIRKIKCPLKELRSIQEKINNNIFKTGFYWPKYLFGSIPKKAALSNRDYVSCVSLHCRAKSICKIDISNFFDNVHISLVKSVFKNLCHFSDEVTDVLADLCCYNDFLVQGALTSSYLATLILWDKEPELVENLKKKGLVYTRLVDDITISSRISNYNFDIATKRVEVMLLEKDLPINKSKYEYNYLSIEPLTVHGLRVSFDKPKLPKHESSNIRASVKNLENLAQLDSARTKMWFRTDYNRCMGRVNKLARVKNQKHQALVERLKVIEPLPSINDIKYARLRLKNLEADYSTKKKTFNYKKRYYKLNQRIHLISKTYPDVAKKIRESLKEVPPDEKPI

SEQ ID NO: 3571 - protein, 391 aa, Pseudoalteromonas luteoviolacea
  source 1..391: note = Related to JAGJEH010000004.1
MDSNLYRDNPINSIRNLLAALDISESEYEKFLITKEEDRYHRPHAEAFKKDGSVRKVYCPCKLTRKFQRRLNNRIFKKSIVWPPYVFGSIPIDVKTHESKDYIKCAAMHCKSKSLLKLDISDFFDNIDQYHVVKIFTEAFSYHQEVADFISKICCFKGHLVQGALTSSYVANLIFYDLEPELVKSLSRKNLTYTRFIDDITVSSKVSHYNFSSTKRLIEDMLLKKNLPLNEQKVEVLYSSTKPLMVHGLRVDFSEPRLPSKEVANIRAELNNLKRKAKEKKYRKSRSYRKSYDKCLGRVNKLARVKHSAHAKFKPQLKEIQPLPSAVDIKLCHVILKKLASFPDDKRESYWYKKRFNQLVYLNGIIKRLYPKSYSIIKEKSKELEPKSRVY

SEQ ID NO: 3572 - protein, 394 aa, Pseudoalteromonas translucida
  source 1..394: note = Related to NZ_CP011034.1
MEIKYYRGDPIKKLENFISFLDLEDDYEAFISSNSSSRYREPVKSAYKSDGSKRRVLCPNKLTRKFQRRINNRFFKPKIIWPEFVYGSIPKLINGIEDSRDHIKCAEKHCGAKSLLKMDISDFFDNIHKEHIKDILVNTLDLSNEVADFICDVCCFENTLVQGALTSSYVANLIFFDLEHLLVKRLERKGLTYTRFIDDISVSSTASNFNFNTAKKLIEDMLLQKDLPINEQKEEVSYSSIKPLMVHGLRVEFDQPRLPAKEIAKIRAEVHALTKKAQENNFRKSRSYRRSFDRCLGRIHKLARVKHPKHGYFKNALSDIQPLPSAVDIKHCFFIIKKLETYPDSYREKYWYKKRFNLVVYMNGIIKRLYKDKYTEISERLKEIEPKDRKYDIG

SEQ ID NO: 3573 - protein, 387 aa, Pseudoalteromonas sp.
  source 1..387: note = Related to BCAI01000026.1
MDYCKYPKAPILSIKKLCLHLGVAESNLKKALLIPHNLRYKDPSSPAYKKDGSRRLIKSPKDPIRTIQRKLNSRLFSHVKWASYLYGSIPKGKNGDIKDYIGAAKVHCQAKSICKLDISDFFNNIAEPHVIEMFRLFFRFSETVSKDLANVVTYKGNLVQGALTSSYLAMLLFWDLEPQLVSRLKSKGVKYTRLVDDITLSSEVHNFDFKLSIRLVEEMLAKKDLHLNEVKVKSSYISTELLLVHGLNINNDTPCLPKGELRKVRAAVHNLCSEADEEIRKEYWYRKEFEKCLGRVHKLKSFGKTRSFNNLMNKLNRVKPLASKQDLKYAMKRVASLKRDYKNRRKRSSFTYRKRYFIAQYKVGFLKDDYSLEHNLLRSELKRVKPK

SEQ ID NO: 3574 - protein, 370 aa, Pseudoalteromonas sp.
  source 1..370: note = Related to JACJDY010000006.1
MSLHLGVQTSDINKALLIPADSRYKDPSSPAYKKDGTKRLIKSPRDPIRTLQRKINTTLFCHLKWANYLYGSIPKGKEGDVKDYINAAAIHCQRKSICKLDIADYFNNITEHHVNNLFNDFFRFSEDVSKVLTDIVSYKSNLVQGALTSSYLAMLLFWDLEPQLVTRLKYKGIKYTRLVDDITLSSNVHDFDFSLAIKLVEDMLKEKDLHLNQVKIQSSSISTQLLLVHGLNINNKLPCLPKGELKRIRAAVHSISCVTDEKMRRENWFRKDYEKCLGRVYKLKSFGKNKSFNNLINKLNKVRPLASSKDLKYAKKRVQSLKSDYKRGKKKESFAYRKRYFFAQYKIGFLKVEFPQAYFILRSELKKVKP

SEQ ID NO: 3575 - protein, 393 aa, Salinimonas sp.
  source 1..393: note = Related to NZ_CP064795.1
MDRCSYINSPISSLSSLSKTLGEDISQIVAVADAPASEKYNKPKTPVFKKDKTERIVRSPVRALRSLQYRINKQIMVKGVSWPSYLFGSIPKGHNGEVSQDYIAAAKVHCGAKSLCCLDISDFFDNIHACDVFAVFNELFHFSTEVSTILTKLVTFDERLVQGALTSSYLAMLVLWKTEPGLVEALGRKNINYSRLVDDITLSTKKYNYNFSYEVSLIEKTLHEKGLFFNEEKAKVYSVSSELMLVHGLNVMGKNPAMPRYEARRIRAAVRQLEKLAEQEGARCEMWYRREYNRCQGRVYKLERFGKSNSFRNLLNRLQKITPLPSKKDITYAKLRVKKLESDFNNVKKRETYNYMRRFSIASHRVAFLKGYYDEEWKKLRTRLKAIFPDYRK

SEQ ID NO: 3576 - protein, 401 aa, Pseudoalteromonas gelatinilytica
  source 1..401: note = Related to NZ_LRRU01000020.1
MTTPDIPLFKAGPIKSKAHLAKVLNIDISDIDDVLNMPLDKRYRPPKNPILKSDGTIRKIFNPHRKVRFLQRRINNRINKQCIRWPSYIYGSIPKSIENGNRDYVECAHKHCGAKSILKVDISNFFDNIQEFHVKNMFKNLFRYSDEVSEIITNICCYGDRVVQGALTSSYIASLILWDVELYLVRKLKRLNLTYTRLVDDITVSSTSHNFDFNGTSKLIEEMLNEKGLPQNIDKTRVYRLSSEPLKVHGLVVSFPNPIYSKDEVKNIRAAVHQLKHRAEKQEDQKSKSYRNDYQRILGRVNKLSRVKNDKHAKLIKILRSDGLRPKPSQSDKISAEKRFDKIVIDYSRKKSQYNFYKRYHYLKHLLFFIKGEGGSDYKKFAQDKLDKLSRYEPEFKIKDY

SEQ ID NO: 3577 - protein, 341 aa, Shewanella litorisediminis
  source 1..341: note = Related to CP069213.1
MDNIKPIFQAGPIKSISRLVTALGITLSELEHVLHLSPNERYSDLKNPIYKKDGSVRVIKNPNRDIRKIQFRLNQRISKACVRWPDYLFGSIPKTDQSGNRDYVACAQVHCGAKSILKLDVSSFFDSIHKDHVYSLFHGLFRYSEEVSLCLANICCYEDHLVQGALTSSYIATLILWDVEQELVRKLRRAGLKYTRLVDDITISSTCHGYDFSMAEKLVFDMLAAKSLSLNVKKSVVYRTGTESLKVHGLEVSFSKPNLPKSEVKKIRAAVHQISLLAKNKSVRRTYKYRANYHRTLGRVNKLARLENDKRDRFLKVLLSTSVRPLPSGRDTGRDSTLCII

SEQ ID NO: 3578 - protein, 391 aa, Acinetobacter sp.
  source 1..391: note = Related to NZ_VOXY01000007.1
MNTKFEFLGSPIKDIDHLAKILDVDIEDILYAVQIEDEDKYSSRTIAKKDGRERTVYNPKPIFRKIQRRIKNRIFSQISWPDFVFGSIPADDNSHDFIECAQQHCLAQSILKLDIEDFFDNISQELVESIFKKFFRYPDPVSEILATLCCVDLKVPQGGITSSYLASIALHSLEENLFLRMKSKKLTYTRYVDDITISSKNRDFNFEAIINIVESLLNNLNLPLNKKKIEINRFSSIPLTVHNIRVDFKSPRYDKTEVKNIRAAIHRLSELAKKPNHRTHYYYRIDFNRCQGLISKLQRVNHQSYTKLQNKLNKIYPLPNDSDIKYIEKSIKELKVFFPKQIGEGNYIYNKKFFKIQHRIGFLKSHPKKIYDSKAFDLNAELQLYRIRNKV

SEQ ID NO: 3579 - protein, 390 aa, Acinetobacter calcoaceticus
  source 1..390: note = Related to NZ_CP088955.1
MNTKFEFLGSPIKDIDHLAEILDLDINDILFAAQLDDADRYTSRSIAKPDGRERIVYNPKPIFRKIQRRIKNRLFTQISWPDFVFGSIPADEKSHDFIECAQQHCLAQSVLKLDIEDFFDNITMRLVQDIFEIFFHYPEDVSEILAQLCCVDLKVPQGGITSSYLASIALFSLEEKLFLRLKSKKLTYTRYVDDITISSKNRDFNYDSIINIVENLLNSINLPLNKKKIEVNRFSSTPLKVHNIRIDFKEPKYDKSEVKNIRAAIHRLSELAKKPNHRTHYFYRIDFNRCQGLVSKLRRVNHPSYLKLQDRLNKIAPIPNNADVKYIKNSIIELIKYFPQQKGEGSYVYNKRFFKTQSRIGFLKSHPKKIYNNLAVQLNTELQLYRMRGK

SEQ ID NO: 3580 - protein, 399 aa, Acinetobacter sp.
  source 1..399: note = Related to NZ_VPEJ01000008.1
MNELTKIIYKGGPISRSELSTVLGVDEIELDFILMLEDEAKYKSSQLVKNDGRFRNINNPSPIVRKIQRKIKNRIFSLISWPVYLYGSIPAENENSHDFIACASRHCRAKSLVKLDVEDFFDNISQELVQKIFENVMFFDKDAADTLAKICCLDGRVPQGGITSSYLATLALYSIEERLYFRLKNKKLVYTRYVDDITISSKDRDFSFDMIIKIIEKELNSLDLPLNKDKVEICRFGLEPLKVHNVRVDSKLPRYDQADVKRIKAMVHRLELLVKKPNYRTHYFYRQDYNSCMGFINKLGRVEHPSYFKLKNKLKKIFPLPNNADVTYVRNSIDNLKELKLNSKNAFVYQKKFYKIQYRIALLKKHPKGIYNAKAVELNRELQLLRLNDELERKTESGN

SEQ ID NO: 3581 - protein, 392 aa, Acinetobacter sp.
  source 1..392: note = Related to AP022302.1
MIKSKYIYKGSKIDSLDKLSEVLSIDIDELTNVLLLEDEAKYKAGFIKKSNGKLRNIYNPNTSLRKIQRRIKNRIFTQQIEWPDYIFGSIPADEISSNDYVASAEKHCGARALLKLDIEDFFDNITQELVEKIFKNFFKYNDELSKILAQLCCVDGKVPQGGITSSYIASLALFSIEERLFFRLKNKKLIYTRYIDDITISSKNSEYNFDSIIKIVEGQLNSIDLPLNIDKIKVERFSSKALKVHNIRVDLKTPKFDKIEVKNIRAAIHRLEQLVKKPNYRTHYFYRIDFNRCQGLVSKLSRVNHVSVEKLQRKLNAIKPLPNKADIKFIEDSIKSLKKHFPLQKENGSFIYNRKFFKIQHRIGFLKSHPKGIYTEKAISLNTELQKYRLIR

SEQ ID NO: 3582 - protein, 394 aa, Acinetobacter johnsonii
  source 1..394: note = Related to NZ_CP045101.1
MNNVNFVYRSKKFQKFLDLAKRLDLSAAEILKISKIPDSEKYETDEIEKSDGRIRKIHKPCADIRKIQRRINKRIFNAVIWPNYIYGSIPANKLNNENKDYVECASMHCQARTILKLDIEDFFDNVSEDLVYRIFNKLFGFSEKVSLVLARICTVDGALPQGGLTSSYLASLALFEIESNIYSRLKNKKLTYTRYVDDITISSKKDNFNFQSTINILEVALNSIDLPLNQAKINVSNFSSELLRVHNIRVDQSKPRLDKAEVVKIKDNVSRLKEIAFDKKQPNIRTYYFYREDFNRCLGLINKLGRVNHPSYEKLNKALMKIYPIPNLSDIQYVRDSINKLKNLYPAYMNSYIYRKLFFRIQHRIGFIKKHKIYEKTARNLNLELQKYRAMYEK

SEQ ID NO: 3583 - protein, 398 aa, Acinetobacter sp.
  source 1..398: note = Related to NZ_CP067019.1
MTIPDKYLFKLNTTNKISSLNNLASALGVTLSDLKYAANLPDNKKYEHFFIKKSDGRERLIHKPCKEIRNIQRRINHRIFKPLVIWPVYLFGSVPSEKHEPAHDYINCAKRHCLSKSVLKLDIKDFFDNIDESLVKKIFREFFKYSESVVNILTKICCVNGHVPQGALTSSYIASLCLFSIEPLLAQRLNNKNLRYTRYVDDITISTTKHKFDFNATINIVENLLNSVDLPLNIEKIKTEYFSTEPLKVHNLRIDFNKPRYDKSETKNLRAAINRLSIQKKIPNYRSHYFYRSDYNRCVGLINKISRVNNPCSNRFFKKIKKIKPLPNPNDLEYVRKSIFELIRDSLTHKNTYRYRKKFFRTQQRLIFIRSHPQYIYEGSANALNILLQKYRLNYEEK

SEQ ID NO: 3584 - protein, 398 aa, Acinetobacter baumannii
  source 1..398: note = Related to ABDHTD010000004.1
MSLPENYLFRLNTANKISSLNNLAKALGVQVSYLRKIADLPDEKKYEVFSIKKNDGRERLIHKPCKEIRNIQRRINHRIFKPLIIWPTFLYGSIPAEKEEPVNDYINCAKKHCLSKSVLKLDIKDFFDNIDEALVKNIFRDFFKYSEAVSNLLTKICCVNGHVPQGALTSSYIASLCLYSIEPILAQRLNNKKLKYTRYVDDITISTKKNNYDFNATINIVEGALNSIDLPLNIEKIKVEYFSTKPIKVHNLRIDFKTPRYDKDEARKIRSAIDRLVKQKEIPNYRSHYFYRADYNRCIGLINKINRLKHPSSKNFLKKILRIKPLPNPNDLDYVRRSIFELSRDYAIMKNSYQYRKKFFRIQQRLIFIRSHPQMIYENSAQVLNSILQKYRPLYEEK

SEQ ID NO: 3585 - protein, 391 aa, Pseudomonas aeruginosa
  source 1..391: note = Related to CP061850.1
MDELKVRLKDGVDPIQSVDNLCSALDIPRSELDEVLALSDDERYIEISLPKSNGSRRLVYDPHPRLRRIQRRIKSRLLVSQILYPRYLYGSLSDSEYPRDYIRCASIHCGAKVLLKADIKNFFDNISRRLVLEIFERVFHYPEEVSDVLSDLCTRAGVVPQGASTSSFLANLCLLNEWCFVRDIQYEKLRYTRLVDDITISSTTTGKDLSRCMRTLTAMIESAGFELNENKTGIEHVTTKAFSVHGLRINKPSPCLPREEVRRIRADVHNLKRKASVPNARVSFEYRKLYESISGRVNKLKRLNHGRYNELRRQMNAILPLPSTKDIKRCQIMLATLERDYDLHRDSYLYKLRYSRLIHRLGILKRIYLHEAAAIRDALQDLKPEFVNEAD

SEQ ID NO: 3586 - protein, 390 aa, Pseudomonas oleovorans
  source 1..390: note = Related to NZ_LR130779.1
MEELKARTKDGIDPIQNLDNLCDALGISREELDTALSLTDEDRYVEIKLRKKNGSTRIVYNPHPKLRRIQRRIKNRILSSQIIYPHYLYGSLSDKENPRDYIRCAAVHCGAKTVLKVDIRNFFDNISRDLVFEVFKTILHYPPEVSDTLANLCTRCGVVPQGASTSSFIANLCLLDEHDLVRKLSYDSLRYTRLIDDITISSKTPNKDLEKWMRVLKRMIEDSDFELNEEKSGIEHVALKAFSVHGLRINRSTPGLTREEVRKIRSDVHNLKNKASEPNARVSFEYRRLFESVSGKVNKLKRVNHPRYNILRKQMRDILPLPSKKDIKRCQIMLATLVRDHANHNSSYLYKVRHARLRHRLGILRRIYHHEAAAMRQTLRGLEPNFSDDT

SEQ ID NO: 3587 - protein, 390 aa, Pseudomonas stutzeri
  source 1..390: note = Related to NZ_WIFO01000002.1
MDEFSPHAKPNIAPIQSIANLCNALSLTREEFDYASSLATPNGYIPIELTKKDGSKRTVFDPHPALRRVQRRIKNRILATNVVYPKFLYGSLSDPDHPRDYVRCAAIHCGAKTIAKIDISNFFDNIDYDLTFRIFADILHYPREVSLALANICTREGTIPQGAATSSFIANLCLFEEGGLVEGFTRENLRYTRLVDDITLSSTSTQKNLTRHFSKLEKMLQDAGFTLNVDKSGIEHISTKAFSLHGLRISQASPQLPREEIRKIRADVHNLKQEAAKANARVSFNYRRLFESVSGKVNKLKRLEHPRYQTLRAQLTDIRPLPSKRDIRRCQVMLATLKRDFPDHSESYLYKKRYFRLRHRVGILRRIYEREAQKITQELKDLKPRHVDEH

SEQ ID NO: 3588 - protein, 392 aa, Pseudomonas viciae
  source 1..392: note = Related to NZ_CP035088.1
MDEYAPQKTTSESIFSIDNLLAALGLSEAEYKSIQDLEEKNRYTPLHLKKKNGDDRVVFDPHPLVRKFQRRIKNRLFNQIRYPTYLYGSISDPEHPRDYISCAQRHCKAKTILKIDITSFFDFIDYDLVYKIFNELFFYSDEISEALANICTREGVVPQGAPTSSFIANLCFFDTEGRIVKGLERQQLSYTRLTDDITVSSAIQDKDLNKAKSTIVSMIEHAGFKVNEAKTSIESISTTAFKVHGLRVNKETPQLPRDEIRAIRAAVNNLKILSREPNARTSFDYRKRYESISGRVNKLARTGHPRYKKHRLELKSILPLPSQKDIRRCLTMLSTLMRDYDVFCSTPLYMKRYHRLRHRLILLQRVYKHEAKKIWTELKVLTPTKSKAEHEL

SEQ ID NO: 3589 - protein, 392 aa, Pseudomonas sp.
  source 1..392: note = Related to UETT01000008.1
MDEYVPKKLTDESIFSVDNLISALGICEADFKIIQSLETKDRYTAINLKKKNGDDRIVYDPHPLIRKIQRRIKNRIFTQIRYPKYLYGSISDPDCPRDYISCASRHCKAKTILKIDITSFFDNIDYDLVYKIFRELFFYSDEVSETLAGICTREGVVPQGAPTSSFIANLCFFDIEGGIVKGLERQNLNYTRLTDDITVSSTTQDKDLNKAKDKIISMIQNAGFRINEDKTCIESISTTAFKIHGLRINKNTPQLPRDEIKRIRAAVNNLKILSKEPNARTSFHYRKLYESVSGRVNKLARTGHPRYHKHRQDLRDILPLPSQKDIKRCLVMLSTLMRDHETLCSSPLYMKRYHRLRHRLILLQRTYKHEANKIWKTIKDLTPTKSAAEHAL

SEQ ID NO: 3590 - protein, 389 aa, Pseudomonas zhaodongensis
  source 1..389: note = Related to NZ_RFFM01000002.1
MDEFSFSKTTNQSISNIANLAYALDVSEELIDEALALPSDQRYTPHRPGNGNRLVYRPHPLIRKIQRKIKNRILVDLVRYPRYLYGSLRDVGFPRDYISCAQVHCLSKSVLKIDITKFFDNISANVVEDIYSDFFSFPFPVADVLANLCTHEGWVPQGAPTSSHLANLCFFREEPSLVRQLHRQGLRYTRLIDDITISCDSYGYDFTKDEERVRRLITEKGFSVNEAKTGLHYQGNSNIKIHGLRINFPKPQMTQEESRNIRVAVHQVEQWAAEPNCRTSIAYRKLFESTSGRVNKLKRLSHSKYDRYRKRLQKLLPLPSNKDYDRCIGLYNGVVADAAKGVHSFRYYRRYCLLQNRLNLIQRTRSYRAEAVRMRAVLKGLKPTYKNDI

SEQ ID NO: 3591 - protein, 382 aa, unidentified
  source 1..382: note = Related to NYWB01000030.1; note = Pseudomonadales bacterium
MDQLTFTKKTDQSIGPSAENLANALGISPEELDEALQIPSAQRYIPFTVSGGTRVVYRTHSRIKFIQQKIKNRILADCINYPKYVFGSIKDPDFKRDYVNCAAQHCGARSLLKVDIEKFFDNISIGNVRRIFRDLLHYPDPVCSMLCDLTTHNGYLPQGAPTSSHLATLCFFKEEPDIVEQAQAQGLVYTRLMDDITVSSKSYDYDFHRLERLIRNMIETKDLTVNEGKSETFPTVSSTTLVHGLKINTETLRVSDKTLSNIRAAINQLEKDAKQPNKRTLSNYRKRYERTSGSLSVLHRLGHPKYEKYRRKLRRLRPLPSPYFLNKTWELMESIENIQDMRESAIYRKRFYMLHHKLNLAQRTFKAEAKTMRERLKEIKPK

SEQ ID NO: 3592 - protein, 360 aa, Marinobacter sp.
  source 1..360: note = Related to JAGPVE010000050.1
MAHLQDLALPFDGRYFELSKPKRNGGTRIVYDPHPDLKAIQKKINSRIFRAVFYPRYLYGGIRDTLDSRDYIKCATVHCPSGVVAQLDIDGFFDNILFHQIYEVFTGFFHYSPDVSNLLARICAKDEFNLPQGAPTSVALSNLVFFNDEPNLVRHILDSGARYTRFIDDITISHPDSKFPIEKYAKATIRIIERNGFRINESKSGTLRDTGLIDVFGIRVNGAIPRTPQNYSKNLRRKIYQLEELAKIPNERKQEGYRTSWNSTSGRLAKLKRTSSGKYRTYRKRLNKIKPLTHEREARRVKAKTRRMLVDSQKIQNPEAFKKRYQKLMHEIGSLKSTYPALNTSLKSLMAQVRENMAEE

SEQ ID NO: 3593 - protein, 360 aa, Marinobacter adhaerens
  source 1..360: note = Related to JAINWM010000001.1
MEHLEALAQPFEGRYFEIQKPKKNGGIRVVYDPHPHLKAVQKKINSRIFRTVTYPRYLYGGIRDTADSRDYIKCATVHCPSSVVVKLDIDSFFDSVLSHQVLDIFSDFFNYSPAVAELLTRLCTKDDFNLPQGAPTSVALSNLVFFREEPGLARGIEGSGARYTRFIDDITISHSDSKFPVEKYLKAARRVITEKGFDINEDKTQTVRDTGLIDVFGIRVNGATPKTPKKYSKELRQKIYRLEELARIPNERKQEGYRASWHSTSGRLAKLKRTNSGKYRTYRRRLDKIKPLTHEREASRIKAKTRRLLNDSQQIHNKDAFRKRYQKIMHEIGLLKSTYPALNTSLKSLMKQVRENMDAQ

SEQ ID NO: 3594 - protein, 382 aa, unidentified
  source 1..382: note = Related to NZOQ01000019.1; note = Alteromonadaceae bacterium
MPLNISYSAPHRIASKRNLAKALNIGDEELEYLIAQKNHHYRQKRLPKKSGGTRTVYAPERNLKALQRKIVARIFHLVRFPPYLQGSISDPENQRDYIKCATQHCGAVAVSHIDIKNFFDGIEFDRVVDIFEGVFLFRSEVSLLLAELCTLDGYVPQGAPTSSYIANMIFFKDEPKIVNLANKSGITYTRLVDDITISTDVKNTCLRTLTKKVIRMIESYDLEINADKTKSMIRGSVPLTVHGIRVVEKKPKISRDEYRNIRDAVHRVVLASSTPNYRTKFEYFKLYHRVSGRLSKLKRLEHPGYTRLRNKLKPLLPLPSKGFKAKVTEKIEKLERNYSLSSSHEWYKKEWNVTSYKLGIVGRTYKKESSELRARIKAIRPS

SEQ ID NO: 3595 - protein, 382 aa, Idiomarina sp.
  source 1..382: note = Related to SNZY01000014.1
MKISTYKPINVIGNPANLAAALDSSLEELGSLIENKAKLYQKKIIPKKNGKSRTVYSVDRELKKIQNKINNRIFSEVEFASYLFGSISDPDLPRDYLLCAESHCPSAIIATIDIKDFFDHITDEKVEKIFSGFFNFPDDVAELLTELCTFQGRVPQGAPTSSYLANLMFGTQEKRIAKAANECGARYSRLLDDIIISSPQKNFSIDTLYQRVEQMIVNSGFQINETKSKVDILGPKPLEVHGIVVTGNSPKVSKLKYQEIRRLVHQVSDLSKTDNRRTTHRYYKKYHRAYGLLSILKRVNHPAHKKLKSKLTSAPPLPSNRFRNSIFRRLSKLESKHQIHQQRKWFAKDWNRISHELGILRRSYPEDATNARNRLNLITPYV

SEQ ID NO: 3596 - protein, 393 aa, Enterobacter sp.
  source 1..393: note = Related to NZ_KI973178.1
MAKDFSFKNTFTPIQKKESLLALLGISDIDKFEKLISDGVEKAYYIKPPIEKKNGGHRIVYAPNRMLKSILRKINNKIFSQINFPDYLYGSIPDKENPRDYILCAQQHCKSKILVKMDIENFFPTMKSKFVYQIFKELFRFSDEVSNILTTLTTYEGFVPQGAPTSTYLANLYFYDCEPSKVSYLRKLGFRYTRLIDDITISRLNKEEDWKFVESVISNFIKQKELTVNNEKTKLLSAKSPQSFKVHGLCIEDEAPRFSKTERTNIKTQVHQVVRTAYGRDQIRMQPSFHKKYFSVKGKITKLKRVDCPDYPVLKNLLKKHCDPLPEHKEIKRINRVISNLSKDHVSIGHTERYKSRYFQVVFRLDILKKLYPVEANEFRARLRQIGPTKNEN

SEQ ID NO: 3597 - protein, 328 aa, Pectobacterium fontis
  source 1..328: note = Related to JSXC01000034.1
MLKSILRKINNKIFSQVNFPDYLYGSIPDKESPRDYILCAQQHCKSKILIKLDIENFFPTMKDRFVYKIFKELFRFSDEVSSILTKLTTYEGFVPQGAPTSTYLANLYFYDCEPSKVRYLRGLGFRYTRLIDDITISRIKKEGDWKFVESIISEFINKKELTVNEEKTKLLSADSPQSFKVHGLCIEDTTPRFTKIERSNIRTQVYQVVKTGYGHDKIRMQLSYHKKYFSVKGKITKLKRVNCPDYPLLKKLLKKHCDPLPEHKEIKRINRVISNLSKDHTNFGHTERYKSRYFQVVFRLDILKKLYPIEASEFRSRLRQIGPIKNEN

SEQ ID NO: 3598 - protein, 393 aa, Photorhabdus laumondii
  source 1..393: note = Related to BX571875.1
MPKGFSFKDTFTPIQRKESLIGLLGIKDIEKFESLLRDGVENAYYIKPPIKKKNGGERIVYAPNRMLKSILRKINNRIFNQINFPDYLYGSIPDKENPRDYILCAHQHCKAKILIKLDIENFFPTMKTKFVFNIFKDLFKFSDEVSNILTKLTTYDGFVPQGAPTSTYLANLYFYDCEPNKVNYLRSLGFRYTRLIDDITVSRLKKEGDWKFVETIISEFITQKELSVNKDKTQLLSANSPQSFKVHGLCIEETTPRFTKNERINIKTQVKRVVKTGYNRDNIRMQKNYHDVYFSVKGKITKLKRVNCPDYPLLKKLLAKHCDPLPEHKEIKRINRVISNLSKDHATFGSTERYRSRYFQVIFRLEILKKLYPVEANEFKARLKLISPIKNEN

SEQ ID NO: 3599 - protein, 393 aa, Leclercia sp.
  source 1..393: note = Related to NZ_CAKAKG010000001.1
MPKDFSFKDTFTPIQKKESLIALLGIKDVEKFNNLVRDGVERSYYVKPPIKKKNGGERIVYAPNRMLKTILRKINNKIFNQINYPNYLYGSIPDKENPRDYILCAQQHCKAKILIKIDIENFFPTMKAKFVFKLFKEVFKFSDEVSDILTKLTTYDGFVPQGAPTSTYLANLYFHDCEPNKVSYLRSLGFRYTRLIDDITISRLEKEGDWKFVEGIISDFIKQKELTINDKKTKLLSTHSTQSFKVHGLCIEESSPRFTKNERLVIKTQVNRIVKTGYGNDKIRMDKNYHNSYFSVKGKTTKLKRVNCPDYPVLKKLLSRHCDPLPEHKEIKRINRVISNLSKDYAVCGNTERYLRRYFQVIFRIEILKKLYPVEANEFKLRLKLISPIKNEN

SEQ ID NO: 3600 - protein, 390 aa, Pantoea agglomerans
  source 1..390: note = Related to NZ_LVHW01000001.1
MASSFSFKETFTPIQSVQSLINLLGVKDTEKFEDLIRNGAETSYYIKPPIKKKNGGERIVYAPNKMLKSLLRKVNQKIFTQINYPDYLFGSIPDKENPRDYILCAEQHCKAKVLIKIDIENFFPTMREEYVYKIFNKLLKCSEEVAQILTKLTTFDGYVPQGAPTSTYLANLYFFDSEPKKVQHLRNNGFRYTRLIDDITVSRATKEGSWKYVESFIGEFITQKHLSINKDKTISRSSSSPQQFKVHSLSIEGEKPKFPRIERLKIKDHVHRVVKTGYGKDNERMKKSFHYLYFSVRGKITKLKRVDCSDYPIFKKMLKRHCDPLPDHKEIIRLNRVISNLSRDFNSLGESERYKNRYFKVMFRLSILKKLYPKETNEFKKRLKLISPKK

SEQ ID NO: 3601 - protein, 396 aa, Leclercia adecarboxylata
  source 1..396: note = Related to CP042493.1
MQSNNFVINKKNLPPIKNVDSLIKLLGVDAGYLDFLIEHGVEKNYYRKDPIPKKNGGERIVYAPNKKLKSLLKRINNKIFSQISFPHYLYGSISDSEHPRDYIRCASVHCKAKILIKIDIQDFFPSMDSVGVNSIFSKFFNFSDEISQILTKLTTYHGIVPQGSPTSTFLANLYFYDVEPSIVSHLESEGFRYTRLIDDITISKSERGESYKYIKPRIIKMITNKGLVINEKKCSEQSLKSSQSFKVHGLCIEEETPKFSKPEILKIRGQVFNILRVGYCNDKMRMSRDFHKFYFSVKGKTTKLKRVNSPEYTELKKLLKRNCDPLPDHLEIKRLNRVISNLSKDYVLLHNSKRYKSRFFHVYFRLVILSKLYKEEADEFKTRLKRIRPSSDMSSL

SEQ ID NO: 3602 - protein, 354 aa, Yersinia sp.
  source 1..354: note = Related to NZ_CP042173.1
MLTRGVASFYTEKEINKKSGGKRLLHAPNRKIKFILRKVNNKIFNKVLFPHYLFGSISDKENPRDYIRCAEVHCKAKILIKVDISNFFPSINTYSVRDIYKVFFNFSDEVSDVLTELTTVNGTVPQGAPTSTFLSNLYFYNIEPQLVKYLESLGFRYTRLIDDITISKLDKNNFRFADDRVKAMITQKGLTINEGKSSIQSTVAAKGYKVHGVCIDEDKPRFTKSECMKITDEVYQIARVGYNRSDVRMRQSYHKAYYSVKGKITKLKRVGYVKYNDLRKVLNKHCEPLPDHDEIKRLNRVISNIQRDYTGKPATDNYKRRYYQAHFRLSVLRRIYKEEAKQFRARLISVRPNR

SEQ ID NO: 3603 - protein, 389 aa, Aeromonas sp.
  source 1..389: note = Related to JAHUWU010000005.1
MNNRPTYHGGVISNPLTLARVLGIELADLLAMSVDTVSHYKAKEINKKTVGAGKRVIHMPDESIKRLLRRVNSRIFNGVTFPGYLYGSISDQENPRDYIKCAELHCRASVLIKVDISNFFSQITTEHVYKIFLKFFNFSHEVSEILSKITTVTGFVPQGAPTSTFIANLCFFETEASLVTYLHGAGFRYSRLIDDITVSTLNNKLPWQYVEDRIVRFLDKEGFSINADKTESISTPSAQSFKVHGLCIGDEKPRFSKKHIDEIKKSVNCVLKKALFSDKNRKEKSYHKLFYSTQGKTTKLKRVKHNSYPSLKKALGRYALPLPDERESYRLNIAVKNLERDYPTLSSKLAYRNRYYKAKFRVGILSRIYRRDATLLNNRLKDILPTYED

SEQ ID NO: 3604 - protein, 395 aa, Vibrio splendidus
  source 1..395: note = Related to PIFQ01000031.1
MDKPHYPCRPIGSVDVLANTLGVHIRRLRNIASKVDSSYTSYELKPHPVTNKVRTVVEPKHELKKIQKKINSRIFLHVNFPEYLQGGIRATSQSKRDYIENASRHGRSQTLINLDVKNFYPNIKADVVRDIFKYFFKFSDDVVDILTTLTTYRGSIPQGGCTSSYLANLVFFNDEYRIVSSLRGRNLRYTRLLDDITISSVTTIDNKTSEKIIKDIAGMLRKRNLSLKSPKTKVTDRSEMHKDFEVTGLCVRASEPKVRKKDRRLIRLSVFQCESQAKTDRTSDDYHKNWNKTSGLVAKLKRLNHSQAKDYRKRLAEILPLYDEYRESKIVKRAYAALKVPVSSHEKIGTIRSYNNLIYQLGILSRTNKKVAKGLSKSLKDHYSSVPTIENFWEN

SEQ ID NO: 3605 - protein, 395 aa, Vibrio ichthyoenteri
  source 1..395: note = Related to NZ_AFWF01000003.1
MDKPHYPCQPIGSIDVLANTLGVHKRKLISIASKVNTSYSSYELPAHPITKKVRTVVEAKHELKKIQKRINSRIFLHVKFPEYLQGGIRATDKVKRDYIENATKHGRSQTLINLDVKNFYPNIKSEVVRDIFKYFFKFSDEVVDILTTLTTYRGCVPQGGCTSSYLANLVFFNDEYRLVSSLRGRQLRYTRLLDDITISSVKKIDQKLSEKIIKEVAGMLRKRSLSLKSPKTKVSDRSEMHKDFEVTGLCVRDSEPKVRKKDRRHIRQLVFNCELKAVNDRTSDEYHALWNKTSGLVAKLKRLKHSQASDYRKRLAVILPLYDQYQEGKIVKRANAALKVPVDLHSKFGVMRRFNSLIYQLGILSRTNKSVAKGLSCLLKKHYSSVPSINDFWET

SEQ ID NO: 3606 - protein, 395 aa, Photobacterium damselae
  source 1..395: note = Related to NZ_CP035780.1
MDKPLYPCKSIGSIQVLAQTLGVHPKKLVSLARKANASYTSYELPPHPTTQKIRVVVEPKHELKKLQKRINSRIFINVKFPNYLQGGLKATSTVKRDYIANAFLHGKSKTLINLDVKNFYPNIKQKNIVDIFKYFFKFSDEVVDILTALTTYNGSLPQGGCTSSYLANLVFFNEEYKLVSSFRGQKLRYTRLLDDITISSEKTIIDKDKEKIIKRVAAMLKKHGLSLKSSKTKVTDRSEMHKDFEVTGLCVRATTPKASKKDRRYVRQLVHNCELMAVKEKTSNEYHALWNKTSGLVARLTQLKHNEAKGFRERLSEILPEYDQYQKDKVIKRARAALKVPSTAHSEWGTIRRYNRIIYHLGILARTDKKQAHRIKLTLKKHYSSRPTINEYWES

SEQ ID NO: 3607 - protein, 395 aa, Shewanella sp.
  source 1..395: note = Related to MCUF01000038.1
MDKPLYPCSSIGTLDVLSKTLGVHPKKLKSIASKVNDSYSKYELPAHPTTGKVREVFEPKHELKKIQKRINSRIFEHIIFPEYLQGGIKATPEIARDYIANATIHGRSKTLINLDVRNFYPNIKENVVSDIFKYFFKFSDEVVEILTKITTYNGSLPQGGCTSSYLANLVFYNDEYRLFSSLKGRGLRYTRLLDDITISSPQLIDKELSVQLIKDVAALLRKRNLNLKSNKTKITNRSEIHKDFEVTGLCVRAAKPRTRKKDRMYVRQLVFNCEKMAVESKSSEEFHKLWNKTSGLIAKLDRLKKSHAKDYRKRLSVILPIYDQYQENKIIKRSKRALKVPITSHSQWGTIQQYNNLIYQLGILGRTKKGLAKNLRKSLKLHYSSVPTINKFWEQ

SEQ ID NO: 3608 - protein, 395 aa, Pseudoalteromonas sp.
  source 1..395: note = Related to JACJDR010000003.1
MDKPLYPCKPIGSIEVLAKTLGIHTSKLQSISKKIEESYTPHTLKPNSSTGKVRSVFDPKFELKKLQKRINSRIFENIKFPEYLQGGLKATASCKRDYVENAEIHGRSKTLINLDVKDFYPNIKVDTVRDIFKNFFRFSDDVVDILTVITTYRGCLPQGGCTSSYLANLVFYNNEYRLFSSLRGRGLRYTRLLDDITISSKTAIDNKVREKAIKDVAAMLKKKNLRLKSSKTKITDRTEMHKDFEVTGLCVRSRLPNIPKKERKYIRQLVFNCEKIGRNDKTSKEYHSLWNKTSGLVTRLGRLGNTQASDYRSRLSEVLPEYDEYEEAKLVKRSNAALKVPQSEHLKWGVIKRYNIIIYHLGILTRTKTLLARNLRNKLKEHYSLVPSVKDFWEK

SEQ ID NO: 3609 - protein, 395 aa, Agarivorans aestuarii
  source 1..395: note = Related to NZ_AP023033.1
MDKPLYPCKPIGSIHVLANTLGVHPLKLKSIANKAESSYTSYNLKQHPTTGKVRTVCDPKHELKKIQKRLNSRIFAKVEFPPYVQGGIKATIDSKRDYIENATIHGRSQTLINLDVKNFYPNVKADAVKNIFKYFFRFSDDVVDLLTKLTTYRGSLPQGGCASSYLANLVFFNDEYRLVSSLRGKQIRYTRLLDDVTISSQKPLDGNTSEKIIKQVAAMLRKHNLSLKSPKTKVSDRKELHKEFEVTGLCVRASFPKVRKQDRRYVRQLVFNCEQLAAQTRTSEDYHSLWNKTSGLVAKLVRLQHSEGKSYRKRLTKILPLYDQYQENKICKRYYAALKVPREQHVQWGTINKYNKLMYSLGILSRTNKKRAQHFRKKLATHYSSVPVIEDFWES

SEQ ID NO: 3610 - protein, 394 aa, Shewanella frigidimarina
  source 1..394: note = Related to JAACRB010000019.1
MDKPRYPCKPIGSIDVLATTLGVHKKKLIDIASKVNSSYTSHELPKHPITGKIRKVVDPKHELKKIQKRINSRIFELVIFPPYLHGGIKATSSIKRDYVENASQHGHSQTLINLDVKNFYPNIKTNAVSGIFKYFFRFSDDVVEILTTLTTYNGSLPQGGCTSSYLANLVFFNTEYKLVSSFRGKAIRYTRLLDDITISSKNKIDSKSTTKIIQKVSAMLRKNELSLKSNKTKISDRSEIHKEFEVTGLWVQPVNPQMRKKDVRHVRQLVFECEKLASKSKTSEDFHILWNKTSGLVAKLSRLNHSQAISHRERLSNMLPEYDQEAQDKLVRSTNAALKVPVSSHSKWGVLKKYNLIIYNLGILARTNKILSKKLRVSLKKHYSSVTTISEYWG

SEQ ID NO: 3611 - protein, 395 aa, Aliivibrio wodanis
  source 1..395: note = Related to LR721750.1
MDKPLYPCKPIGSIDVLAKTLGVHPTKLIDIASQVNNSYTSYQLPAHPVTGKERTVLEPKYELKKIQKRINSRIFEQVQFPSYLQGGLKASHSIKRDYVQNATIHSHSQTLINLDVKNFYPNIKTEAVSNIFKYFFNFSDDVVSILIKLTTYHGSIPQGGCTSSYLANLVLFNSEYKLVSSLRGKNVRYSRLLDDITISSKTKLDPKFIEKTIKDVAALLKKQKLSLRSQKTKITDRAEIHKEFEVTGLWVRPSQPQVRKKDRRYIRQLVFNCEQKSKTDKTSDEFHKLWNQTSGQVTILERLKHSQASDYRQRLAKIYPEYDQYQENKLIRKIKAALKVPISEHHQLGTIKRYNGLIYQLGILSRTKKTLSKNFRRTLKAHYSTVPTLNNFWNK

SEQ ID NO: 3612 - protein, 397 aa, Photobacterium iliopiscarium
  source 1..397: note = Related to PYLU01000035.1
MDKPQYPCKSIASVEVLAKTLGVHLKLLNNIASKVEESYSSYVLPAHKVSGKIRTVFEPKHELKKIQKRINSRIFERVIFPEYLIGGIKATPTIPRDYVQNARIHSKSKTLINLDVRNFYPTIKAQEVKKIYKYFFKFSDEVVELLTLLTTYKGAVPQGGCTSSYLANLIFFNSEYQIVSSLRGQNIRYSRLLDDITISSTSEISSKKITVIIKSVSAMLKKHNLSLKGKKTKISDRDECHKDFEVTGLWVKEAEPKLRKEEVRRIRQLVYHCQLESINGMDSDEYHKIWNNVSGLVTKLTRLKHSQGKKYRDILTLILPIYNDYEINKLKKKINFALKIPKEDHYRIGVIKKYNQLNYKLGILGRTHKGMAKDARKRLKCHYSTIPKMDNYWEMDS

SEQ ID NO: 3613 - protein, 395 aa, Plesiomonas shigelloides
  source 1..395: note = Related to WEJX01000068.1
MDKPYYGCASIGSVDVLAKTLGVNVKILESIVSKVDDSYTSYDLAPHPVTGKVRTVVEPKHDLKKLQKRINSRIFCGVKFPSYLQGGIASTEDVDRSYIKNAEIHCSSRTLINLDIKNFYTNIKYDVVFDIYKNFFRFSIPVCDVLTKLTTYKKQVPQGACTSSYLANLVFYNNEYLLVSFLRGKGFSYSRLLDDITISAKSECSEILTSDIIKRVASMLRKKDLKINNKKTKITDKREEHKEYKVTGLWVKHATPKLRKDERRYIRMLVYVCECKAQESRSTDEYHAFWNKTSGLVAKLKQLSHSQADSYRKRLSSILPICSEEKVYSINRRVKNALKIPVADHGSVSVIRRYNKLMYQLGILSRTEPELAKSLRKKMLHHYPSIKTINEYWHG

SEQ ID NO: 3614 - protein, 395 aa, Vibrio splendidus
  source 1..395: note = Related to LIZL01000063.1
MDKPLYPCEPIGSLDVLAKTLGMHPAHIQSIASKVDESYTTFLLPPHPKTNKIREVRDAKFELKRIQKRINSRIFSHIRFPNYLQGGLKATXEQSRDYVENAGIHSRCLTLINLDVRNFYPNIKTKSVEQVFKHFFNFNDEVIEPLVKLTTFKGSVPQGGCTSSYLANLVFFNNEYHLVSKLRGQGIKYSRLLDDITISSEKKLSDDKCTELIKLVASMLKKHDLRLNNGKTSISFRNDINAKFEVTGLWIKHKTPRIRKNERRFIRQLVYNCELKARIDKTTTEYHELWNKTSGLVAKLERLNHCQSKDYRKRLANLLPEYSQSNAAQVLRAVSLALKVPKSEHQKLGRIKRINQLKHQLGILSRTHKSDAKKARQALNKHYSSSISKQKFWER

SEQ ID NO: 3615 - protein, 395 aa, Shewanella sp.
  source 1..395: note = Related to BPET01000001.1
MDKPYYPCDSIGSVEVLAKTLGLHPLHLQNIADKAEESYTTFLLSPNPKTGKEREVREAKFELKRIQKRINSRIFEHVIFPAYLQGGLKATEDQGRDYVENASIHSRCRTLINLDVRNFYPNIKARSVKDVFKQFFRFSDEVVDLLVKLTTFQGAIPQGGCTSSYLANLVFFNNEYHLVSKLRGQGFAYSRLLDDITISSDKELSQAKASEVIRMVAAMLTKQKLRLNGDKTSISYRNELSAKFEVTGLWIKHKQPKVRKQERRYIRQLVYNCELKSKQDKTTDSYHTLWNKTSGLVTKLERLNHSQAGSYRKRLAVILPEYSPMQTDQLLKKVSAAMKVPASEHRKLGVIKRYNQIKYQLGILSRTQKGVARKARKALVAHYSSASTKLEVWES

SEQ ID NO: 3616 - protein, 395 aa, Vibrio cholerae
  source 1..395: note = Related to NZ_JSTD01000043.1
MDKPLYTCKPIASIGLLAKTLGVHPDHLVDVANKIDTSYTSFELAPHPKTGKVRTVLEAKKNLKRIQKRINSRIFSNVKFPAYLQGGLKSDESTQRDYIENARLHSHCRTLIQLDVRNFYPNIKPIYVEPVFKQLFRFNDEVSQILTQLTTYKNSVPQGGCTSSYIANLLFFNSEYHLVSKLRGQGLQYSRLLDDITISSQEELSKQKCEEVIKLVAGMLTKYGLKLKGSKTQTEYRSNRNANLEVTGVWVKHRAPKVRKEERRYVRQLVYVCEQKAKVSKTTQEYHEHWNRTSGLVAKLERLEHGQAKKYRERLRAILPIYSESTANQVLKSVNTALKVPKTSHKELGRVNRLNKIYYQLSILSRTKRYEAKKARRQLKQYYSSSPTKQEIWEI

SEQ ID NO: 3617 - protein, 388 aa, Arsenophonus sp.
  source 1..388: note = Related to NZ_CP084222.1
MDKPYYPFNAIASIEALARTLGIHPKLLCSIADKVESSYSTYDLANKNRTVFEPKYELKKIQKRINSRIFEKVEYPLYLQGGIKSEVKRDYVENAKIHSHAETLISLDIKKFYTNIKADKVFSVFKYFFKFPDDVSTILTTLTTYRGRVPQGGCTSSYLANLVFFNSEYSLVSAFRGKDVKYSRLLDDVTLSSEKNLDSIKCTNLIKNVVAMFRSYELRLNTKKTKIEYRGKANKGFEVTGLWVEHKKPKVRRKEQRYIRQLVYNCELQYNDRKTNSEYHELWNKTSGKVAKLVRLDHSQAKNLRERLRLVLPQYDNNTAYKLKKLTNKSLQVPKEHHQKIGRIRDYNRLIFKLGILKRSHPALAKVLIKKMKSHYLNVPTNKEYWLE

SEQ ID NO: 3618 - protein, 388 aa, Vibrio diabolicus
  source 1..388: note = Related to CP063377.1
MDKPYYPHDAIASVEKLALTLGIHPNRLLSIADRADESYTEYELVDKDRTVFEPKYELKKIQKRINSRIFELVEFPLYLQGGIRANVKRDYVENAKIHANATTLISLDIKKFYTNIKADKVSAIYKYFFKFPDEVVDILTKLTTYKGKVPQGGCTSSYLANLVFFNSEYRLVSAFRGKGISYSRLLDDVTLSSASNLDSSGCTEAIRKVVGMFTAHDLKLNSKKTKIEYRGKAAKGFEVTGLWVEHKKPKLRRKERRYVRQLVYNCELKYESDKTTPEYHELWNKTSGKVAKLTRLEHSQAKALRKRLRNVLPEYDDYTANKLKHLAYRALQVPKEHHQKIGRVNDFNRLIFKLGVLRRSHPSLAKVLIKKLKVHYKNVPTKKEYWLE

SEQ ID NO: 3619 - protein, 395 aa, Psychromonas ossibalaenae
  source 1..395: note = Related to NZ_KB907054.1
MDKPHYPFEPIGSIDKLARTLGVSPAVMEAISNRIDESYSEYELPPHPKTGKVRTVFEAKHELKRIQKRINSRIFELIEYPTYLQGGIKATPKRDYVENANMHVGANSLISLDIKNFYPNIKASQVFNIFKQLFNFPDALAKILTKLTTYKGTVPQGGCTSTYLANLVFFNSEYHLVSAFRGQGIVYSRLLDDVVLSSPKVLSNSECTDAIQKVAGMFKKYEFRLNSSKTKVEFRGNSNSEFNVTGLWIEHSKPKIRKKERRYIRQLVFNCELKYIQSKHSDDYHIFWNKTSGLVAKLERLKHPQAKKYRDRLKQVLPIYDDVNIRKIIKLTNKALKVPKEEHSRYGRIQNCNRILYRLGILGRSEAKLAKNLRRKLKSHYSTIPTKKEYWFGTA

SEQ ID NO: 3620 - protein, 392 aa, Colwellia sp.
  source 1..392: note = Related to JAHKPW010000044.1
MDKPYYPYQAIGSIELLARTLGISSKRLISIASRVDNSYAEFELHPHPKTNKIRTVFDPKYELKKLQKRINSRIFEKVQYPKYLQGGIKAPDSRDYVENAKIHSKSNTLISLDIKNFYPNIKEKYVYDIFKQFLNFPDEVSKILTTLTTYKGFVPQGAVTSSYIANLIFFNSEYSIVSALRTKGVIYSRLLDDVSISSEKRLNETEITKNIKFVVSMFTKYDLKLNTKKTKKEYKNKKNPYEVTGLWVGHAKPKARKLERRYIRQLVYNCELKYPSMKDSSDYHELWNKSSGLVAKLERLGHSQAKRLRARMSSVLPCYDDIEIIKTKKLIRKALKVPREYHQKHGHIKIFNKLIYRCGILSRTHKKLSKHLRQQLQAHYQNVPTIREYWHG

SEQ ID NO: 3621 - protein, 396 aa, Haliea sp.
  source 1..396: note = Related to NYUN01000050.1
MDKPEYPHKAIGSVDALAQSLGTNPSALKNLVSKVDNSYTPILISTNNGTKERQVYEPKYYLKKIQKRINREIFEKVKFPTYLQGSIRDVKNTRDFVKNAGVHSGANDLISLDITGFYDHIKEEYVSDIFTKLFSFPPDVSEILTKLVTYKGIVPQGACTSSYVANLVFFNSEYRVYSRLKNRHNVKYTRLLDDVTLSSERRLTDKELTICIDEVKSLFRKYDLKSNDSKKKVQTRKFHGHLDFQVTGLWVGHKTPRLRKKERRYIRQLVYSCEREYERDSTKTEYHELWNRTSGKVAKMARLNHSQSRALRERLKKVLPTYNQDQAETLIYNIKRFVDKVKKNKIKSDPAKTKNFNTLVYQVNILTRTNKSLANSLRLQLMSIRKSVNLKSALWD

SEQ ID NO: 3622 - protein, 388 aa, Pseudoalteromonas sp.
  source 1..388: note = Related to NZ_CP047240.1
MDKPYYPHKPIGSVAILANTLGITELKLRAIASDSDNSYTEFLISDGKRTVCEPKFELKKLQKRINRRIFEKVQYPEYLQGGIKSTSKRDYVQNALIHSKATTLISLDIRRFFDNVKESYVYDVYKYLFKFPDEVAELLARVTTYRGTLPQGACTSTYLANLIFFNSEYRVVSILRGRGISYSRLLDDVTLSSGENLKKEEVTNSIKEVIDLFKKYDLRQNNKKLKVEYRDTPNGDFCVTGLWVEHSTPKLKKKERKYIRQLVYETEKLYRTDRTSEKYHELWGKASGKVAKLNRLGHKQSDSLRQRLSNILPEFDKYTTKKIVTIHYRLLSIPKIKHKRIDVAKQYNKQLHKLGILSRTNKTLAKKLRMALKQHFNQVTTIERYWHD

SEQ ID NO: 3623 - protein, 392 aa, Citrobacter braakii
  source 1..392: note = Related to CP077405.1
MDKPYYPFRPISSIAILAKTLGIHEKMLLNLANKVDDSYTEFLINVKGKDRTVYEPKHDLKKLQKRINHRIFEKVQYPVYLQGGIKDPSNKRDYVENAKIHCERDPNIIISIDIKSFYDNIKSDYVFNVYKNFFIFPDEVSEILTKLTTFKNKVPQGACTSSYLANLIFFNTEYSLVSKFRSTGICYTRLLDDVTLSSNKFLSEEKISSSIKDVVAMFRKYKLKHNNKKTKVECQKNAKNSFKITGLWVGHSKPKTTRHDRRYIRLLVKICENKFKDDKYSLEYHTFWNKTSGLVAKLSRLEQSNHVSLRERMSMILPLYDDKEKDKIIRECKAILKFNNKVAFTIGQVETINKVIGKLGILARNNKSLSKIWRSRIRKHCQSLPSKRSMWL

SEQ ID NO: 3624 - protein, 392 aa, Enterobacter hormaechei
  source 1..392: note = Related to JAHEVB010000007.1
MDKPYYPFRPISSTSILAKTLGIHEKMLLNLANKVDDSYTEFLINVKGKDRTVYEPKHDLKRLQKRINHRIFEKVQYPSYLQGGIKDNSNKRDYVENAKIHCDNNPNLIISLDIKSFYDSIKSDYILNVYKNFFHFPDEVSLILTKLTTYRNKVPQGACTSSYLANLVFFNSEYSLVSKFRSKGICYTRLLDDVTLSTNKKISEEYISASIRDVVAMFRKYNLKHNNKKTKVEFQKSAKDSFKITGLWVGHATPKTTRHDRRYIRLLVKICENKFKDSKYDLEYHAFWNKTSGMVAKLARLDQSNHVKLRERMSQILPHYDVREKEKIIRECKMVLKFNNKISFTIGQIDAINKLIGKLGILSRNNKALSRVWRNRIHKHCKSKPSKRSMWL

SEQ ID NO: 3625 - protein, 392 aa, Klebsiella aerogenes
  source 1..392: note = Related to NZ_CP055904.1
MDKPYYPFRPISSIPTLAKTLGIHEVLLVNLSNKIDDSYTEFLINVKGKDRTVYEPKHELKRLQKRINHRIFEKVQYPGYLQGGIKDNNNKRDYVENANIHCEHKPNIIISIDIRSFYDNIKSNFVFLIYKNFFHFPDEVANILTKLTTFRNKVPQGACTSSYLANLIFFNSEYSLVSSFRNNSITYTRLLDDVTLSSSKALSESQITASIKEVIGMFNKYNLKHNNKKTKVETQKNSKDSFKITGLWVGHSKPKATRKERRYIRLLVKICENKANTDIYSEEYHAFWNKTSGLVAKLTRLDQSNHKDLRERLNAILPLYDDKSKNKVIRECKIILRYNNKVSLSIGQVDTVNKLIGKLGILSRNNRALSKIWRTKIRKHFKCMPTKKEIWQ

SEQ ID NO: 3626 - protein, 413 aa, Lelliottia jeotgali
  source 1..413: note = Related to CP018628.1
MVDFDANYLLTSFTPLKHWCAMDKPYYPHNPISSVAILAKTLGIRKDLLVNLVNKVDSSYTEFLITVKNKDRTVYEPKFELKKLQKRINSRIFEKVQYPTYLQGGIKDDSNKRDYVENAALHCKNKPETIISIDIKSFYDNIRSSYINDIYKNFFNFPDEVADTLTKLTTYRNKVPQGACTSSYLANLIFYNSEYTLVSKFRNKNITYTRLLDDVTLTSRDNISEEKISEHIKSVVGMFRKYNLKHNNKKTKVETQKNAKNSFKITGLWVGHAKPKITRHDRRYIRLLVKICENKFKDDKYSEEYHAFWNRTSGMVAKLTRLDQSNHIELRKRMATILPLYDDNEKDKIIRECRRVLRFNNKIDLSIGQLDIINKLIGKLGILARNNNALSKIWRNKIKNHFPLLPTKREIWE

SEQ ID NO: 3627 - protein, 395 aa, Pantoea agglomerans
  source 1..395: note = Related to JACYNC010000004.1
MLMDKPYYPHKAISSVNVLAKTLGIRESLLIELSIKSDTSYHEFTVCTKKGKDRTVYEPKPLLKRLQKKINSRIFEKVKYPIYLQGGIKDEISKRDYVENARLHSKSKPSHLIGLDIKSFYDNIKTPKVHDIYKYFFKFPDPVCDVLTKLTTHKGKLPQGACTSSYLANLVFFNSEYSLVSYFRKMGVTYTRLLDDVTLSSPVQLSEHQVGEAIKKVVGLFKKYNLKHNNKKTSIENNKNIKNGFQVTGLWVGHSEPKTTRDERRYIRILVKTCEQKHKSDPYSQEFHELWNKSSGLVAKLKRLGQPSHDSLRARLSVVLPLYDQKMASKLIMECKSLLTIKNKIQYSAGEVSNINKTLYKLGILSRNNPISSSIWRKRIRANFKNLPSKKELWE

SEQ ID NO: 3628 - protein, 393 aa, Mixta calida
  source 1..393: note = Related to CP026378.1
MDKPYYPYKAISSIETLAKTLGIRVNLLSLLVEKSDSSYHEFIVCTKKGKDRTVYEPKPLLKRLQKKINSRIFEKVKYPVYLQGGIKDEINKRDYVENALLHSKNKPKQLIGLDIKSFYDNIKSDKVFDIYKYFFKFPDPVSDALTKLTTFKGKLPQGACTSSYLANLVFFNSEYNLVSYFRNMNITYTRLLDDVTLSSPVKLSEKQIGESIKKVVAMFRKYNLKHNNKKTSIECNRNLKNGFQVTGLWVGHATPKTTRDERRYVRLLVKTCEQKYKNNPYTEEYHELWNKTSGLVAKLKRLNQPSHDTLRNRLSLVLPLYDAVMVSKLMMECKSLLRVKNKIEYSVSEVNHINKTLYKLGILSRNNPGRASIWRKKIIANFKNLPTKRELWE

SEQ ID NO: 3629 - protein, 392 aa, Yersinia aleksiciae
  source 1..392: note = Related to CGBL01000001.1
MDKPNYPHKPISEVSVLAKTLGISEVMLKSIASKVDTSYTEFDIESNGKDRHVYEPKFNLKKLQKRINSRIFEHVNFPSYLHGGIRDVNIRRDYVENARLHSKTKVNSLINLDIRSFYDNIKIDKVYKIYKYFFKFTDPVCEILTTLTTYKNKVPQGACTSSYLANLVFYNSEYQVVSALRCKGITYTRLLDDVTLSSKKTLSETTISNSIKSVIGMFTKHGLKQNKKKMKIESIQNKKDGFQVTGLWVGHAEPKTRRDERRYIRLMVYVCEKEYPNSMSTESYHELWNKTSGLVAKLNRLNQSNYKSLRERLGAVLPLYNDSERDKIIRECKSLLKLDSSKPVSYGQLDSINKIYSRLGILARNNTNLSRSWRKKLRSHFRKLPTKKEIWL

SEQ ID NO: 3630 - protein, 392 aa, Rahnella sp.
  source 1..392: note = Related to NZ_MJIB01000008.1
MDKPYYPHKPISSVEVLAKTLGVSEPALRSIANKAGNSYTEFLIESKGKDRTVYDPKFELKKIQKRINSRLFENVIFPSYLQGGIHDKENRRDYVENAKIHSTEKIKSLINLDIKSFYDNIKKAKVNDIFKYFFKFPDPVCDILTSLTTYKNKVPQGACTSSYLANLVFFNSEYLEVSKLRGKGVTYTRLLDDVTLSSSKQLNDEEIEIYIKSIHGMFKKHGLKFNNKKTKIEHIKSKKEGFRITGLWVGHQLPKTTRNERRYIRLLVRICENEYSKSMYSEGYHELWNKTSGLVAKLNRLNQSNHESLRTRLGLILPLYDDAERDKILRECRNLLKIKATIELKYGHVDSINKAYGKLGILSRNNKLVSRMWRKKLKSHFRKLPTKRDIWL

SEQ ID NO: 3631 - protein, 390 aa, Serratia marcescens
  source 1..390: note = Related to JAFJAP010000008.1
MDKPYYPHQPISTIESLARCLGVTTITLNSISSAIDSSYTEFVISSKNKERTVYEPKFELKRIQKRINNRIFEKVEFPRYLHGGIKSLEHKRDYVENAKMHSNTSVETIIGLDVKNFYDNIKKERVYIIYSQFFNFPHEVSELLTQLTTYKNKVPQGACTSSYLANLIFFNSEYGLVSKLRGKKITYTRLLDDVTISAAKKISDEEITKVIRDVSALFTKHGLKLNSGKTRVHHDKYAADSFEVTGLWVGNIAPKTRRQERRYIRSLVHACENEYLVDKYSSDYHALWNKTSGLVAKLYRLEQSNHKALRERLGKILPLFDDVAKRKIIIDCKSMLKIAPCSLNYGKLKRLNLIYSKLGILSRNYKCEAKLWRKKLKAHFVKHPKKSEVW

SEQ ID NO: 3632 - protein, 390 aa, Serratia marcescens
  source 1..390: note = Related to KI929259.1
MDKPNYPHCPIASIDALARCLGVASTKLLSISRDIDNSYSEFIIESKGKDRTVYEPKFELKRVQKRINQRIFEKVKYPIYLHGGIRDPDNKRDYVENARIHSANSCKTIIGLDVRNFYDNIRADKVTPIFKLLFKFPNDVSELLTKLTTYRGKVPQGACTSSYIANLVFFNSEYTVVSRLRSLGISYTRLLDDVTLSSPKELSPERISECIRSVVALFKKHGLEHNKKKTRIENKNNNAQSFIVTGLWVGHKTPKVTRHERRYIRTMVHACERLYLDDNSTDAYHNIWNKTSGLVAKLNRLEQSNHKGLRERLNKVLPVYDEAARRKIILDCKSLLKLNATSLTYGQLTRLNLVYSKLGILSRSFLFESRLWRRRLNAHFKNKPKKSEVW

SEQ ID NO: 3633 - protein, 392 aa, Brenneria sp.
  source 1..392: note = Related to QDKH01000022.1
MDKPYYPHNPISDVSTLAKTLGINEVMLNVIVSNVDTSYTKFDIPSKNKTRTVYEPKLNLKKIQKRINSRIFEAIQFPIYLQGGIKDSVDKRDYVENARTHSVNSPSTLINLDIKSFYDNIKYDKVFDIFKYFFKFPDDVSKVLTDLTTFKNKVPQGACTSSYLANLVFFNTEYSIVSSLRGKEIYYTRLLDDVTMSACCVLPEEIISESIKKVVGMFKQYGFKSNNKKKKIEYNKNMKGGFQVTGLWIGHTNPKTTKKERRFIRLLVHTCFKKYNESMTNESYHELWNKASGLVAKLKRLDQSNHKALREKLASILPLYDDSERKKIVHECNRLLKIPSSKTLTYGEIDRINRVFYKLGILSRSEKNLSRMWRRKLKQHFKNIPKKRASWL

SEQ ID NO: 3634 - protein, 391 aa, Pectobacterium polaris
  source 1..391: note = Related to NZ_WUBF01000012.1
MDKPYYPHSPISDLPTLAKTLGVNLVMLNVIVNKVDDSYTEFQIPSKNRFRTVYEPKLNLKRIQKRINSRIFEFIQFPFYLQGGVKDSIDKRDYVENAKMHSSNNPETLISLDIKSFYDNIKSDKVFDIFKYFFKFPDDVSNTLTKLTTFKNKVPQGACTSSYLANLVFFNSEYTIVSNLRGKGICYSRLLDDVTMSANYSLSEEVVSESIKKVVGMFKQYGLKSNNKKKRIENNKNLKGGFQVTGLWVGHKNPKTTKLERRFIRLLVHTCFKKYNESMTSDSYHELWNKTSGLVAKLKRLDQSNHKALREKLARILPLYDENEKKKIIQECNRVLRIAPSKTLTYGEIDRINKLFYKLGVLSRNEKQLSRMWRKKLKFHFKNIPRKREVW

SEQ ID NO: 3635 - protein, 398 aa, Aeromonas salmonicida
  source 1..398: note = Related to CP022426.1
MTRLQVFMDKPYYPYSPIASIDSLSLTLGVVPKVLLDIAKNSSNSYTEFIVPSKNKDRLVYEPKYELKKIQKRINARLFEKVQYPLYLQGGIKDNLVKRDYVENAKLHVKSKHLINLDIKAFYDNIKPHHVFSVYKYLFKFPDDVCDVLTQLTTYKNRVPQGACTSSYIANLIFFNDEYTLVSSFRQQGISYSRLLDDVTLSSNKELSSEDVTNAIKKVAALFKKYDLRLKNSKTKIEVKSNKEAEYKVTGLWIGNGEPKVRKDERRYIRQLVYICGLKYAKSSSCQEYHEFWNKISGMVAKLTRLNHPEAAKLRVKLSNILPTFSVEVKRKVIHDIKKLMRKPATQGSYTLGEIARVNNSMYLLGILGRTDFNLARNLRRDLKRKYKNLPTYNQIWS

SEQ ID NO: 3636 - protein, 391 aa, Aeromonas media
  source 1..391: note = Related to NZ_UETL01000014.1
MDKPYYPHSSIASIDSLSSTLGVVPQRLLDIAKNSCNSYTEFVVPSKNKDRLVYEPKYELKIIQKRINARIFEKVEYPEYLQGGIKDLAKKRDYVENSKIHVNSKHLINLDIKSFYDNIKPLHVHNVYKNLFKFSDEVCDVLTLLTVYKNRVPQGACTSSYIANLIFFNSEYTLVSSFRQQSIIYSRLLDDVTLSSNKELPQDTVTKAIKSVAAVFKKYDLRLKNSKTKVEVKSDKKSEYKVTGLWIGNGEPRARKSERRYIRQLVYICGLKHHTSSSSQEYHDFWNKVSGMVAKLTRLNHPESASLRLKMSDILPTFSKEMKAKIILDIKKLLRKPSAQCSYTQGEIARVNKAFYLLGILGRTDKILAKNLRCDLKRKYKNLPTYNEVWR

SEQ ID NO: 3637 - protein, 391 aa, Aeromonas jandaei
  source 1..391: note = Related to AP024466.1
MDKPYYPYSPIASIDALSLTLGVIPEALVDIARKSSSSYTEFVVPSKNKDRLVYEPKHDLKRIQKRINTRIFEKVEYPRYLQGGIKDALIKRDYVENASLHTTSKHLINLDIKSFYDNIKACHVFAVYKYFFKFPDDVCEILTLLTTYKNKVPQGACTSSYIANLIFFNSEYSLVSSFRQRGVTYTRLLDDVTLSSNKELAEEEITKAIKDVSALFKKYDLRLKNNKTKIELKANKDADYKVTGLWIGNGAPRVRKHERRYIRQLVYVCSLKYKESSSSKEYHDLWNKVSGMVAKLTRLKHSDASGLRSKLTEMLPTFGDDVKRKIIHDIKKLMRKPDPQCSYTHGEIARVNKAIYLLGILSRTDRNLANNLRRDLKRKYKNLPTYNDIWS

SEQ ID NO: 3638 - protein, 391 aa, Marinobacter nauticus
  source 1..391: note = Related to RBJB01000003.1
MDKPYYPHKPIGSLDALAKTLGVHPKLLLDFAEKANSSYTSFNIVSKSGKIRTVYEPKYELKKIQKRINDRIFEAVRFPLYLQGGISDDQSKRDYVENAKIHANSQCLIVLDIKNFYGNIKSDYVFDVFKYLFKFPDEVSMLLTKLVCLRGRVPQGACTSSYVANLVFHNSEYHVVSYFRQRGVVYSRLLDDVTLSTNDRPSAESTQEYIERVIALFKKYDLKPRSDKIKVYIKGSHAYTYDVTGLWVGHAKPKLRKSERRYIRQLVFECEKKYQASSCDPSYHKFWNYVSGQVAKMTRLGHHQSKELRRRLGLILPTIDALEEQKIAADVQKIAKLRRNHTYKSGDISRINKLYYKLGLLSRTNKGRSKALRSMLKSAHPNVPNKREYWL

SEQ ID NO: 3639 - protein, 391 aa, Marinobacter changyiensis
  source 1..391: note = Related to NZ_VZZZ01000001.1
MDKPYYPHLPISTNETLAKTLGVHPKLLQDFCARSNSSYTSFSVTSKSGKQRIVFEPKYELKKLQKRINHRIFEKVRFPIYLQGGIKDYEKKRDYVENAKIHANSKTLISLDIKNFYDNIGEAYVYRVFKYFFNFPDEVSKTLTALVTLNGRVPQGACTSSYIANLIFFNSEYRIVANLRGQGVKYTRLLDDITLSIESEISEEHTSQLIKDVIALFKKHDLKVQNKKTKISVKHSHAQPYDVTGLWIGHSKPKLRKSERRYIRQLVFECEKKHSQGSAEIDYHKFWNHVSGQVAKMHRLGHSQSADLRSRLAMILPTLDDLSERKLEIDLNKLINSKKQTSLKYGDITRINKVFYTLGILSRTKRNKSRKLRRKLKNAYPKIPTKVEYWL

SEQ ID NO: 3640 - protein, 391 aa, Pokkaliibacter plantistimulans
  source 1..391: note = Related to NZ_LAPT01000169.1
MDKPYYPFKPIGSLDALATTLGVHPKLLTDFSNKANDSYVKFEIVSKSNKRRTVYEPKFELKRLQKRINSRIFEKVEYPVYLHGGISDEINKRDYVENAKLHAKSNTLICLDIKDFYGSILLDHVFDVFKNFFHFPPDVSSLLTKLVTLNGNVPQGACTSSYLANLVFFNSEYNLVSRFRGRGVTYSRLLDDVTLSSNDKLSDTLVQKYIEEVSKLFAKYSLHIKNKKTRVHIKSDHSKPYDVTGLWVGHSSPRLRKSDRRNIRHEVFLCEKEFEFDSTSEKYHKQWNRVSGLVAKMQRLQHSQAKILRQRLSKVLPTYSDADAAAVIRDANKILNAKKKENMKIGELNRINRVLYSLGILGRTNSGKAKSLGKNIRAKYNNLPGKRAFWV

SEQ ID NO: 3641 - protein, 393 aa, Pseudomonas sp.
  source 1..393: note = Related to CP033104.1
MAKDKPYYPHGPIGSLAILAKTLGVPPKLLSDLAKKASSSYTPFVIETKGGKQRDVYEPKYELKRLQKRINSRLFEKIEYPTYLQGGVKDEAQPRDYIENSKIHAGSKFLISLDIRNFYDNIHIDSVLSIFKHLFKFPEDVSTLLTSLVTREGKVPQGACTSSYIANLIFHNSEYSYVKKLRDNGFYYSRLLDDVTISADRLVPQEEVTKTIKYVAGLFSEHGLRLRGSKTKIERADDLKSAYAVTGVWVGHGIPKIRRTERDMIRHSVYICEQEYAKNCFSDEYHALWNKVSGQVAKLTRLNHAQAPKLRHRMRSILPLYDSKATASIWRETDKMLKRPKKSHTKIGVINAYRRLIYQLGILARTDKGLSRALRRQLQSRFSGVPSKALMWE

SEQ ID NO: 3642 - protein, 393 aa, Pseudomonas monteilii
  source 1..393: note = Related to JAEHTA010000001.1
MAKDKPYYPHQPIGSLATLAKTLGLPPKLLSDLSRKADVSYTPFNIITKGGKSRDVFEPKYELKRLQKRINSRLFECVEYPFYLQGGIKDDAKPRDYIENSRIHSGSQFLISLDIRDFYGNIQLESVRSVFKHLFKFPDDVSETLVKLVTREGRVPQGACTSSYVANLIFHNSEYSYVKKLRDKGFSYSRLLDDVTISCNRLIPQEEATEIIKYVSGLFREHGLRLRTNKTKLERSDDLKASYSVTGVWVGHGVPKIRRAERDMIRHSVYICERECVKDRYSDAYHDLWNKVSGQVAKLTRLNHVQAPALRDRMRDILPLYDSKAVASVRREVDKMLKRPVAHHSKVPVIDAYRQLVNKLGILGRTNKTLAKALRRQLKARFAGVPTKAMMWE

SEQ ID NO: 3643 - protein, 348 aa, Pseudomonas xanthosomae
  source 1..348: note = Related to NZ_CP077075.1
METKGGKIRNVYEPKYELKRLQKRINSRLFEAVEYPKYLQGGIKDEENPRDYIENSRIHAGSRFLISLDIRDFYDNIPFASVVSVFKYFFKFPDDVSEVLAKLVTREGRVPQGACTSSYIANLIFHNSEFSYVKRLRDKGFSYSRLLDDVTISSDRLVAQEEATASIRYIAGLFREHGLRLRQSKTKMERSDDLKAPYAVTGVWVGHGVPKIRRAERDTIRHSVHICECEYEKDRFSDEYHALWNKVSGQVAKLTRLEHAQAPKLRKRMRKILPLYDSKAIASILRETDKMLRRPKSHHSKIGVIDAYRRLINKLGILSRTDRTLSRAMRKQLKAKFSDVPSKAMMWE

SEQ ID NO: 3644 - protein, 392 aa, Pseudomonas viridiflava
  source 1..392: note = Related to NZ_UWAB01000407.1
MAKDKPYYPHASIGSLAMLAKTLGVHPKVLTDLASKASNSYTHFLVSTKGKDRDVYEPKFELKKLQKRINSRLFEKVQFPNYLQGGIKDESNPRDYIENSRIHAGSKFLISLDIRNFYDSIPLESVISVFKHFFKFPDDVSDVLARIVTRDGRVPQGGCTSSYVANLIFHNSEYSYVKKLRDEGFSYSRLLDDVTISSPRLISQDEATQRIRYLTGLFKEHGLRLRQSKTKLERSDDLNAAYKVTGVWVGHGIPKLRRSERDMIRHSVYICEKEYAKNPFSDEYHVMWNRVSGQVAKLTRLDHSQAPKLRDRMGEILPLYDSKAVASIWREADRMLRRPLSSHKRIAVIQSYRRLVNKLGIMTRTNRPLAKNLRRQLKARFSGVPSKVMMWE

SEQ ID NO: 3645 - protein, 393 aa, Pseudomonas syringae
  source 1..393: note = Related to AE016853.1
MAKDKPYYPHASIGSVAMLAKTLGVHPKLLNDLAGRATDSYTHFVIRTKGDKERNVYEPKYELKKLQKRINSRLFEKVHYPFYLQGGVRDEDHPRDYIENSRIHAGSKSLISLDIRNFYDNIPYESVVSIFKYFFNFPDEVSDLLSKIVTRDGKVPQGACTSSYVANLIFHNSEYNFVSRLRNQGVTYSRLLDDVTLSSSRLLSQDEVSGYIKYVAGLFSEHKLRIKKSKTKIERSDDLSAEYTVTGVWVGHGVPKIRRAERDLIRHSVYICEREYQKDRFRDEYHELWNKVSGQVAKLTRLEHSQALKLRARMRDILPLYDGKATAAIIREADLLLKRPRTSHVKVSVVNAYRRLINRLGILTRTNKTLARGLRRQLKTKFSDVPSKVLMWE

SEQ ID NO: 3646 - protein, 393 aa, Pseudomonas aeruginosa
  source 1..393: note = Related to CP054472.1
MAKDKPYYPNAPIASIEVLAKCLGVSPRVMLDLAGKVGSSYTEFLVSSKSKDRTVYEPKFELKKLQKRINSRIFSAVQFPTYLQGGIKDAKSPRDYVRNGEFHAGSCMLVSLDIRNFYDNIKRERVEDVFKNFFRFPPDVCQVLTDLVTLKGKVPQGACTSSYIANLVFHNSEYSIVSYLRSKGITYTRLLDDVTLSSKKPLSDESLSDVIGRISGMFKKHGLRIHPGKKKIELASDSRSDYKVTGVWVGHGVPKLRRKERDYIRHLVYICECEYKKDPTQDSYHELWSRTSAHVATMTRLEHSQSVELRKRMSKILPLFSEARKKQVIVEAGKLLRRDFSKAMRLGVIKTYNKTMHSLGILSRTDRAKSKRLRKELRLKFSGIQSMQQYWEG

SEQ ID NO: 3647 - protein, 393 aa, Pseudomonas sp.
  source 1..393: note = Related to JAHUVZ010000002.1
MAKDKPYYPNASIASIDILAKCLGVSPKVMLDLASKTESSYTEFLVSSKSKDRTVYEPKFELKKLQKRINARIFAAVQFPGYLQGGIKDSDSPRDYVRNGKCHAGSNMLVSLDIRNFYDNIKRESVEDIFRNFFRFSPEVCSVLTDIVTLKGKVPQGACTSSYIANLVFHNTEYSVVSYLRSRGITYTRLLDDVTLSSKSELSDEVLSEIIFKVSGMFKKHKLRIHPGKKKIEIAKDSRSEYKVTGVWVGHGVPKLRRKERDYIRHLVYICEQEYKKDPSVDSYHELWNRTSAHVATMTRMEHSQAVDLRERMSKILPVFGVDRKTQVIVEANKLLRRDISNNVRIGVIKTYNKTMHSLGILSRTDRAASRYYKRALRRKFSGVKTIQQFWEE

SEQ ID NO: 3648 - protein, 392 aa, Pseudomonas stutzeri
  source 1..392: note = Related to NC_018028.1
MAKDRPYYPNASISSIDVLAKCLGVSPKVMLSLAKNSSNSYTQFTVPSKGKDRVVYEPKLNLKKIQKRINSRIFEHVQFPPYLQGGIKDNLSPRDYVENSKFHAGSSVLVSLDIRNFYDNIKYDSVYDVFLYFFKFEPSVCTVLTDLVTLNGKVPQGACTSSYIANLVFHNHEYSLVSYFRSKGITYSRLLDDVTLSSSKEIPPQEIEEAISKVAEMFKRHKLRIHPKKKKIEVSSDTRSEYKVTGVWVGHGVPKLRRKERDYIRQLVYICELEYKKDPTAEDYHDLWNRASAQVAKMTRLDHSQASALRSRMSKLLPLYSPAKRKQVIIKAKTLLSRNKSDAKELGFIKMYNKTYHSLGILSRTDKPTSRYYKAALERKFSVEPIKQFWEN

SEQ ID NO: 3649 - protein, 393 aa, Pseudomonas taiwanensis
  source 1..393: note = Related to QJRF01000029.1
MAKDKPYYPHSSISSIDTLAKCLGVAPKVMLDLARDTENSYTEFVVPSKGKDRTVYDPKHNLKKIQKRINSRIFEHVLFPEYLQGGIRDVDSPRDHVNNGRAHTGSSVLVSLDIRNFYDNIKYPSVFDVFKNFFKFPDEVSKVLADLVTFRGKVPQGACTSSYVANLVFHNTEYSVVSYLKSRGIQYTRLLDDVALSSNRVISKADLEGAIEKVAGMFKRHKLRIHPRKKKIEYSSDSRSEYKVTGVWVAHGVPKLRRKDRDYIRHLVHICELEFLKDPTADSYHELWNRSSAQVAQMTRLGHSQAASLRSRMSEILPLYGPSRKTQLNIEVKKLLGRKQSESNSLGFIRTYHKLINALGILSRTDRGLARSYRGLLTAKFPHVRSKVKYWEQ

SEQ ID NO: 3650 - protein, 393 aa, Pseudomonas punonensis
  source 1..393: note = Related to NZ_FRBQ01000013.1
MAKDKPFYPHAPISTLDVLAKSLGVSPQVMSKLSSSADDSYTAFSVSSKNKDRTVYDPKYNLKKLQKRINSRIFEHVVFPQYLHGGIRDVSHSRDYINNSRIHAGSRVLVSLDIKNFYDNIKRDSVFDIFKSFFRFPDEVSTLLTNVVTMRGKVPQGGCTSSYVANLIFHNTEYSVVSYLRSFGIEYSRLLDDVTLSSSHPIPPEKLEQAISKVAGMFKRHGLRVHPHKKKIESSSDSRSPYEVTGVWVGHGVPKIRRKDRDYARQLVYICTKEYLKDYTSDAYHALWNKSSAHVARMTRLDHAQARQLRDRLSKILPQYSAARIKQLSFEYKKLINRPVADVATLGFSKSFHKLIHSIGILSRTDAHLARHYRKSLRAKFPRVLSKADHWGI

SEQ ID NO: 3651 - protein, 393 aa, Pseudomonas lactis
  source 1..393: note = Related to QTSW01000011.1
MAKDKPYYPLSPIASINALAKTLGVVPKLLVDIAANVSTSYTSFDIESKKGKLRTVYDPKYELKRLQKRINSRIFEKVIFPLYLQGGIKDQENPRDYVENCKLHAGSSFLISLDIKNFYDNIRMSSVFDIFKYFFKFPDPVCEILTSLVTLDGHVPQGACTSSYIANLVFHNSEYKLVSCFRDQGLNYSRLLDDVTVSSKNLISQEKTTDIIRSVAAVFKKYDLRLNSKKTKVERSDDLGADFKVTGLWVGHGQPKLKKDERRYIRQLVYVCEKDYQNNPCSEKYHELWNRVSGKVAILTRLKHVEAQNLRARLGCVLPLYDEDAKAKICFESKKLLRRHPSTHSKVGVMTAYHKIIHSLGILTRTDRALARSLRKQLRARYSALPLKRDIWE

SEQ ID NO: 3652 - protein, 393 aa, Pseudomonas migulae
  source 1..393: note = Related to NZ_CP043571.1
MAKDKPYYPLSPIASIETLAKALGVVPGLLKDLGEDASNSYTKFDIVTKNGKERTVYDPKYELKRLQKRINSRLFEKVIYPGYLQGGIKDPNNTRDYVENCKLHAGSKFLISLDIKNFYDNIRETSVLSIFKHFFKFPDDVSVLLTKLVTLNGRVPQGACTSSYVANLVFHNSEYSLVSKLKSRGLVYTRLLDDVTISSSTLLTQDVATDLIKDVAAVFRKHNLRLNNSKTKVERSDDLAAEYKVTGLWVSHGQPKLKKEERRYIRQLVYICEQEHQKSPFEESYHDLWNRVSGKVAIVTRLKHVEAADLRGRLSKILPLYDSTKRSQILFEAQKLLRKHPSTHTRMGVINSYHKIIHAIGILTRTDRVLARALRRQLKAKFSDLPLKSQVWE

SEQ ID NO: 3653 - protein, 393 aa, Pseudomonas aeruginosa
  source 1..393: note = Related to CP073082.1
MAMDKPYYPYRPISSIDALARTLGVVPKLLCDLADDPATSYVKFTIFSKNGKQRDVYEPKYELKRLQKRINSRIFELVIFPSYLQGGIKDVEFPRDYIENSKIHAGSGALVSVDIKDFYNSIREPSVLSIFKNFFSFPDDVSCLLTRLVMLEGRVPQGACTSSYVANLIFHNSEYSLVSKFRAKGLAYSRLLDDVTVSATKPISQEESTLAIKSIAAMARKHDLRLNSKKTKIERSDDINADYAVTGVWVGHGVPKLRKDERRHIRHLVYICEKEYAKDCFSVEYHSLWNRVSGQVSKLTRLKHAQAKSLRERMGNILPKYDFQAKAKIIYECSRLLRRPVSSHKKIGVINNYRRLIYSIGILSRTDRSTAKALRRQLVERFAGVPSKAEMWS

SEQ ID NO: 3654 - protein, 393 aa, Pseudomonas sp.
  source 1..393: note = Related to NZ_CP027733.1
MAKDKPYYPHHPIGSVESLAKCLGLPPRLLKDLSEDTSNSYTEFSITSKSGKERIVYDPKFELKRLQKRINSRLFEGVFYPSYLQGGIRDQKNPRDYIVNGTIHAGSKNLIGIDIKDFYNNIKEESVKPIFTRLFNFPDAVASILTKLVTRDGRVPQGACTSSYVANLVFFNSEYSLVSRMRARGFSYTRLLDDVTLSSKRPITKEESTELIKEVAAIFKKHNLRLNNKKTKQESAGDVKAEYKVTGVWVGHGIPKLRKAERRHIRHLVYICEKEYLKCRFSEEYHALWNRISGQVAKLTRLEHSQAEDLRLRMSGILPEYDNQMKASIIFEADKLLKKPVAHHVRPGVISSLNKTLYSLGILTRTDKPLARHYKKMLRLRFINAPTKSEMWG

SEQ ID NO: 3655 - protein, 390 aa, Alcanivorax xenomutans
  source 1..390: note = Related to NZ_OBMO01000006.1
MDKPYYPHNGISSIQSLAKTLGIHPSLLVDIASKTTDSYTEFQITSKNGKIRTVYDPKYELKRIQKNINQKILEKVEYPTYLQGGIRDLENRRSYVDNAGIHAGSNHILSLDIKNFYDNIRPEKVKEIFLYFFKFSDETSELLTKLVTLGNKVPQGACTSSYIANLVFFNSEYRIFSELKSKGISYSRLLDDVTLSSRKHLSRDEASEHIRLVCSIFKKNGLRLNNKKTKNELKGSNPNFKVTGLWVEHKNPKIPKKERHHTRHLVYICEKEYAKSPSSEHYHQLWNKTSGQVAKLKQLGHSQHKQLRTRLKKILPILDESSKKKLILDCKKLLHLERNAKERFGVLKRINKCIYMLGILSRSDKGLSSNLRRQLLKHFGDLPTHKDYWI

SEQ ID NO: 3656 - protein, 396 aa, Crenothrix polyspora
  source 1..396: note = Related to NZ_FUKJ01000432.1
MKLKPHYPHNPIASIEALAITLGIHPKLLQDLANKANDSYINFTVSSTNRKGEDKDRHVCEPKHELKKLQKRINSRIFEKVEYPNYLQGGIKDEENPRDYVANATRHANANQIICIDVKQFYPSIKSQYVVKVFQYFLNFPPDVSEILTKLVTYHGRVPQGGCTSSYIANLIFYDTEYLLVSELQKHGIQYSRLLDDITLSTQKNFTKEQENFYIKKIADIFKKYELKINNKKTRNEHSSNPAVSFEVTGLWIGHKKPKARKEERRFIRQLVFMCEREYTQSPYSEKYHERWNEASGKVAKLQRLEHLQATKLRERLGIILPLYDENMQSQINQETKKLVKLSAPQNQRLGNIKRVNILIHKLGILARNNKSLANSLRSQINEVYANKPTIKEIWE

SEQ ID NO: 3657 - protein, 396 aa, Methylobacter sp.
  source 1..396: note = Related to PERX01000093.1
MKLKPHYPYNPIASIEALATTLGIHPKLLQDLANKVDDSYTNFIVKSKNKKGEQKDRDVCEPKYELKKLQKRINSRIFEKVEYPLYLQGGIRDEESPRDYFANATCHANATQIICIDIKKFYPNIKSKYVTKVFQYFFKFPPDVSELLTKLVTYHDRVPQGGCSSSYIANLIFYDTEYLLVSELQRHSIQYSRLLDDITLSSQQNFTKDQETQYIQKIAKIFKKYELKINSKKTKIEHRANPEVGFEVTGLWIGHKKPKARKEERRFIRQLVFMCEREYKLNPCSEKYHERWNEVSGKVAKLQRLEHLQARKLRERLRLILPLYDENVQNQITQEAKKLIKLPSPQNQRLNNIKRVNQLIYKLGILARNNKTLANSLRLQINKAYANKPTIKEIWE

SEQ ID NO: 3658 - protein, 392 aa, Methylomonas albis
  source 1..392: note = Related to NZ_JACXSS010000001.1
MKLAPHYPNNPIASVEALAITLGIHPKLLLDLSNKIDNSYTSFLTPQKNGKERLVHEPKYELKKLQKRINSRIFEKVEYPEYLQGGIKDENNPRDYVANALRHSHANQIICIDIKQFYPNIKSEYVSKIFQHFFKFPAHIAELLTKIVTLHNRVPQGACTSSYIANLLFYDTEYLLVSELQKHNIQYSRLLDDITLSTQTTLTKEQETFYIKKIAALFKKYELKINGRKTRIEHRANPEASFEVTGLWIGHKKPKSRKEERRFIRQLVFMCEREYKVNRCSEKYHERWNEVSGKVAKLQRLQHVQAKKLRERLSLVLPVYDEPMQKQLIQETKKLVKVTAPQNQRIGNIKRVNSLYYRLGILGRNNKSLANSLRLQLNKVYGNKQTKKEIWE

SEQ ID NO: 3659 - protein, 396 aa, Methylomonas sp.
  source 1..396: note = Related to NZ_CP014360.1
MKLKPHYPHNPIASIEALATTLGIHPKLLQDLANKADDSYTDFLITSKNRKGEVKDRTVCEPKFELKKLQKRINSRIFEKVEYPLYLQGGIRDEESPRDYVANAQIHAHANQIICIDIKQFYPSIKIPHVKNIFKYFFKFPEEVSEMLAKLVTYRGAVPQGGCTSSYIANLIFYDTEYLLVSELRKHSVKYSRLLDDITLSAEKDFTKEQEEFFIRKISAMFTKYGLSMHSGKKRIEHRSNSDVSFEVTGLWIGHKKPKARKEERRFVRQLVFMCEREYKVSPYTKEYHERWNEVSGKVAKLQRLEHQQAKNLRKRLGLILPLYDENMEKQLTHETKKLITLSLPQSKRPGNIKRVNSLINKLGILSRNNKALARSLRLQLSTVYADKPSNKEIWE

SEQ ID NO: 3660 - protein, 302 aa, unidentified
  source 1..302: note = Related to JACYUQ010000012.1; note = Oxalobacteraceae bacterium
MDKPFYPFPGIGSVEALAKALDVHHDLLLDIAKKVDQSYTSFDIPKKNNSGYRTVCEPKHELKRLQKKINSRILELVKYPSYLQGGIKDKSLSRDYVKNAAIHVKPTVLISLDIKNFYPNIHRSHVLNVFKNFLGFHPDVAEVLTCLTTLNDRVPQGGCCSSYLANLIFFGDEFKLVQKLRKLGWRYSRLLDDISISSTDDIKDNISPIKEISSLCKRYGLKLNNSKTDVSHRSNGVASLAVTGVWIGHSEAKLRKDERRYIRQLVYVCEKKYADDPCDSKYHDFWNRVSGKVAKLSRMEHV

SEQ ID NO: 3661 - protein, 398 aa, Thioalkalivibrio sp.
  source 1..398: note = Related to NZ_AQXY01000025.1
MPQKSAKKPHYPYKPIGSVETLARMLGVHPKILTDIANRTDDSYTDFTITTPSGKERNVSEPKFTLKKIQKRINRTILEKVEYPLYLMGGIRDLEEPRDYVSNASAHAGASTIIKLDIKNFYPNIRRQNVYDIFRYLLRFPEPVSDLLTTLCVRHHRLPQGACTSSYLANLIFFNAEYQLAASFERQAIAYTRLLDDITISSPKQLTPAKTTEIIRSVAAMCKKHGLKLNNKKTRVDRVHQRDSDYIVTGLWAKHSVPKVPRHERRAIRKMVHDCENRFTTDPASPEYHSMWNQASGKIAKLKRLGHSQAQPLRARMRKILPQIGDQEKDNLILECKKLANKSRRNTDRIGHILRVNRAIHKVGLLSRTDKRLARSLRRQVVAAYPNKPTIKDYWEIK

SEQ ID NO: 3662 - protein, 343 aa, Escherichia coli
  source 1..343: note = Related to NZ_CP050193.1
MSYKQFKVETGKNKKERQIFEPKRSLKGIQKKINKEIFEKIDYPHYLHGALSGRDYISNAAVHTRKRTVICLDITNFYPSISKKDVCSIFKNLMRFSPEVSLCLTELVTLNDKVPQGGCCSSYIANLLFFNSEYNLYNRLKSMGLSYSRLLDDITISSDKDLSSEEKTKVIKLVHGMVNQYRLSINESKTTIEHSKDSSSKLSVTGLWVKHGVPKLTKENRRYIRYLVYICKKQGAYERHTKEYHDLWNRCSGKVAQMSRLGHVQAVELRAILSEIMPVYDDYKISKLKLMAKHYLNKFTPPLTDDQIRKIDRMLYDFDIVGRTNKNLAKLYRRKLVALLPDR

SEQ ID NO: 3663 - protein, 379 aa, Klebsiella pneumoniae
  source 1..379: note = Related to CP068315.1
MNKPRFNGTPIASLDSLAAMLGIDRKRLDWMVLSVSRSYKQFTVETGKNKKERKIFEPKRSLKGIQKKINKEIFENIDYPHYLHGAITGRDYISNASVHTKKKTIICLDITNFYPSISKRDVTLIFKNLMRFSPDVSIALTELVTLNNQVPQGGCCSSYIANLLFFNSEYNLYNRLQSIGYSYTRLLDDITISSDEDISLEEKTKVIQLVYRMVSQHRLSINEDKTTIEHTKDSSSKLSVTGLWVKHGVPKLTKENRRYIRYLVYICQKQAAYERHTKEYHDLWNRCSGKVAQMSRLGHVQANELRCVLSDILPIYDDYKIGKLKYVAKHYLSKFTHPLSEEQIRKVDRMIYDFDIVGRTNEKLAKDYRSKLRALLPER

SEQ ID NO: 3664 - protein, 331 aa, Escherichia coli
  source 1..331: note = Related to DADHSI010000124.1
KKRTIFEPKKALKALQKKINREIFENVTYPSYLHGGLKEKDYISNSASHTKKKTIICMDIQDFYPSISKRDVHQIFQYLMRFSPDVSSALTELVTLNGKVPQGACCSSYIANLVFFNKEFNIVNKLSRKGLSYTRLLDDITVSSDNDLSDAEKTEIIQLVTGMARSYRLNINKDKTSIEHSKDSNAKLQVTGLWVKHGIPKLTKADRRYIRYLVYICKKDYDAKKDSVEYHDLWNKCSGKVAQMERLGHSQAKDLRQTLSEILPIYDEFRIKKCTMFAKRYIKTFSPPLSEEQISKVNKLIYKFGIVARTQKNLAKTYRRELRALLPIEKQ

SEQ ID NO: 3665 - protein, 380 aa, Hafnia paralvei
  source 1..380: note = Related to NZ_CP083739.1
MMKPLFNGTQLASQDSLAAMLGVTTERLNKIVLSIPKSYKSFNIETGKNKKVRTLFEPKKGLKHIQKKINKEIFENVNYPNYLHGGLKERDYVSNAGTHAGKKTIISLDIENFYPSISKRDILNIFKNMMRFSPSISETLTELVTLDGKLPQGACCSSYIANLIFFNDEHNIVRKINNMGMNYTRLLDDVTISSDKKLSKEEETKAITTVVGMINRHRLSLNDAKTVIEKSDHPNSKLHVTGLWVKHKTPKINKENRRYIRYLVFICEKESAVDRTSTEYHTLWNKASGKVAQMSRVGHEQSVELREKLGKILPLYDEFKIRKIVFLANNYIKNFSLPLSEEQVSKVNKIIYDVGIVGRSNKKLSNELRKKLRSILPKDA

SEQ ID NO: 3666 - protein, 379 aa, Shigella sp.
  source 1..379: note = Related to MECU01000027.1
MKPLFNGTQLSSHSSLAAMLGVTPEILDKIVLSIPKSYKDFCIKTGKNKKERAIFEPKKGLKYIQKKINEEIFCKVKYPVYLHGGLKNRDYVSNAGFHSGKKTIISLDITNFYPSISKKDILNIFKNMMRFSPSISETLTKLVTLNDKLPQGACTSSYIANLIFFNDEHNIVSKLNRMGMTYTRLLDDITISSDKKLSKEEETKAITTVIGMINRHRLSINNDKTVIEKSDHHNSKLHVTGLWVKHKKPKVSKENRRYIRYLVFICQKESVVDRTSSEYHKLWNKASGKVAQMHRLGHPQSIELREKLSEILPLYDEYKIRKIVFLSNNYIKNFSLPLSDEQIKKVNKIIYEIGIVGRTNKKLANELRGKMKSMLPKVK

SEQ ID NO: 3667 - protein, 384 aa, Leclercia adecarboxylata
  source 1..384: note = Related to NZ_WVWD01000013.1
MNKPYYKKSPIASVEKLSLTLNVTPERLAVIVDNIHNSYKTFTKVTGRNKKERSLSEPKKGLKKLQKRINQEIFENVSFPDYLHGGLKGKDYLSNAKVHTNKKHLISLDIENFYPSISKKNVLEIFKYMMRFPEDVSKVLTELVTLDGHVPQGSCCSSYIANLVFFNTEYNYVNQLKNKGYHYTRLLDDITISSDKELDKKEKTFIINQMRAMVEKHRLKINDEKTKVESHTDLRSSFEVTGLWTKHKNPKLRKPQRRHIRYLVFICSKQAEYERTSNEYHALWNKVSGKVAQMQRIGHTQANQLREQLTKILPIYDDFKIKKVIYLADILSKTKKEEITFAKVERYRKIIHKLDIVSRSNKKLADKHRSVLHTIFKDCKVESE

SEQ ID NO: 3668 - protein, 384 aa, unidentified
  source 1..384: note = Related to JAGNRY010000075.1; note = Paludibacteraceae bacterium
MKKPIYKKSPIGSLESLSAMLGINQSQLDHIINSIPNSYKSFKIETGKKLKLRQLHEPKKGLKSLQKKLNKEIFENIEYPYYLHGGIKNRDYLSNARIHSGSKSLISLDIKDFYPNIRKTDVINIFKNLMRFPADISEALTKLVTLNGEVPQGSCCSSYIANLIFFNNEYNIVTKIENKGFRYTRLLDDITISSDRELTNNEKTFIINSVRSMIKSHRLNINEDKTKIESSSNLNDGFEVTGLWAKHKAPKVRKNHRDHIRHLVFICKKQAEYDKESPEYHALWNKASGKVAQLTRLNHAESNPLRIILNSILPEYNEHKIKKITKIADNLIKEKNKVTSNDLINKINKLLYELSIVSRTRKSLAYRYRKKINSCFSSVLKVSI

SEQ ID NO: 3669 - protein, 367 aa, Morganella morganii
  source 1..367: note = Related to CP066129.1
MLGISKSQLDNIINHVSDSYKSFIKETGKNKKSRELFEPKKTLKQIQKKLNKEIFEGITYPNYLHGGIKNKDYITNAKVHSGAKSIISLDIENFYPSIRKNDVLNIFKNLMKFPQDVSESLTKLVTLNGVVPQGSCCSSYIANLVFFNSEYHLVTKVKNKRFEYSRLLDDITISSKTEFTNEEKTFVINNVRAMANRYRLSLNENKTKIENSSDLKSDFEVTGLWAKHSVPKLKKCHRRYIRYIVFICEKQALFDRTSMDYHALWNKASGKVAQLKRLNHSESNMLRDRLSLVLPEYDDDKIQKIIKIADNLLVNGHKLNAIDLKDKINHLFYEFGIVSRTKKSLAYRYRKKIRANFSSITDKVTIS

SEQ ID NO: 3670 - protein, 394 aa, Pseudomonas viridiflava
  source 1..394: note = Related to NZ_UUIA01000028.1
MANDKPYYSKKPIASVEALAQCLGVTPERLLLIAKNSEKSYIEFTVYTGKDKTNLKKRVLHEPKPFLKSIQKKINREIFEHVIYPEYLHGGLKERDYITNVSLHAGAKTIIAMDIQDFYPSIQRTHVQDIFTLLCKFPPAISSLITDLITINGRVAQGACCSSYIANLIFFNSEYGRISKFRSQGLTYTRLLDDITISSRVVLEEKKISNAIESVASLFTKFGLKLHPRKTKVEQSSDTKAKFEVTGLWAKHGNPKIRKKDRHYVRHLVFICQKEFEKDSNCSKYHELWNMTSGKVAVLTRLKHAQSKDLRKKLGSVLPTYDSEASAKLQRIAYKLCRIPETETSSPGKLKIYHKLKYHFGIVARTDRQLAKKWKEVLDTKFKASAIAARSTNE

SEQ ID NO: 3671 - protein, 385 aa, unidentified
  source 1..385: note = Related to nan
MKKPIYNGKPISTLDALSKALGTNLSRLRIFIDTAENSYTTFTLEKKVNGIVVKERTLNEPKKNLKDLQKRINQAIFNNVSYPEYLQGGIKGKDFITNSKNHLSAKSLINLDIKDFYPSISIHHVYAIYNKLFKFPHTVSDALVKLTTKNGVVTQGGCCSSYIANLIFFNSEHDLVQKLESRSLTYTRLIDDITISSAKPMSKDEITNTINLTNNHLTKFNLNLNRDKTNIDHHHNKSDNFEVTGLWVRHGKPKVKSAVRRQIRQLVFKCKIQYELCPTDKSYHDLWNKTSGKVAILTRLGHANSKIYRKKLSEILPLYDIKKEEKIERIINYLIDTESKEINSPRRIKLYHKMIYHCGILGRSNKSKAKLLKNKLKAKFIAVQV

SEQ ID NO: 3672 - protein, 394 aa, Chromohalobacter marismortui
  source 1..394: note = Related to NZ_SOBR01000014.1
MADKPYYPGSSVAHISTLAAMLEINRDLIEKHSKNTSSSYTTFLISPPSKKSREVSEPKESLKKIQKRINSRIMSEVDYPKYLMGGIRDTASRRDYVNNSKLHLKPETLINLDIENFFPNIHKEHVKNVFKYLFRFSEDVSETLSCLTTLEGVVPQGGCTSTYLGNLVFFNYEYGVVSKLRSKGISYSRLLDDITLSSKKRLTEEEKTWAISLVAGMINHYGMNMHDGKTRIEHRESRDAKYEVTGAWVRHGEPKIRKDDRKKIRSAVRKCEIMYEESPYSSEYHKQWNKTSGRVAQLGRFNHKAEEKKLRERLKTILPLYDDVYSKTLSVKVNQVVRRRRKNQINIDSVGTRNYILKLYHELGIMARTKKTQARRLKQSLRENFGNIISNPHY

SEQ ID NO: 3673 - protein, 393 aa, Halomonas sp.
  source 1..393: note = Related to NZ_NSKA01000004.1
MADKPYYPLPPIGSVSVLAAMLKINEKQLIHIANNASNSYTSFEITPEGKKPRDVVEPKEQLKYVQKKINAMIFSEVKYPIYLMGGISDKVQSRDYINNGKLHLNKNTLINLDIENFFPNIKHVYVKKIFTHLFKFPESVSEILTKLTTLNGRLPQGGCSSTYIANLLFFNYEYHIVSQLRNKGITYSRLLDDITLSSNKKLNKEDKTHAISAVDGLIKRFELSINTSKTRIEHKDDLSAQYEVTGSWVRFGELKFPGKARKKIRSAVKKCELMYQENCYSAEYHSQWNRTSGRVAQLKRFGHHKQEREFRTRLGKILPLYDEQQAITLRTKVYQLVKKRKLNKLRLDNPGLRKQILTLYHQLGILARNNTSSKILKNELRENFSFLINNPYY

SEQ ID NO: 3674 - protein, 393 aa, Halomonas sp.
  source 1..393: note = Related to CP040452.1
MGDKPHYPFEPIASSKTLAKTLGVNLPLLLKTASNTSNSYTSFIVPTKSKDRTVYEPKTTLKYIQKKINKEILSRVEFPSYLMGGIKDTQSPRDYLANSRMHLRKESLINLDIENFYHSIKKPYATQIFKQLFKFNDEVSNLLTELVTLDGQVPQGACTSSYIANLVFFNSEYTVVNNLRAKKIAYTRLLDDITLSADRKLTNIEKEWLISQVTGMIVSHELKIKDAKTRIENRDHPRSRYEVTGAWVKYGEPKLRKKERNKIRHDVYICELFHEKDPTTEEYHRLWNRTSGLVSKLGRFNHKNEADKLRKRLSFILPKYSDIQAKTLQTKIYQIVNRKKKNNIDINNPGLSKQILRFYHNLGILSRTHPHLSKPLKNQLRSEFGTMIRNEYY

SEQ ID NO: 3675 - protein, 391 aa, Halomonas sp.
  source 1..391: note = Related to JABFTW010000016.1
MADKPYYPHAPISNIDTLAKMLGVRSSLLILIANKANSSYVSFEVETKNKQRMVNEPKTILKYIQKKINSQIFNSVEFPAYLMGGIRDPKTPRDYISNAAIHAKAKTLISLDVKDFFPTTQEVHIKSVFKNLFNFPEDVSNTLTKLVSLNGRLPQGGCTSSYVANLIFHNSEYKVVSQLRQKGIRYTRLLDDITLSANRPLSKNECEKYIRLVAGMITKHDLTINSGKTKVEYSKNIASPYEVTGAWVRHGKPKLRKKERNEIRHIVHIVEKKYAENPYDKEYHDLWNKASGLVAKLKRFEHINESKGLRKKLKATLPLYDDQKAETLRVQANKLLRRQARNTLNYNSGTKKSIDKLVYDLGILSRTRPEISKPLKKKIKDSFTGIDFDGI

SEQ ID NO: 3676 - protein, 395 aa, Vibrio vulnificus
  source 1..395: note = Related to JAERHH010000003.1
MNSVRRDKPYYPSSPISSVSRLSDVLEVRENVLRDLIQNKSTHYHSFSIETTSSDGKKKNRSIHEPKFLLKKLQKRINSRILSKVEYPHYLQGGIYDEDNPRDYYSNAAIHSKANCVMSVDIKNFYPSIKTEQVTRIFKFFFKFPQDVSELLAELVTYEGFVPQGAVTSSYIANLLFFEDEYKVVAHLAGKKLLYSRLLDDITISGKSISNQDFGKIKTQIVGMFKKRGVRINRKKTALVYSGIRSVTGLRVEHSTPRCDRKEKRRIRAAVKHCEIQYQIDRTSDEYHSLWNSTSGKVAKLERVGHSQAKKLRTRLQQIYPTLSTGQVHALKIAIKKLEKVPSSKRMKIGYLKQVNKLIHRTSLVFRTDKPLAHSLTERLITIKPVKTYSDFWEK

SEQ ID NO: 3677 - protein, 410 aa, unidentified
  source 1..410: note = Related to JAGOQM010000006.1; note = Neisseriaceae bacterium
MNKFNFDKPYYTQRPISSIKALANALGADQQALIQLANNKTNYHYYTKHVKSGSKTKQRSIFDAKHSLKKIQKRIISRIFCHIEFPQYLHGGIKDLNQPRDYFSNATVHCNSKNIISLDIKNFYDSVRDDKVLIIFLNFFKFPKDVAQILTQLVTVQWSDYDKDISQSARHLPQGAPTSSYLANLIFFDNEYKLFNHFKRQKISYTRLLDDITISSLSEFTKAQKTKIITRVAGMVRESDLKLNNKKTICTSFREPGKKMIVTGLWVNHSIPKLQKHSLKKILEGVKSCEYIHSRCPFSFEYHKEWNTYSGKVANMARSYPNLAKRLRVRLSTILPIFSPKQTLVLERQIDTLLNSKTTQTNKLTNIKRFNKAYYAIGIISRTDKRLARKLRSRLLTRMPNITYKDYWEN

SEQ ID NO: 3678 - protein, 389 aa, Burkholderia gladioli
  source 1..389: note = Related to NZ_CADFBN010000021.1
MRPQYLKKPIGTVATLSAALRVSEPVLRHAESNLDAHYTPYEIPKRDGRVRSIVIPSLHLKTIQKRINREIFAHVEYPSYLYGGVNGQDYVRNASAHRGAQVLIALDVKDFYPSISRKRVANIFQHFLHFGAEVSDLLAGLTTYQNKVPQGACTSSHLANLVLHDVEYSIAQYCHNAGLVYTRLLDDITISSRKHVSGEKITKIIAMVSRMLKSKGLKIKRQKTKITSKSNPEDLMEVTGLWLNRGAPRANSFARRAIRVEVYKCSQSAKKDKASSNYHKDHASASGKVAMLNYLGHGEAGRLRKMLADILPIYDERELTKTEKMVRMLRRSSEKDREKYAYNVRFHKVMQRLNIVARTDKVLADRLRQELCASRPVKSSNAALYDEPI

SEQ ID NO: 3679 - protein, 336 aa, Caballeronia sp.
  source 1..336: note = Related to NZ_CADFFT010000005.1
MIPSLHLKTIQKRINREIFSHVTYPEYLYGGVPGKDYVRNAKRHELAHVVIALDVKNFYPSISKLRVSNIYQHLFKFGADVSDFLAALTTYENKVPQGACTSSHLANLVLHDVESSVVKYCNDSGLVYTRLLDDITISSTRRLPEKKVEKIVGMVATMLKGKGLKLKHNKTRVSTKANPEELMEVTGLWLNRGAPRVHSVSRRLVRVEVYKCKEAAKVERVSESYHKAFARASGRVAMLCYLGHAESGRLRKSLSEMLPLYDVREVTKTKKIVKMLGRTSEKDRSKYSYNVSYFKTMQRINIVSRTDPLLARTLRHQLLMCKPKNKSDAALYDEPI

SEQ ID NO: 3680 - protein, 389 aa, Burkholderia anthina
  source 1..389: note = Related to NZ_CADESX010000025.1
MRPYYTKNRIGSVAALSAALRVSEPILKHTADNLERHYTPYEIPKSNGKPRLIVIPSLHLKTIQKRINREIFSHVAYPHYLYGGVSGKDYVRNAEAHQNAHVVIALDVKDFYPSISFARVVGIYQHFLKFNPEVAELLASLTTFKNKVPQGACTSSHLANLVLHDVEYSIAQYCENFGLIYTRLLDDITVSSTKALSPQKIKKIIDMISKMLRDKGLRVKHQKTRVSSKANPENLMEVTGLWLNRGAPRANSFDRRLVRVEVYKCKQAAAVDRTRPEYHKAHASVSGKVAMLNYLGHAEAGRFRTTLAEILPLYSVGEITKTEKIVAMLCKSSLKDRGKYTYNLNYYKTMQRLNIVARSDFALAKRLRVKLLGYKPTKLSSDALYDEPI

SEQ ID NO: 3681 - protein, 396 aa, Burkholderia multivorans
  source 1..396: note = Related to CP090714.1
MSTFFSVMRPYYTKKPIGTTAALASALRVSEPVLKHAANNLDRHYTPYLIPKGDGKQRAIVIPSLHLKTIQKRINREIFSHIEYPHYLYGGIDGKDYVRNAGAHKDRHTIIALDVKDFYPSITFERVLGVYQHFLKFSPEVAELLAKLTTFNKRVPQGACTSSHLANLVLHDVEYHVVQYCENAGLTYTRLLDDITVSSPKPLPVQRVSKIIEMISKMLKGKGLRLKKPKTRVSSKSNPESLMEVTGLWLNRGAPRVNSATRRAIRVEVYQCKQAAATSRTSLDYHKKHASASGKVAMLNYLMHAEAGRLRKALADILPLYDVSEMTKTRKIVEMLSRASVADRGKYSFSLSYFKTMQRLNIVARSDAALAHSLRRKLLVCKPTKPSSATLYDEPI

SEQ ID NO: 3682 - protein, 362 aa, Ralstonia sp.
  source 1..362: note = Related to FOWV01000008.1
MHTARNIEKHYTPYEIPKADGKVRAIVIPSLHLKTLQKRINREIFSNIVYPPYLYGGIEGKDYVRNASAHRSAHVVIALDVKDFYPSISFHRVLNIFQYFFKFSPEVSELLAKLTTFQNKLPQGAATSSHLANLVLHDTEYHLAQYCENAGLIYTRLLDDITISSTKPLSEQRISKLIDMVARMLREKGLKLKNKKTRISSRSNPKILMEVTGLWLNRGSPRVSTDNRRKIRTEVHQCAVAAMTSRTSQSYHKAHASVSGKVAMLNHVGHAEAERFRKTLADILPLYDANELTKTINIVNVLSRSSESDREEYAFNLNYFKTMQRINIVARSDPRLARRLREKLATCKPINQSDEALYDEPI

SEQ ID NO: 3683 - protein, 395 aa, Paraburkholderia sp.
  source 1..395: note = Related to NZ_QBUB01000002.1
MLTLLPMRPFYKKKKIGSVASLGAALRVSDVVLKHTAATLEQHYTPYEIPKKSGKPRSILIPSLHLKTLQKRINREIFAHVQYPDYLFGGVEGKDYVRNARVHAGSHVLISLDVKDFYPSITFDRVKRIYQHFLQFDPAVSELLAKLTTYNNSVPQGACTSSHLANLILHDVEYHLAQYCATAKLTYTRLLDDICISSKTALSKEKIAKLIDKVSSMLRDKGMKLKHQKTRVCSKSNPKELMEVTGLWINRGAPRVKPTERRKIRVDVHRCQVLANQSLTNREYDRAHASVSGRVAMLSYLGHSEAERLRKSVAAILPQFDIHEISKTKKIVALLSRASAKDRNKYSFILNFNKTMQRLNIVARTDPKLAVQLRKSMATCRPTKRADATLYDEPI

SEQ ID NO: 3684 - protein, 357 aa, unidentified
  source 1..357: note = Related to LFMX01000035.1; note = Candidatus Burkholderia humilis
MLRKTLHFLSNSQERREASFDSYSSLHLKTLQKRINREIFAHVEYPNYLSGDIEGKDYVRNAKAHAGSYVLISLDVKDFYPSINFNQVKRIFQYFLKFEPGTSELLAKLTTFNNSLPQGACTSSHLANLVLHNVEYHLAQYCKTARLTYTRLLDDICISSNSPISKEKISRLIEKVSKMLRDEGLKLKHRKTRVSSRSNPKELMEVTGLWINRGAPRVKSAERRAIRVEVYCCKDAAQTSLTDREYHKAYARVSRKVAMLNHLNHREASRLRRGLSEILLRFDIHEITKTEKVVAMLMRASIKDREKHSFILNFNKTMNRLNIVARTDPKLAIRLRKEMAKCRPTKRTSATLYDQPI

SEQ ID NO: 3685 - protein, 356 aa, Paraburkholderia sp.
  source 1..356: note = Related to NZ_QREJ01000001.1
MDKHYTPYQIPKKNGKPRTIMIPSLHLKTLQKRINREIFSHVKYPDYLYGGVEGKDYVRNAEMHAKAHVLVSLDVKDFYPSISADRVTGIYQYLLKFNPGVAELLARLTTYKGAVPQGACTSSHLANLILHDVEYHVAQYCKNAGLVYTRLLDDICVSSEAALSEKKISRIIEMISRMLRDKGLKLKHQKTRISSKSNPKELMEVTGLWVNRGMPRVNSTERRSIRVEVHRCRQLAAGRRTDLAYHKAHGSVSGKVAMLNYLRHSEAGRLRRSLGAILPEYDQAEMTKTVKIVEMLSRTSPKDREKYSFNVSFFKTLQRLNVVARTDPKLAVRLRKKLASCRPTKHSSATLYDEPI

SEQ ID NO: 3686 - protein, 377 aa, Paraburkholderia agricolaris
  source 1..377: note = Related to NZ_QPER01000002.1
MNALCAALRISESALKHLAANLDRHYTPFEIPKDNGKRRALLIPSLHLKTLQKRINREIFSHVAYPAYLYGGVENRDYVKNASVHQRAEVLIALDVKDFYPSIEMKQVVSIFQHLFKFPKEVADILARLTTYEGKVPQGACTSSHIANLVLHDVEYHIAQDFHNRNYVYTRLLDDICVSSLKPLSPEKVEDVIKKVSSMVKKKGLKLRAAKTRITSRSNPESLMEVTGLWLNRGTPRVNPKQRRSIRSAVYQCQKTAMSDNSSLTYHVEHASASGKVAMLKYLKYGDATRMRTILQGIVPVYDKAELTKTKKIVDMLCRTSHRDREKYAYSLGYHKAKHRINIVSRTEPMLAHALRAKLKKCPPTKTRSEMIYDESI

SEQ ID NO: 3687 - protein, 404 aa, Chromobacterium haemolyticum
  source 1..404: note = Related to NZ_MUKT01000065.1
MTTLSSHACFMLSGFMRPQYNKNPIRSIDSLCDALRVSEVVLRHTAENIQHHYTPYSIPKANGKTRVVHIPSLHLKTIQKRINKEIFSHITYPDYLYGGIEGKDYVKNANAHAGANVLIALDVKDFYPSIKREHVTDVYQHLCNFSKDVAELLTDLTTLRERVPQGACTSSHLANLVLHKVEYPVVQNLRNQDFRYTRLLDDICISASKFLSPAKIETIISDVARMLKSKELRLHPKKKSITSKNNPESLMEVTGLWLNRGHARAKREERRAIRTEVYRCEKEAARSRYSPEYHKMHGSVSGRVAKLNYLHHPEAKNFRLRLQEILPLYDEHEIIKTSKIASVLSKVAKADRAKHWFAIQHHKAQYRVNIVGRTNVKMASKLSRQLSLCRPPKTLSELIYDEPI

SEQ ID NO: 3688 - protein, 389 aa, Comamonas testosteroni
  source 1..389: note = Related to NZ_CP043568.1
MRPIFNKKSIGSIEALSDALQVNKHILQNTADNIFQHYHPYEIKKKDGGTRLIHIPTLHLKIIQKRINKNIFDNVTYPDYLHGGIEDKDYVKNALSHANAEAIICLDIKNFYPSITQTRVSKIFQYFFKFPEDVSNLLAKLCCHEERVPQGACTSSHLANLAFFDSEYHFASFCKSKKYTYTRLLDDITISKSSAFSDTEISKAIASVKSIISPHGIKLNNKKQKIVSRSNPKDLMEVTGLWLNRGRPRAHRSYRKVVRLEMHICEKMAKTDRFSEEYHKLHNRVSGKVSKLSYLGHHEATNYRDTLQKILPLYDIHKATNLHKNALILSKVNANIRKKFAYFKRYSKINYELNILARNNKPLSKTIRNILSNCKPSGLRDDLLYNEPI

SEQ ID NO: 3689 - protein, 389 aa, Lampropedia sp.
  source 1..389: note = Related to NZ_STFG01000005.1
MRPFYDARPIGSLAALSKTLQVELSILQRTASNIEEHYHAHEIVKKSGGTREINIPSNHLKIIQKRINKHIFENVVYPSYLHGGLPEKDYVKNANCHSSAEVVIALDIKNFYPSISIDKVEEIFQFFCHFPKDVSKLLAELCCLNNSVPQGGCSSSHIANLILNNTEYSLVSWLSSKKYTYTRLLDDINISSKHLISKEEITKIIKKTKETISKSDLKLNNKKQKITSRSNPEILMEVTGLWLNRGTPKAHTYDRKLIRAEMHKCQTMAKKDRFSAEYHEIHNSISGKVAKLSYLKHKESERYRYILRGILPLFDKSKEVSIRKQANYLLKSKPNYRKKYVYFKKYHKLLYKLNILTRNNKSLANQIKGNLKSCKPLGMKDELLYNEPI

SEQ ID NO: 3690 - protein, 384 aa, Achromobacter marplatensis
  source 1..384: note = Related to CADIJU010000023.1
MRAQYTKKPIGSLEVLSRALEIDLGVLINTANAIDQHYHAHQIPKKKGGFRTINIPTLHLKSIQKKINSRIFSNVVYPEYLFGGIKERDYVKNAAQHAGCKALIALDVKDFYPSISLNAVKDIFQYFFRFPRDVAELLGKLCCLNERVPQGACTSSHLANLSLQENEYHFAQYCKNKGWTYTRLLDDISVSSKEVFQQKDVDAIISKAKAVLAGARLKLNNKKTRILSKANPVDLMEVTGLWLNRGRPRAHRSDRNAIRSEVYQCEILAKEGRERKKYHDFHSHVSGRVSKLAYLEHANSKLYRERLRKILPIYDVNQATNLLRQAEYISKTTLSNRKSVAYYKKYHILKHRLNILMRTDRGLARRIQSMLSLCKPTLQSSDML

SEQ ID NO: 3691 - protein, 365 aa, Bordetella sp.
  source 1..365: note = Related to NZ_CP012334.1
MDLGILRNTIRTIDKHYHPHSIPKKNGGSRIIHIPTTHLKTIQKRINRQIFDNVIYPSYLFGGVREKDYVRNTSEHGGCNALVALDVKDFYPSITVAAVKKIFQYFCKFPAEVAETLAGLCCLNGRVPQGACTSSHLANLVLHDEEYHLAQYCKNKGWTYTRLLDDISVSSKAEFDVKEIDAIIRKVKYMLGKSALKLNNRKTRVLTKANPVNLMEVTGLWLNRGVPRAHRADRNTIRGEVHQCEVAARDSRTEKQYHELHNRVSGRVAKLSYLKHANSREYRERLRSVLPLYDEHQATNLLKQARYMAKTKTNIRKTPAYCKKYFILQHRLNILMRTDRGAAGKIRAILTTCRPAIASASAYIE

SEQ ID NO: 3692 - protein, 389 aa, Advenella sp.
  source 1..389: note = Related to NZ_JABUXU010000004.1
MRPQYLAKPIASLNVLSVALGVDIDVLRNAASNIERHYHPHSVPKKDGSLRSIYIPSIHLKKIQKRINRNIFENISYPGYLFGGIKERDYVKNANAHASAELLIALDVRGFYPSITRDKTLNIFKFFFKFSHDVASLLADLTCLRGQVPQGACTSSHLANLVLHDTEYHLVQHLNNKGLTYTRLLDDISISSKTQLEEKQVQTLIGKVRTMLNEQGLKLQNKKTKITSRKNPENLMEVTGLWLNRGRARVHRNERRIIRAELHKCESMSRLSKSSPEYHDFYNRLSGRVAKLTYLEHKEALSYRSRLREILPIYEKNEIHRTIQLVTSLQKSSIKDRGKYAYYAKFHQVRYRLNILGRTDGGLAKKLATTLQTCKPTSDKERLFYHDII

SEQ ID NO: 3693 - protein, 389 aa, Advenella mimigardefordensis
  source 1..389: note = Related to NZ_CP003915.1
MRPLYLAKPIASLQALSSALRIDVHVLKSTAANIDRHYHPHSVPKKDGSSRSIYIPSIHLKKIQKRINRNIFDKIKYPDYLFGGIKERDYVKNANAHASAETLIALDIRGFYPSITYEKTLKIFKFFFKFPEDVAALLTDLVCLRGRVPQGACTSSHIANLSLHEAEYHLVQHIRNKEFTYTRLLDDISISSKKQINEIQIQTLIGKVRKMLNEQGFKLQNKKTRITSRKNPEKLMEVTGLWLNRGQARLHRQERRLIRAELHNCEKLSKLSRTSIDYHELHNSLSGRVAKLTYLGHKEAACYRSRLREILPVYDDNEIHRTIKLVSFLEKSSVNDRKKYAYYAKFHQVGYRLNILRRTQSGLANKLAEILRTCKPPLNKEELFYHEII

SEQ ID NO: 3694 - protein, 387 aa, Ramlibacter humi
  source 1..387: note = Related to SMLK01000007.1
MRPIYSAQPIGSTAALALALGMSESALLALAASASIRYSAFEIPKKNSDKVRTVCEPHHELKVAQKRINRAVFEHVVYPEYLQGGIADRDYVRNARIHAHSKSLIALDVQNFYDNIQAPDVLKIFKFFCKFPEDVARVLTQLTTRGGRVPQGACTSSHIANLVFFATEHRVVREFFQQGLRYSRLLDDITVSSAKQLSQERTSKIIHKVKLLLAEKHLRLKTSKTRVSSNSNPEVLMEVTGLWLNRGAPRAFRAERHDIRARMFKLERMHELSSHDLDYHAEHNRISGRVAKITYLGHFEAENYRSRLQKILPTYDGTEVARTLKLVRLLCATPAHQRDNLAYIDKYHHVLYRLGILSRTHRRLASKQRALVMKCAPSTSREELLYG

SEQ ID NO: 3695 - protein, 386 aa, Variovorax sp.
  source 1..386: note = Related to FOWG01000001.1
MRPIFHGKPIASIASLAAALGLNATTLQDFSARAQSQYTRFEIPKKNGGTRTICSPTHDLKVIQKRINRAIFSNVEFPPFLFGGIEGKDYVKNAQAHAGAKTIITLDVTDFYPSISKKRVAEIFKYFCHFPDPVSHLLAELVTLDEVVPQGACTSSYIANLVLFETEHRLVEEFRQRKLTYSRLLDDICISSQRNIAPKEVQEIISRTASLLKSKGFRIKNRKTRVSSASNPETLMEVTGLWLNRGHPRVFRAEREKIRTQLHRCEENFKISRTAPEYHQEHDRLSGLVAKPTYLNHFEATNFRNRLSAKLPHYNRADTYKTEKIVESLERVNMGDRGKISYIEKFNQVTHRINILARSNAKLATNLRDRLRKHAPTKTKEDLIYG

SEQ ID NO: 3696 - protein, 401 aa, Vitreoscilla filiformis
  source 1..401: note = Related to CP022423.1
MDHRSVQLSRCLFLSMRPIFNGTPIASVDALARSLSLSAQQLRTLAGAVSGHYRDFDIPKRDGSFRTVSGPTEELKIIQRRINRHIFERVQYPSYLFGSIKERNYVQNARSHSRAHVIVAMDVENFFPSIKREAVLNIFKNLFRFPQEVASLLADLCTKDGHVPQGACTSSYIANLALHDIEHRLVSNLRHEGLIYSRLTDDISISSPHPLAKKRIESLVVQVAEMLKCKGFKPKRRKTKVTSKNNSAELMEVTGLWLNLGEPRVKRDERASIRTEVRRCIRESKVERTSPEFHKLHDRTSGRVAMLSQLKHREANRFRVALRLCAPLYSPIEIKRTQKIVAAVCKTPLRSRETAVYIQRFYQARYRVNIVSRTDPKLAKELHARLSSHVPKMKKEEAIYG

SEQ ID NO: 3697 - protein, 394 aa, Giesbergeria anulus
  source 1..394: note = Related to NZ_FOGD01000002.1
MSVIFNSCMKAKFLGTPIARVESLARTLGVSIHDLRTIAGAASSRYNDFQIDKKDGGKRDVSSPRIELKLIQKRINREIFEKVYFPSYLNGGIKGRDYVKNAYEHGNSETIISLDIENFYPKVSRISILNIFKNFLKQPEEIAEILTNLCTKDNKLPQGGCASSYLANLVFFDIEPRLVSRLQEEGFTYTRLIDDITIYSKNLISKKKISDLIESITKMLKSRGFKLKQKKTRCTSASNPEKLMEVTGLWLNRGAPRVRRNERAEIRKEVRECLISAELNKTDKEYHDLHQKVSGRVAKLSQLNHCQAERFRKELREILPIYSDADIRKTRRLVAKIIKTPRTTRSSLGYIKKYHQIVYRINILARSNKSIARSLREKMKICAPTITKENSIHG

SEQ ID NO: 3698 - protein, 392 aa, Janthinobacterium sp.
  source 1..392: note = Related to NZ_JQNP01000001.1
MNISYSHPPIGSISKLAKMLDVSEAYLYQVAKNPENFYAFSEIPKKNGDFRTISDPVKELKIVQRRIIRRIFCNCIFPTYLFGSIKDIENPRDFVRNAQFHSNANEVMAFDIDSFFPSIQAKYVKLVFKYLLNFPNDVSDLLVKLTTLNGSIPQGAPTSPYIANLVFYDQEPKLVKLFTDKKLRYSRLVDDITISSEKPITSGNKTFIYEQVKKLLDSKSLKINKKKYQVTNTSNSGKKTIVTGLIIENNIVKLPKETIKSISRQVYTLNRMADVATTDVKYHKAHGSTSGLVALYSRLSKEKSDVHRLSLRGIKPTYSPSRLKKIASLCRRFIKYGESHTKKHGDEDYAKKYYKYKHKISIIRRTDKKTAYRLDLALKPIKPLHLLSSYHE

SEQ ID NO: 3699 - protein, 392 aa, Collimonas fungivorans
  source 1..392: note = Related to NC_015856.1
MKIAYSNSSIGSVAALAKMLDVTENFLTLVASKPDDFYSISKIPKKTDGFRTISDPVKELKIVQRRIVRRIFSKCSFPSYLFGSIRDEINPRDFVRNAQYHSQAREVMAFDVESFFPSVRPQFVKKVLKFLFNLPNEVAEMLVSLMTLQDGLPQGAPTSSYVANLIFYDCEHKIVKTLNAMGFTYSRLVDDITVSSKTIIKNEERRFIYEQISKMLGEKKLKISQRKYGVTNTTVIGKKTVVTGLVVEDKMIKLPKEKVKLIGQMVYELKSKAEVSTTDHEYHKSFNKASGLVALYSRLNTKKAEIHRQHLRQILPTYDNKKAKKIGWLCRKFIGYSKLHPSKFSEEGYTRKYYKFKHKISILSRTNRTLAISLEKDLKPLKPTCLLASFHE

SEQ ID NO: 3700 - protein, 392 aa, Xenophilus sp.
  source 1..392: note = Related to NJIE01000028.1
MRIEYQGKPIRSIKALSTCLGVSEDSLSQISLDIENQYSISEIPKKKGGFRTISDPLPPLKIIQRRIVRRIFSNIKFPDYLFGSIKDDNNPRDFYKNALYHQKAKEVLSFDIESFFPSCRPKFIYKIYKYLFNFSDEVSHLLVNLTTLNNGLPQGAPTSSYLANLFFYDNEHKIFKTLKSKGFLYSRLIDDIVVSKQSKINSNEKQFIYRNILSLLREKEVNLNKDKYSYSNTKTHGKKTIITGLQVRNGNTILPKEKTTEIHKKIHEIEHLGEVDRTSNKFHEAYGTASGLLALYKRVDITKAEKLHKKIITIKPIYHPNRIKKIKWICNKFVRISKSNPRRIGEYNHAKKYHRLMHKISIIRRTHTALAKQLKARMQSIKPTRLLSEYEP

SEQ ID NO: 3701 - protein, 393 aa, Rhodocyclus tenuis
  source 1..393: note = Related to NZ_SSSP01000010.1
MPLQVTYRGSPIRSLEALSSALSCDEPILKHISNHVADYYTFFEIEKKSGGARQIKPPKPILKAIQKRINSRIFSLCEFPEYLQGSIKDATNPRDFVSNARAHSNGKTVVAADIKNFYPSVTESNVKEIFKYLFRFSDDVTAVLVALTTLDNSLPQGAPTSSYLANLVFYNNEHKLVTELRRKGLIYTRLIDDITVSSPVVLDKNEQEWIIRKIKGFTASKGLELHRGKLKVCTTSTPGANVIVTGLWIDRGHPRISREARNKIRAAVHRCKKEHEAGHKTLGEFHDRHNSVSGSVALISRLGHTQGKQYRLILNENLPEYSKEYAGKLTKICYRFSAKKGLRKETLSYTKRYYQLMYHLSILGRSDKKKANFLRSLLKQNPPKHCLRELSEE

SEQ ID NO: 3702 - protein, 419 aa, Alcaligenes faecalis
  source 1..419: note = Related to NZ_CP021641.1
MCFTLRYFPEWLPQVFLELIDSLPFLSLGYMNRITFASRPIASRAALAKALSIDERVLAEFEQNANAYYYFFERPKKHGEGIRSITAPKPLLMQLQRRVNNRIFSGCNFPRYLHGSIKDSEIPRDFLTNAREHITADHVITLDIRNFYPSIGREEVFKIFKYLLRFTDEVASSLTSLVTLNGTVPQGAPTSSFIANMVFYDREPRLVEELIRSGVRYTRLLDDITLSFSNRISSEKLKGEIIGKVRTMCSAKGFKLHDGKQKIHSLISSPNPAIVTGLSIRNNKLGLPVAYRNKTRAKVHNCVQQYRAGHQTAAEYHSLHNSTLGDITLLKRLKYKCADTYEEKLRSCLPTYHPKKAQQLRRACEDLAIKIRPSSVASLTRRFHVLMHCLTVLQRTKPDLAAALRTLLRTSYAKAISNE

SEQ ID NO: 3703 - protein, 389 aa, Achromobacter sp.
  source 1..389: note = Related to JAHUWQ010000001.1
MNRITFASRPIASRAALAKTLSLDERVLRQLEQNVNALYLSFERPKKHGEGMRSITAPKPALMQVQRRINTRIFSGCKFPRYLHGSIKDLEAPRDFLTNASEHKAAEHVITLDIKNFYPSIEREVVFKIFKYLLRFPDEVATSLTSLVTLDGVVPQGAPTSSFIANMVFYDREPKLVEEFIRSGVRYTRLLDDITLSFSNRISSEKLKGEVIGKVRAMCSEKGFKLHDGKQRIHALISSPNPAIVTGVSIRNGRVGLPPVYRDKTRAKVHTCVKQFDAGHQTAAEYHRLHNSALGDVTLLKRLNYSCAEAYAEKLRSCLPTYSPKKARQLRRMCEDLAMKMRPTSVAALTRRFHVLMHCLTVLGRTKPNQARTLRTLLRTSHAKAISNG

SEQ ID NO: 3704 - protein, 339 aa, Janthinobacterium sp.
  source 1..339: note = Related to FTMV01000007.1
MRSLSEPILLLKILQKRILNRIFCHIKFPHYLHGGIKATNPRDFHSNASAHLGAEVAITLDIKSFFPNVTSMVVENSFLRLFQFPDEVATVLAKLTMLNNQLPQGAPTSSCISNIILFDREYKIAANLEAQGFQYTRLIDDITISSKKKISSERVSKVIDIIAKMLGHYGLKIHPDKTHVRSKGNPLDLMTITGLWINRGSPKLDRKKCFEISCEVIQLKREALKNGVNEVKYHTRYSSVAGKVALLERLNHSRATRLKLILDTILPTYNNYDVAKVANLVSKFCKNQRDSNSIGYLKKFYQLQHAVSIVKRTHVPTAKSLQALLNIRRPKRTMSEFYG

SEQ ID NO: 3705 - protein, 392 aa, Iodobacter sp.
  source 1..392: note = Related to NZ_JAAOLX010000002.1
MASKHKIYYDGLPIGSIKTLAKTLSCTEARLIKISTDPSFFYTTFLKTVKNKNRELSEPNPELKLIQKRIVSRIFNHIKFPHYLHGGIKALDPRDFHSNAKAHSGAETAITLDIKNFFPSIKADQVENLFLHLFKFPPNVSSVMSKLTTLNNCIPQGAPTSSYISNLILTEKEYRIAAKLESQGFIYTRLIDDITISSKKELPEKKITQIITNIAGMLTHYNFELHPEKVHIYSRSNPEKLMVITGLWLNRGMPRIEKSRRLQISNDVIAIAKLATSSTGTSDASYHEKFNAASGKVALLQRFKHTEARRLRAILNEIQPTYNDYDKCKINKLAFRFLNKKTSKETIGYLKKFYQFQYRASIIKRTDPALAKRIQEKLNLNRPTSTKKAFYE

SEQ ID NO: 3706 - protein, 391 aa, Janthinobacterium sp.
  source 1..391: note = Related to NZ_KB467824.1
MTTHKIFYSAKPIGSIAKLATALGFTESFLRSVSNRTTDYYTEFVKSVKGKDRELSEPKPHLKTLQKRINTRIFSHVKFPSYLHGGIKTIDPRDFVTNASQHCKSETAITLDIKGFFPSITTAQVENIFRNLLNFPNEVSALLASIVTLNGLLPQGAPTSSYISNLVMWEKECRLVSRFEGRGLIYTRLIDDMTISSKTRIPEKLVTKIIEDVAGMLQHYNYTLHPKKKNIFSKRDPEHLMLITGLWLNRGAPKLLKEKRAEISHGVIAATHMASEPDMIFNPKYHAIHATCSGKVALLQRLGHTRAIRLRNILNSIEPQFSPQYCHRISVVVRKFYAKGRVKNDLGSLKIFYEFQHKVSIVKRTDPILAKKLQIYLNAIRPQATMRELNG

SEQ ID NO: 3707 - protein, 394 aa, Cupriavidus necator
  source 1..394: note = Related to CP074381.1
MATYDKIYYESNPIGSVAALAKSLDVAESRLLQVAADIQSFYHIFEKTVGKKTRQLCNPNDELKRLQKKVVSRIFAHLVFPPYLHGGIKAEDPRDFLSNAGVHVGAHVAIAIDVKDFFPSISEQSIAQAFKLLFRFPKEVAEILAKLTTLNGFVPQGAPTSTYLSNVVMFDKEYRLVARLRAKGLRYSRLIDDITISSEKSMMPSEIDRVTTDVIKMLRAYNFYHHEAKYRILTRSNPKDLMMVTGLWLNRGAPRVARKKREDIAAHVVQLSKRALENHAREDESYHQEFHALSGKVALLQRVGHREASRLRSILREIKPIYGEQELRRLRKIIPAFCEKVIDRSKLGYIKKFYRFQYCVGIVRNSHPKLAATLQASLNSVRPTKTLRELDEHE

SEQ ID NO: 3708 - protein, 390 aa, Undibacterium sp.
  source 1..390: note = Related to NZ_AP018441.1
MRQNHKIVYDASSIGSLQVLAKTLDISVHRIQKIASVQTDFYTIFEKQVKNKIRELAEPKAELKIIHKRIISRIFSHFRFPHYLHGGIKADTPRDFISNASAHAACKTAIAMDIKSFYPSITYEHVYQMFLRLCKFPPQVSEALAGLTTLNGSVPQGAPTSSYIANLVIWDREYKLASLFEQKGFVYTRLIDDITVSTEKSMSKEAIENVIKLVSSMLVNYGFKIHPDKTQIYSKSNPEKLMLITGLWLNRGMPRLDADKRVKISASVTRLTKNGVKDCVSDEYHQQHSKLAGQVALLKRLKHVEAGQLRKLLDATPPIFEHSKIAKIQKVVKMFVRKEIDSSKLGYLQRFFHLQHQVSIVKRTNPRIARQLQIMLNKRRPTSTKESHYA

SEQ ID NO: 3709 - protein, 341 aa, Snodgrassella sp.
  source 1..341: note = Related to JACFQL010000003.1
MIKPQLFYYPLAGIQSIESLAKHLDIDLDKLTYLLENINSQYIGPIFIKKSNGGSRPIYRCRPQLKYFLKRLNSKVFKLVHYPNFLYGALPNKSIYTNASQHLNAKVMCNFDIKSYFTTITFDHVFDIFKNFFHFSTEVSNILATLTTINNQVPQGSPCSTYIANLVFYRSEVNVANKLKDKNYVYTRFIDDITVSSQYKKTKKDIEEVHTIVIGMIRAYKFSLQTEKRSIAPSHKCQILTVNQINIVKSNLSISKENRKKIRAAVHELKCNLNDNNIEFVVKNFESVYGRVQYLKNIHIKEAQGMLKQLEQIRSKILKPLQIYKYRKLKEAIRKKQGYKL

SEQ ID NO: 3710 - protein, 351 aa, Snodgrassella alvi
  source 1..351: note = Related to NZ_MEIP01000014.1
MLNLQFKYPLAAVQSIESLAKHLNIDCNTIIYLLENIDFLYEGPIPILKSNGKTRPIYLCKPRLKYFIKRLNSKIFKVVSYPDFLYGALPNRDTYTNVSQHLNAKVICNFDIESFFTAITYEHVFDIFKNFFHFSAEVSQVLAKLTTVNNQVPQGSPCSSYIANLVFYRSEVNVVQKLRNKNFVYTRFIDDISVSSLSKKKKKDIEEVHRIVIGMIRAYQFSLQTEKISIAPSHKTQSLTVNKINIVKSRLSIPKKKRANIRAALYQLEQHFQEKDMKFVVKNFESVQGKVQYLSKFHPKIADKMMKRLEKIHIKIAQPLNHYKRNRLKSDIRKYRNINFIRNKSALTEKI

SEQ ID NO: 3711 - protein, 339 aa, Alicycliphilus denitrificans
  source 1..339: note = Related to NZ_CP051298.1
MSPSATSAPSYSQRRIGTLQALHVPLGLPASDLLALAERADGLYRVAKRITKPDGSIRIAYDTLDPLKGVHRRVKSQILDHVSYPAYLTGSIKGCDAKVNASLHARARIVINEDISGFFPSTSADRVFSIWHNFFGFSEEVARCLTRLTTRHGELPQGAITSSFLANLVFWRDEPALHDKFAAQGLVYSRYVDDIAVSSKTFLTNKEKTDVIRQVYGMLLKHGYRAKRAKHEIATSARRMAVTKLAVNSKPGLDGATRDKTRAVVQAVEQRSAQGEVLSFDRGPYAQAMGKVLHLERFHPGDAAPLKRRLLALKEAAASITSSHPSTWRPNEKKLGSHS

SEQ ID NO: 3712 - protein, 323 aa, Cupriavidus metallidurans
  source 1..323: note = Related to CP000352.1
MSQSATNAPSYSQRRIGTLQALHVALGMPVGDLPTLAERANDLYRVAKSITKPDGSIRNTYDAREPLKEVHRRIKSQILDHVNYPAYLTGSIKGCDYKVNASLHARARIVINEDISGFFPSTSADRVFSIWRGFFGFSEDVARCLTQLTTRHGELPQGAITSSFLANLVFWWDEPELFGKFAAQGLVYSRYVDDIAVSSKTFLTNEAKTNVVRQVYGMLLKHGYKAKRAKHEIATSGSRMAVTKLAVNNKPGLDKATRNKIRAVVHAVERRIAQGEALSFERGPYAQAMGQVLHLERFHPGDAAPLKRRLLALKEAGAALPHS

SEQ ID NO: 3713 - protein, 331 aa, Bordetella bronchiseptica
  source 1..331: note = Related to NZ_JGXC01000015.1
MSPSATSAPFYSQRRIGTLHALQVPLGRSVSELLVLATRADSLYRVAKSMTKADGTIRNTYDALEPLKEVHRRIKGQILDHVNYPAYLTGSIKGTDYKVNASLHVRAKIVINEDISGFFPSTSADRVFSIWRGFFGFSEDVAQCLTQLTTKHGELPQGAITSSFLANLVFWRDEPALRARFAAQGLVYSRYVDDIAVSSKAFLTDEEKSDVVRHVYGMLREHGYQPKRAKHEIATAGTRMAVTKLAVNAKPGLDKSARSRIRAVVHAVEQRVASGEALSLERGPYAQAMGQVRHLERFHPGEAAPLKQRLLALKKATKPQSPNSDDHAETA

SEQ ID NO: 3714 - protein, 327 aa, unidentified
  source 1..327: note = Related to JACCEN010000001.1; note = Alcaligenaceae bacterium
MNPSATNAPSYRQRRIGSLEALHNSLGLPASNLLALAERANILYRVAKSITKADGSIRNTYDALEPLKETHRRIKSQILDHVSFPAYLTGSIKGCDYKTNATLHVGARILINEDISGFFPSTSADRVFNVWHCFFGFSKAVAQCLTLLTTRHGELPQGAITSSFLANLVFWQDEPTLHAKLASQGLIYSRYVDDIAVSSKSFLTDEEKSKAVRHVYGMLLKHGYQPKRAKHEISTSATRMAVTKLAINSKPGLDRATRSRIRAIVHAVERRFELGEVLSFDQGPYAKAMGQVRHLERFHPGEAAPLKNRLLALKSISRTRSRHRKVE

SEQ ID NO: 3715 - protein, 319 aa, Sinimarinibacterium sp.
  source 1..319: note = Related to NZ_CP048030.1
MSPPATSAPSYSQRRIGTLNALRLPLGLSVDELLSLAQRADGLYRVAKSITKPDGSIRNTYDALAPLKAVHRRIKSQILDHVVYPAYLTGSIKGSDYKVNASLHTSARIVINEDISGFFPSTSAEHVFNIWHGLFGFSQEVSQCLTQLTTRQGELPQGAITSSFLANLVFWQDEPTLHARFAAEGLVYSRYVDDIAVSSKTFLSNQEKSEVMRKIYGMLLKHGYQPKRAKHEISTSGTRMEVTKLSVNAKPGLGKAVYSKTRAAVRDIEERIALGEVLSFERGPYAQAMGRVLHLERFHPGKAAPLKRRLLALKEGAKT

SEQ ID NO: 3716 - protein, 319 aa, Alcaligenes faecalis
  source 1..319: note = Related to MSZR01000033.1
MNLQATSAPSYSQHRIGTLNSLRLPLGLSVDKLLSLAQRADSLYRVAKSITKPDGSIRNTYDAVASLKAVHRRIKSQILDHVIYPAYLTGSIKGSDYKVNAALHTNARIVINEDISGFFPATSTEHVFNIWYGLFGFSQEVSQCLTQLTTRQGELPQGAITSSFLANLVFWQDEPTLHAEFAAQGLVYSRYVDDIAVSSKTFLSNKEKSEVVRQIYGMLLKHGYQPKRTKHEISTSGTRMEVTKLSVNAKPGLGKAVYSKTRAAVHDIERRIANGEVLSFERGPYAQVMGRVLHLERFHPGKAAPLKKRLLALQEGTKT

SEQ ID NO: 3717 - protein, 319 aa, Spongiibacter tropicus
  source 1..319: note = Related to NZ_ATUS01000004.1
MSLSAISAPLYRQRRIGTLHALHVPLGLSVDELLSLAKRADGLYRVAKSIAKPDGSIRNTYDALAPLKEVHRRIKSQILDHVDYPAYLTGSIKGSDYKVNAALHSNARIVINEDISGFFPSTSAELVFKVWNGLFGFSQDVSQCLTQLTTRQGELPQGAITSSFLANLVFWQDEPILHTKLASQGLIYSRYVDDIAVSSKAFLTNQEKSEVMRQIYGMLLKLGYQPKRAKHEISTSGARMEVTKLSVNAKPGLGKAVYSRTRAAVRDIELRISNGEILSFERGPYAQAMGRVLHLERFHPGKAAPLKKRLIALKESAKT

SEQ ID NO: 3718 - protein, 323 aa, unidentified
  source 1..323: note = Related to PQGD01000025.1; note = Proposed Superficieibacter electus
MIHTPSDSPFYSKRRISSMTALSKALNISPIELLNLANRADHMYRLASTITKPDGSTRQTWDAYAPLKKVQRNIRRNILDYVVYPAYLTGSLKGCDYKVNASLHVGATIVINEDITRFFPSTSTAIVQSIWRYFFGFSHEVAECLTKLTTRQGELPQGAITSSFLANLAFWKDEPALQASFRARGIIYSRYVDDIAVSSVNFLDKPAKTNVIASIYGMLSRHGYQPKRAKHEIRTSGQRMEVTKLSVNSKPGISSAKQSQIRSAVHHLEQAILRGEIIEFDKGPYAQTLGLVHLLARFHPGKAKKLKQRLLALKSSGCTNMYT

SEQ ID NO: 3719 - protein, 323 aa, Leminorella richardii
  source 1..323: note = Related to NZ_LS483470.1
MIHTPSDSPFYSKRRISSMTALSKALNISPIELLNLANRADHMYRLANSITKPDGSTRQTWDAYAPLKKVQRNIRHNILDYVVYPAYLTGSLKGCDYKTNATLHAGSSIVINEDITLFFPSTSDTIVHNIWQHFFGFGNEVAECLTKLTTRQGELPQGAITSSFLANLVFWKDEPILQASFRARGIIYSRYVDDIAVSSVNFLDKPTKTNVIASIYGMLSRHGYQPKRAKHEIRTSGQRMEVTKLSVNSKPGLSSAKKSQIRSAVYHLEQAILRGEIIEFDKGPYAQTLGLVHLLARFHSGKAKKLKQRLLALKSAGHANMYP

SEQ ID NO: 3720 - protein, 323 aa, Chania multitudinisentens
  source 1..323: note = Related to CP007044.2
MNHIPSDSPFYCRRRISNMAALSKALNTSLDELNSLARRADQMYRLASSLTKPDGSVRQTWDAYEPLKKVQRSIRCNILDNVVYPAYLTGSLKGCDYKVNASLHIGAKIVINEDITCFFPSTSATIVQNIWRNFFGFGKEVAECLTRLTTRQEELPQGAITSSFLANLAFWKDEPVLQASLRARGLIYSRYVDDIAVSSVNFLDNSAKSAVIACVYGMLFRHGYRPKRTKHEIKTSGERMEVTRLSVNSKPGLSASRQSQIRSAVNHLEQAFLRGEIIEFGKGPYAQTLGQVHLLARFHPGKAEKLKQRLRALKKMERMNKCP

SEQ ID NO: 3721 - protein, 323 aa, Xenorhabdus kozodoii
  source 1..323: note = Related to NZ_NJCX01000054.1
MKHTLPDGPFYSRRRIHSMASLAKALNIPASELISLACRADRMYRLANNIPKADGSVRQTWDAHEPLKKIHRSIRRNILDHVTYPYYLTGSLKGCDYKVNASLHAGATIVINEDITGFFPGTSAAVVHCIWRNFFCFGQDVADCLTRLTTRHGELPQGAITSSFLANLAFWDAESALHSSFKARGLIYSRYVDDIAVSSETFLDNSTKTEVIASLYGMLFRHGYRPKRTKHEIRTSGERMDVTKLSVNSKPGLSTSRQSQIRSAVNHIEQAFLRGEITVFDSGPYAQTLGQVHLLARFHPGKAEKLKQRLLALKKLAQSNKCS

SEQ ID NO: 3722 - protein, 320 aa, Pantoea ananatis
  source 1..320: note = Related to NMZX01000011.1
MNPVLSDAPFYRRRRIGSVASLAKALSVKEDELFSLAARADQMYRLASSVLKPDGSVRQTWDAREPLKSLHRSIRRNILDLVAWPSYLTGSLKGCDYKVNASLHAGARIVISEDISGFFPATTEAIVRHIWRGFFGFSQDVADCLTRLTTRHGALPQGAITSSFLANLAFWDVEPELQAGFRARGLIYSRYVDDIDVSSYTFLDNHAKAAIIADIYGMLFRRGYQPKRAKHEITTSGQRMEVTKLSVNSRPGLTASKQSQIRSAVYHAEQAFLRGEITCFDSGIYAITLGQVNLLARFHPGKAEKLLQRMRALRNKSEES

SEQ ID NO: 3723 - protein, 322 aa, Yersinia pseudotuberculosis
  source 1..322: note = Related to NZ_LR134306.1
MNPSTILPRYKRQRIASLDALQAALGVSIEQLQSLAEHADNSYRVAKSVIKPDGSTRHTYDAFKPLKDIHRKIKNHILDHVAYPSYLTGSIKGCDYKVNAEIHTQAKIVISEDITAFFPSTTAKKVFKIWRDFFGFNSDVARCLTRLTTRKNELPQGAITSSFLANLVFWQSEPFLYEQFSMRHLKYSRYVDDIVVSSKSFLDDVEKTEVIRQIYGMLLTNGYHPKRAKHEISTSASRMEVTKLAVNIKPGLKKAKKSMIRAAVHRLETLISEGKEISFESGDFVEVMGQVQHMKRFHPGKAEALIKRLNTLKLSYIVLHNK

SEQ ID NO: 3724 - protein, 328 aa, Bordetella trematum
  source 1..328: note = Related to NZ_JPQP01000023.1
MHLSTINAPSYKRKRIGTLEALAYPLGLNAAALEDLARRADAMYRLAKEIVKPDGSVRHTYDAFKPLKVVHGRIKREILDQVAFPLYLTGSIKGRDYKVNATLHSRAKIVINEDISGFFPATTSQHVFDIWHRFFGFSEAVARCLTDLTTYHGELPQGAITSPALANLVFWRREPQLQAEFAAKGWTYSRYVDDIAVSSTIGMAPHQKTEAIRKVYGLLSGYGYKPKRNKHEITTAAQRMVVTKLSINAKPGLAQSERDRIRAAVHEVERLVSSGNSISTDSGVYAKAMGRVTTLARFHPGEAAPLRQRLLRAKQTLQPLLSPSTRAP

SEQ ID NO: 3725 - protein, 332 aa, Azoarcus indigens
  source 1..332: note = Related to NZ_SNVV01000001.1
MSLSTSSNSPFYKGTPIRQRTSLAAALGSTLHRIEYVAPRANKLYRLAHAELKSDGTIRQTFDAKPLLKDLHRRIKTEILDRVTFPDYLTGSLKGRDYKSNAELHEGAAIVIAEDIENFFPNTTSDKVFDIWRHFFRFSEPVAQLLTSLTTKDGALPQGAITSPQLANLVFWRDEPLLQAKLAADDITYSRFVDDVTVSSVVPIPAENKTELVGAIYGLLRRNGLQPKRVKHELKTRRERMAVTKLTVNDKAGLSAKERSRIRAAVHRLELKGAQQLLEAGELASVLGKVHHMARFHPGEARPLKARLLKISAHGCAATPSEQSPLPPCSEP

SEQ ID NO: 3726 - protein, 316 aa, unidentified
  source 1..316: note = Related to JFAX01000020.1; note = Candidatus Accumulibacter sp. SK-12
MNPSPSDSPSYNGRPIRSIQSLAKAVYCKPQRLAFVSERASDLYRVAKEVPKADGTVRRTYDAKKLLKDIHRLIKTEILDRVDFPPYLTGSLKGQDYKSNAEIHVGAAIVIAEDIGNFFPSTTAERVLDIWRNFFRFSAEVAQCLTNLTTRNNELPQGAITSPQLANLVFWRNEPQLHARFKADGVDYSRFVDDVVASSKTPITPKKKTEIIAAIYGLMKRSGYQPKRRKHELKTARERMTVTTLNVNDTVGIPKEERSRIRAAVHRLEGLVTSGRGEVDLKHEYAVVAGKVNNLGRFHPGEARTLRERLAALDLC

SEQ ID NO: 3727 - protein, 315 aa, Rhodocyclus tenuis
  source 1..315: note = Related to NZ_SSSP01000011.1
MNRLPTSSPLYSGQAIRRIESLGKALRFSPQRLGYLGNNADRLYRIAHEIEKSDGSKRVTFDAKPALKEVHRRIKSEILDRVTFPLYLTGSIKGRDYKTNAELHVGAALVITEDIGSFFPSTTTAHVFDVWRNFFRFSDEVARLLTALTTRNGELPQGAITSPHLANLVFWRDEPALHDRFAADGIVYSRFVDDIAASSKTPIPPEHKNEIVRLIFGLMLRRGYKPKREKHDLKTAGQQMTVTKLTVNQLPGLPKAERGRIRAAVDHLERLASRGPLSAEQWREHASVSGRVTHLARFHPGEAAGLKARLKMLHP

SEQ ID NO: 3728 - protein, 320 aa, Burkholderia ambifaria
  source 1..320: note = Related to NZ_UZVX01000004.1
MNQSTTNCPSYDAKPIRLITSLAKALETDENQLLLLADEANELYRIAKKIRKPDGSLRRTYDALPRLKDIQRRIKFRILDRVTFPSYLTGSLKGRDYKVNAALHSGAKILIAEDIGSFFPSTSASRVFDIWKNFFGFGHEVACCLTKLTTLRNELPQGAITSAHLANLVFWREEPQLRTRLDQSGIVYSRFVDDVAVSSRSVIEPAQKTEVVTSIYGMMIRHGYRPKRTKHELHTARNRMVVTKLTVNAKPGLEKTERSKIRAMVHELERLSESLDNTQAILDRLNSVAGKINMLGRFHPGKAQSLKKRLLEVKQIIAAR

SEQ ID NO: 3729 - protein, 303 aa, Shewanella sp.
  source 1..303: note = Related to JAGOBW010000017.1
MLSLAHKANTMYRIAKEVEKGDGTVRRTFDAHRPLKDIHRRIKLEILDKVVFPDYLTGSIKGRDYKVNAALHAGAKIVISEDIGAFFPSTTDAIVFDIWHGFFGFSHDVATCLTRLTTYNGELPQGAITSPQLANLVFWRSEPVMYQRMADMGLKYSRFVDDIAVSSRLVIAPEAKTVIISLIYGMMFRQGYRPKRSKHDISTSKDRMTVTKLTVNHKPGLASSQRSQIRAAVHALECNLAVKQTADVAAKLPSVIGKVIMLRRFHPGEGLRLKQRLAAIQASQSPQRECKAELQFGPLAGSL

SEQ ID NO: 3730 - protein, 346 aa, Paraburkholderia bryophila
  source 1..346: note = Related to QLTK01000002.1
MIHVNRLEVPRYTATPIESMAALSRALGVTNQHLAAVAAKASSLYRVADKIEKADGTLRETFDAKPVLKDIHRRIKLAILDRVSFPNYLTGSVKGQDYRTNALLHRNSKILISEDIQGFFPSTTQHLVQEIWSQFFGFSADVAQCLTALCTKDGALPQGAITSPHIANLVFWRVEPAIRAEMAFRGLRYSRYVDDVCVSSSTGIAHADKQSVISVIYAMLARHGYSAKRSKHKIQTASGRITATKLGVNGDPSLSGQQRGQIRAAVHKLELTFAAGAFSDARALLPSVTGRVSMLARFHSTEGQALKQRIASVREQLLLVPMVTRADDATHKAIRDSVDDISTVPW

SEQ ID NO: 3731 - protein, 344 aa, Burkholderia oklahomensis
  source 1..344: note = Related to CP008726.1
MILMNQIEVPRYTAAPIESMAALSRALGVTSAHLLAVAARASSLYRVAEKVEKADGTFRETFDAKPVLKDIHRRIKSSILDRVAFPRYLTGSIKGQDYRTNALLHRNSKILISEDIQGFFPSTGQCLVYEVWSQFFGFSDDVSRCLTSLCVKDGVLPQGGITSAHLANLVFWRVEPAVRAELARFGIRYSRYVDDICLSSPDAIGHEDKKKVIALVYAMLARHGYSAKRSKHNVQTSRGRIVATKLGVNREPSLSRQQRGQIRAAVHKLESLFADGDLDGVRERLPSAGGRVSMLGRFHAAEGAALAKRLASIRRALDLLPVISKTSAVMSQVSHSDLDGTVPW

SEQ ID NO: 3732 - protein, 341 aa, Curvibacter gracilis
  source 1..341: note = Related to NZ_JADZ01000026.1
MDLFLIKPRYRASPIRSIAALARSLRWDALALVDMAERANGMWRTVKPKPGSIRQTFDAMGPLKEIHQSLKLNIFSKVDFPEYLQGSLKGRDYVSNASLHKDKQILICEDVKGFFPSVGAAYVEDVWCGFFGFAPDVAKLLTKLTTKDGCLPQGCIASSFLANLVLWRHEPLLHAKLAQRGITYSRYVDDMVMSAATHLDKATQTWVIAQVYGMLARHNLKASRKKHEVFSATQPMIATKLIVNRKPSLSLKKRSQVRAQVRQLEIAVGTGLDAEELRDLANKAAQQVGQLGRFHKTQAEHLRNRIAIVRGTLPIEHPSIITAPSNAPLSQELSTGSLSSK

SEQ ID NO: 3733 - protein, 342 aa, Xylophilus sp.
  source 1..342: note = Related to NZ_JAELTO010000123.1
MDLFLIKPRYRASPIRSIAALARGLRWDAKALVELAERANGMWRTVKPKPGSTRQTFDAMGPLKEIHKRLKLNIFPKVDFPEYLQGSLKGRDYVTNASLHKDKQILICEDVKGFFPSVSAAYVEDVWCSFFGFAPEVAKLLTQLTTKDGSFPQGSIASSFLANLVMWRYEPLLHAKLAQRGITYSRYVDDMVMSAATHLDKETQTWVIAQVYGMLAQHGLRASRKKHEVFSASKPMIATKLIVNRKPSLSPKKRSQVRTQVRQLEIAAADGVNAEELWDLANKAAQRVGQLGRFHKTPAASLKNRIAIVRGSLPPENQPAITGQTIAPLYQEHPPTGTAPWE

SEQ ID NO: 3734 - protein, 342 aa, Diaphorobacter sp.
  source 1..342: note = Related to NZ_CP065406.1
MDLYPIKPRYRSNPVKSIAALARGLRWDAQSLVELADRANGMWRTVKPKPGSTRQTFDAMGQLKEIHQRLKLNVFSKVDFPEYLQGSLKGRDYVTNASIHKGKQILICEDVKGFFPSVSAAFVEDVWCGFFRFSPDVAKLLTRLTTKDGYLPQGAITSSFLANLVMWRYEPWLHAKFAQRGITYSRYVDDMAMSSATHLDKETQTWIIAQVYGMLAQHGLKASRKKHEVFSASQPMIATKLTVNRKPSLSPKKQSKVRTRVRQLEIAATSGASTDELRELANKAAQQVGQLGRFHKTPAAKLKSRIAVVRDNLSPEALSVTTAPAKVRLDTVPLVTDARPWE

SEQ ID NO: 3735 - protein, 340 aa, Delftia tsuruhatensis
  source 1..340: note = Related to CP017420.1
MSLCLSKPSYQAKPIRSIAALARALRWGEQALVQLADRSESMWRTVKPQPGSTRQTFDAMGQLKELHTRLKLHIFSKVVFPDYLQGSLAGRDYVTNASLHAKKKILICEDVKRFFPSVGAIYIEQVWRDCLGFAPDVARLLTKLTTKGGYLPQGAITSSFLANLVLWRHEPLLHAKLKQRGISYSRYVDDMALSSASHLDKDTQTWAIAQVYGMLARHDLKASRDKHDVFAASRPMIATKLIVNHSPSLGAKKRSQVRAQVLQLEMAAASVVDADQIRGLANKAAQRVGQLGRFHKTAAAHLKSRIATVRDTLTADSRVAITGERAAHWEHLEGENPWSY

SEQ ID NO: 3736 - protein, 336 aa, Comamonas sp.
  source 1..336: note = Related to NZ_CP094240.1
MSLSLSKPIYKAKPIRSLASLAKALGLDEKRLKELALKADTLWRAVKPEPGSTRQTFDAYEPLKRVHERIKRSIFSKVSFPAYLHGSLKGCDYVTNAALHKGQQILICEDVKSFFPSVQSVYVRDVWAGLFGFSSEVADILTALTTKDGALPQGGITSSYLANLVLWRKEPLLQAKLAARGITYSRYVDDMSMSSKTLLDKETQSWVIAQVYGMLAFHGLKASRKKHDVFSASKPMIATKLIVNQKPALPKAKRSNIRAQVKQLELASQSSIPLEELKILANKASQRVGLLGRFHETEANALRLRIKAVRASFTSTEEVRVTGAKLEDGHESSTIS

SEQ ID NO: 3737 - protein, 329 aa, Vitreoscilla sp.
  source 1..329: note = Related to JADMKA010000068.1
MSLAALARALRLSVGELHALAERADQSYRTVKPEPGSTRQTFDALGQLKTVHRRIKEVVFVNVYFPEYLQGSLKGRDYVTNALLHTNKQLLVCEDVKKFFPSVTAALVEDVWHGFFRFAPEVAKLLTRLTTKSGHLPQGAITSSYIANLVMWRHEPLLQAKFAARGITYSRYVDDMAMSWSCHVDKETQTWVIAQVYGMLAQHGLKAGRAKHEVFSASEPMIATKLIVNRKPSLSAKKRSQVRSQVYQLERAEEDGTETMSVDALAIKASQRVGQLGRFHVTQAAHLRERVKAVRSRLSVEANAAISMPTETPTTPSPEDLSDAPAPWE

SEQ ID NO: 3738 - protein, 342 aa, unidentified
  source 1..342: note = Related to JAIUOW010000007.1; note = Proteobacteria bacterium
MALYLSKPSYRCKPVRSIAALARALNFEEQALRVVAENADQRYRTVAPPPGSSRQTFDALGQLKEIHRRIKTTFFDRVKFPDYLHGSLKGCDYVTNAQLHTKKQLLICEDVKKFFPSVTSEKVEDVWCAFFGFAPEVAHLLASLTTKQGALPQGAVTSSYLANLVLWRDEPLLHAKLAARGITYSRYVDDIAMSFSIRPSKETQTWVIAQVYGMLRKNGLTAGRSKHEIFSASEPMIATKLIVNSKPSLSQKKRSQVRAQVRQLEMAQSSGLDSEMVRVLAEQAAQKVGQLGRFHPTQAARLKGRVKAVRLGLPIESFSSRVTNSTGVSNPSPSEDLRLPWE

SEQ ID NO: 3739 - protein, 345 aa, Ramlibacter sp.
  source 1..345: note = Related to JACDFR010000086.1
MSLTPHKATYSKEPLRTVKSLCAMLRLEEQALRDLAAHAPALYRRVKPKPGSKRETFDALPRLKVIHKRIKTQVLERVRFPSYLTGSVKGRDYKENAAKHAGQRVVICEDVKGFFPSVTAEMVCDIWQGIFGCSSDVAQLLTQLTTKDGALPQGAIPSSYLANLVLWRTEPLVHAKLDAQGITYSRYVDDITMSSPRRLSVAQKQAAIGMVYGMLSEAGLRAGREKHDVFNGSKPMIVTKLVVNEKPSLTKKKRSAVRAAVFQFQQTLALGEPTADTVITLNKLAQRVGQLGRFHPREAAVLKLRLQATRAFIDKAQPQTLTTGLLPDARLTTPPEGAPAPWDDL

SEQ ID NO: 3740 - protein, 339 aa, unidentified
  source 1..339: note = Related to SEBG01000114.1; note = Cytophagaceae bacterium
MSLFLRKPSYPCKPINSLRSLAAALRVTEDELLSVANIADTLYRKVKLKPGSDRQTFDATPRLKRLHARIKSVILAKVIFPDYLTGSLKGRDYKTNASLHINKSVLITEDVKGFFGSVSDVRVNDVWRHFFRFDASVAETLTLLTTRRGALPQGAISSSYLANLAMWSDEPLLHAKLAARGIIYSRYVDDMCMSSNTPLSIAEKTRTIEDVYGMLMKNGLSARRDKHDITPATGRMLVTKLVVNRKPALPPEQRSRIRAMVFQAEQMARNEADPKLSIAALNKAANKVGQLGRFHCNLSKPLKARLALARAPLPHPLAEPRFTGPDTGSTGDAPGVPWE

SEQ ID NO: 3741 - protein, 335 aa, Variovorax sp.
  source 1..335: note = Related to NZ_CP046508.1
MSLNLRKPTYPFRPIGSLAALANTLKVSESELVHIAKNAGSLYRAVQLKPGSTRQVFDAKPPLKPIHSRIKEFILSEVHFPSYLTGSLKGRDYKANAEIHAGQAVVICEDVKGFFNSVSETCVFDIWRHFFLFGTAVSQVLTSLTTKDGALVQGAIPSSYLANLALWRDEALLHAKLEAQGIRYSRYVDDIVMSSSTPLEPSRKTELIASVYGMLRRNGLSARRDKHEIAPATKQMVTTKLVVNRRAALPPARRANARTAVFQAEMLVANHGVEAAQAVIAKAAGRVGQLARFHPNLAAPLQERLARLRKQAATRKSLPTMEPSETPTPPPEKDS

SEQ ID NO: 3742 - protein, 352 aa, Variovorax sp.
  source 1..352: note = Related to JABMJG010000016.1
MSLILNKPSYPFNPIWTNEKLAKALRTELAELEAIAIVADRSYRPVRMDPGSTREVFSAKPRLKAIQRRIKEAILQRVRFPEYLTGSVKGRDYVTNAKLHTGARILICEDVSKFFPSVSAERVWDIWRHFFGFGDDVAHLLTKLTTKAGTLPQGAGTSSYLANLVLWRDEPYLQAKLAKHGLTYSRYVDDMAMSSKLDITPVEQERIIADVYGMLRRNGLSAKRKKHEIFSSSQRMIVTKVIVNTKPSWSKARRSAVRTQVHELEKRVVAEDVGAELHKFADRTSNLVGQLGRFHVREAGLLRARVRKAREVMNRATRIHFTISPTTGAHQSSRLVDVPPWEMKCRRAVKSS

SEQ ID NO: 3743 - protein, 341 aa, Acidovorax soli
  source 1..341: note = Related to JACHLK010000013.1
MSLILSKPIYPCDPVWTLEKLGEALRIDLAELQAVAAVANRSYTKKLVKKDREVFSARPRLKLIQNRIKMAFLHRVIFPEYLTGSLRGCDYVTNAKIHTNARILICEDVQQFFPSVGSEKVKDIWLNFFGFSEGVAELLTKLTTKAGAVPQGASTSSYLANLVLWRTEPLLQAKLADHGITYSRYVDDMSISSEFQLEPAELERIIADVYGMLRKNGLSAKRKKHEIFRESQRMVVTKVIVNKKASLSKDRRSAIRTQVHVLESRIAAGENSIELSKFLDQTSHKVGQLGRFHKNDYRDLLPRVRAAREALRINPPPFITGDNDRWPEAAPPHAPWELGGI

SEQ ID NO: 3744 - protein, 348 aa, Stenotrophomonas pavanii
  source 1..348: note = Related to AP024684.1
MSQLQPPPRYRHNPIHSVAALSRVLGYSVETLKHVAGTSSSRYRLAKPILKEDGSFRRPFDALYPLKDIQIRIKQRILTAVIFPAYLTGSLKGQDQVRNAKLHQGASITVCEDIKSFFPSTTSEVIFDIWRGFFGFSEDVSNLLTLLTTKDDLLPQGAVTSSHLANLVFWRREHALYLGLASQGVRYSRYVDDITLSSRLPVTHDDLARHISLVYGMIRSTGHRAHRGKQEIQRAHRGMRATKLLVNRRAALGTAERQATRAAVFALERSFAVTGGVLCPALIKELNSVSGRVSRLARLHANEGQALRARLTKLRNEVGKSHRVRNDFSQVEVIGVEPAPPETGEGMQ

SEQ ID NO: 3745 - protein, 321 aa, Xanthomonas sp.
  source 1..321: note = Related to NZ_JAJITE010000118.1
MSQLQPPPQYSHKPIHSIAALSRVLGYSIDTLSHVAEVSSSRYRLAKPVVKADGSTRQPFDALFPLKNIQIRIKQRILTAVSFPAYLTGSLKGQDQVRNASLHQGASITVCEDIKSFFPNTTSEIIFDIWRGFFGFSENVSNILTLLTTKDGVLPQGAVTSSHLANLVFWRQEHSLYVRLASEGVSYSRYVDDITLSSLLPLNSNELARHISLVYGMIRSTGHHAHRGKQEIQRAHRGMRATKLLVNRRPALSTAERHAIRAAVYSLERSLAAAEGVLCSSLAKELNSASGRVARLTRLHRSEGLALRERLLRIRNQLDNS

SEQ ID NO: 3746 - protein, 327 aa, Stenotrophomonas maltophilia
  source 1..327: note = Related to JADUKZ010000003.1
MTQPPPRYPLRAIVRLDKLALVLGVSLDLLLAVSKDASSRYRLAKLIVKPDGSTRQPLDAKVPLKGIQRRIKERILEKVVFPDYLTGSLKGRDARANARLHVGASIVLSEDIANFFPSTKDTLVFKIWRQFFGFAPDVAEILTSLTTKDGELPQGACTSSYLANLAFWREEHRLYEVFRAQGIAYSRYVDDVSVSSKRRLSNEELSACIKNVYGMMGRSGFRPRRKKQEIQRANSPMLVTKLLANRRPAISVKERQAIRASLYQLEQSVAAKAGDDLSSKLESIAGRVNRLCQMHPVEGERLKVRVRVLRGQIGMGASEVCGPVTGQ

SEQ ID NO: 3747 - protein, 318 aa, Stenotrophomonas maltophilia
  source 1..318: note = Related to JADUKS010000015.1
MSRVPPPSYPHGSIQSLAALSRTLGVPADKLLQIAKDADNSYRLAKPIVKADGSVRRPVDARVKLKGVQVRIKERILDQVRFPDYLTGSLKGKDAVANARLHVGASVVVCEDVAGFFPATSSPAVLGIWRGFFGFSTEVSELLTQLTTLNGALPEGAVTSSHLANLAFWREEHALYEELHREGIRYSRYVDDVSVSSVNQLSRQELAACISRVYTMMGRNGYRPKRAKQQIQWANGPVLVTKLQTNTRVALTKKERHAIRGAVHGLERMALAGPSDELLRRLSSVSGQVARLRRLHPNEGQMLKSRLDALRRLLTAAV

SEQ ID NO: 3748 - protein, 339 aa, Rhodanobacter sp.
  source 1..339: note = Related to SCRF01000118.1
MNHTAAQPKYTSSPVRSLAALSRSLGLSVAELQRIGDAASSLYRDAKPIIKVDGSIRRTFDAFPVLKNIHRRLQTQFFQRVVFPDYLTGSLKGRDARRNAALHTGAAIVVTEDIKNFFPSTDAKVVYSIWANFFRFAPEVARLLTALTVKDGALPQGAITSSYLANLAFWDREWRLYENLRDKGISYSRYVDDVTFSSKEKLSNERIGCCIAGVYGLMAAKGLKAKRSKHEIRRGNGRMLTTKLMVNTRPALMTRERQNIRAAVHQLEVLSRWNSTDSVSFKSEFSRVSGRVGRLSQLHPMEGAALRARLATLRAGLYANQQLGRQLSQFAGVTLDCVI

SEQ ID NO: 3749 - protein, 320 aa, Metallibacterium scheffleri
  source 1..320: note = Related to NZ_MWQO01000072.1
MNPKAAQPKYTFSPVRSLASLSRSLGVSVVDLQRIGDTAGGLYRDGKPIIKADGSIRRTFDALPLLKSVHRRIQARFFQRVVFPDYITGSLKGRDARRNAVLHAGAAIVVTEDIKNFFPSTDAKVVYSIWVSFFRFAPEVAQLLTMLTIKDGALPQGAITSSYLANLAFWDREWRLYENLRDRGISYSRYVDDVTCSSKEQLNNEKIGSCIAEVYGLMASKGFQAKRSKHEIRRGNGPMLTTKLMINARPALLTRERQNIRTAVHQLEVLSKNSTDPVRLKSEINRVSGRVGRLSQFHPIEGAALRARLTTLRVGLDLNQ

SEQ ID NO: 3750 - protein, 327 aa, Dyella psychrodurans
  source 1..327: note = Related to NZ_QRBF01000008.1
MVQLASRPNYKYSPVQSCASLSKVLAVSPSALKALAANSNNLYRLANPILKPDGSVRQPYDALYPLKLVHERLKLRVFAHVSFPDYLTGSLKGKDAIKNASFHAGAKIVVCEDIKDFFPSVTADVVYSIWQGFFNFAPEVSRLLTSLCTKDGSLPQGAITSSYLANLVFWKQEWRLYEDLKSRGIVYSRYVDDVTVSSREGLDKEQLSECIGKVYGLMAANGLRPKRKKQEIQRAHAPMRATKLMVNKRAALSLGERKAIRAAVHQLELEVAQVNMPKELMAKLNSVSGRVARLAQLHVVQGNELKNRIRALRVRIKLLTTLALHDK

SEQ ID NO: 3751 - protein, 326 aa, Dyella dinghuensis
  source 1..326: note = Related to RYZR01000007.1
MTPDASKPSYRCSPIRSLDSLSRALGVSLETLNRLASRADDSYRLAKAIVKPDGTIRQPFDAQPPLKAIHRRLQKRIFDNVRFPDYLTGSLKGKDARWNAALHTGAKIVVTEDIKNFFPSVTANIVYSIWAGFFRFEGNVAQLLTLLCTKDGMLPQGAIPSSYLANLAFWEQEWKLVANFRAAGITYSRYVDDVTLSSRESLDKPQLTRCISNVYSFMAAQGFRPKRTKQEIRRAHAPMIATKLMVNRRPALLVQERQGIRSAVYQLEREEMRGCDPKEIKAKIDSVAGRVGRLTQLHPTDGHALKLRIAALRRKLASISAVPSAN

SEQ ID NO: 3752 - protein, 326 aa, Luteimonas sp.
  source 1..326: note = Related to JACJFT010000001.1
MKNPPKRPEYPHRPIGSLDALSAALQISRIELEHVASVTDSQYRLAKPIVKADGSIRQPYDALPLLKNVQRRIQARLLAPVQFPTYLTGSIKGRDARRNAAIHAGAKVVVCEDVASFFPSTSRLLVESIWTGFFGFSPEVAQMLAVLTTKNGSLPQGAVTSSYLANLAFWKKEPILQQQLELNGIAYSRYVDDITISSRRALLNPELSWCIAQIYGMMRGAGMQAKRGKQEIWRGDGRMLATKLVVNRRPALPPNDRKAIRTAVFQLEARFAAGDVEDTFATELNRVAGRVVRLAQFHPVIGAALKGRIASLRQQLSDGQTSAIAP

SEQ ID NO: 3753 - protein, 331 aa, unidentified
  source 1..331: note = Related to CAJPFU010000489.1; note = Anaerolineales bacterium
MNPPQLKPKYDLKSIRDISALSLSLSMPEELLINVAAQADSLYRKAKPIIKPDGSLRQPFDALPPLKSIQRRIKDRILKRVEFPEYLTGSLSGRDYRTNAAMHVGAAIVICEDIEKFFPATSRERVLDIWRNFFCFSEDMANLLTSLTTNDGSLPEGAITSSYLANLAFWNQEPRLQAKLAQKNIVYSRYVDDISVSSKQFMPKEEQTALIAQVYGMLKRHGYKAKRRKHEIFTSGRRMLTTKLMVNRKPALQPKDRQNIRAAVHALEQRIASGESGAEIKTELNRVTSRVGRLGTLHATEAIPLKLRLRNVRQSLQAAILQHTPLIGEPE

SEQ ID NO: 3754 - protein, 320 aa, unidentified
  source 1..320: note = Related to MGXC01000124.1; note = Gallionellales bacterium RIFCSPLOWO2_12_FULL_59_22
MTPPLLKPKYDLKPIRDISALALSLGMPEKLLIDVAAQADTLYRKAKPIVKPDGSIRRPFDALPPLKPIQRRIKDRILKRVEFPEYLTGSLAGRDYRTNAAMHAGAKIVICEDVEGFFPSTKRERVMDIWLNFFRFSEDVANLLTSLTTKEGELPQGAITSSYLANLAFWNQEPRLQAKLAKREVVYSRYVDDIAVSSKQTLTKEEQTALIAQIYGMLKRQGYKAKRRKHETFTSGRRMLTTKLMVNRKPALQTKERQNIRAAVHALEQRIASGERGLGIKTELNRATSRVGRLGTLHPTEAKPLKLRLSHVRHLTNNRM

SEQ ID NO: 3755 - protein, 337 aa, Lysobacter sp.
  source 1..337: note = Related to JAKJPO010000009.1
MSDPQRRPRYPHQRIQSVASLSAALNVPEGELAAIAKIASSQYRKAKPITKADGSVRQPWDALPPLKRVQKQIQAKLLRRVEYPYYLTGSLPGKSPRENASLHTKPAIIITEDIARFFPTTRAELVHGVWAGLFGFSEEVAGILTALTTKDGFLPEGAPTSSYLANLVFWDCEPRIVDQLAQLDATYSRYVDDVTVSSSKALTPVEIARCMAIVYGMFGSRGYKAKRRKHEIVRANAPMRVTKLVVNKRPALPKADRKAVRAAVYKLEGIVNSGQPLPDDIQTLLNSASGRVSRLGQFHPTQAAPLKARIATIRERLAHLNDSLALTGHGQKTPSKS

SEQ ID NO: 3756 - protein, 339 aa, Caballeronia sordidicola
  source 1..339: note = Related to MTHB01000236.1
MSFRYNANPIRSLAVLAIALDVTEYELLRLSNRADDLYRKAKPIRKPDGSFRQPYDALPQLKHVHRRIKERLLVNVHFPAYLTGSLPGKSPKANASFHVGAKIVICEDVQKFFPSTRATLVHDIWMGFFGFSQDVATILTKLTTRFGALPEGAITSSYLANLVFWRLEPGLHEQLSIRGIAYSRYVDDICVSSKEFLPDIDKSAAISEIYTMLGRLAYTAKRKKHEIQTSGHQMFATKLMVNRRVAIPHSERHNLKSAVFQLEGKFKHGARDVAFFEELSRTTNRVGRLGQFHMQEATKLKERLKKLRMRLDSEPVVITPSVQTAATIMSAAKAEAPWD

SEQ ID NO: 3757 - protein, 349 aa, Massilia phosphatilytica
  source 1..349: note = Related to NZ_PUIP01000011.1
MKKPPNSDKSIPYYPCEPIHSIAALEMALGIPERWLKRIAAAANQSYRLAAEEIKKDGSKRQTFDAYPRLKYAQRRIKDRILSRVEYPDYLNGSLKGRSPRKNAEAHVGAKITIGEDIANFFPTISSTLVKAMWCGLFGFSEEVANLLTLLTVKDDGVPQGAVTSSYLANLVFWAREPQLYKQFQRRGYQYTRYVDDISVSCKRRITDSEKSEIISSVYAMLRSAGVQPKRQKHEVHTAGARIVTTKLVHNVRVALPKEMRRGIRTSVFQLEARAAFGEHDEALHKELLTVSSRVGLLNSFHPSEGAPLKARLKKLRKMIEDAAQGLQRTQDVGRQAVGISNSEPAPWD

SEQ ID NO: 3758 - protein, 324 aa, unidentified
  source 1..324: note = Related to JACYUQ010000006.1; note = Oxalobacteraceae bacterium
MKKSLKIDGLAPSYPHEPIYGIAALSRALGVREMRLQRVAQMANDLYRLASEETKLDGSKRQTYDAQPLLKAIQKRIKDRILVRVICPPYLNGSLKRRSTRTNAEPHVGARIVFDEDIANFFPSIRPEIVKRMWLGLFGFSNDVSTLLTLLTVKDQGVPQGAVTSSYLANFVFWAHEPSLVRRFAAQRLAYTRFVDDISVSSKAVVAPQAKSLVISEIYGMLSRHGLEPKRAKHKISTRRDRMTTTKLVINERVSLPKERRRNLRAAVHKLEQRAAFDQYDESLLKEINKVAVKVGQLKGYHVAEGTQLKERLRSIRSRVLLSL

SEQ ID NO: 3759 - protein, 344 aa, Herbaspirillum huttiense
  source 1..344: note = Related to CP037993.1
MMSEFPNYPHQRIGTLDALARVLAVPKDHLLTVASRAEVLYRIAAQEQKADGSIRQTFDAKPKLKEIQRNIKERLLQKVKFPPYLQGSLKGRSPRLNAESHKGAHLSISEDIQNFFPSVGRDHVMSIWRDFFRFSDEVSELLTALTVKDDGIPQGAITSSYMANLVFWDYEPRLVEQLAAMGLTYTRYVDDVIVSSRHHLTKEVQSLVVAKIYGMLGRYSLRPKRAKHEVSTRSKRMTATKLVINKRVALPKETRQNIRAQVFAIERRVLDGDRGADLVKALASASSRVGRLASMHPTMGQGLKARLKVVRTTLASESPPEAFQVAVASRVPQSVEEDFVPPWV

SEQ ID NO: 3760 - protein, 330 aa, Massilia sp.
  source 1..330: note = Related to NZ_JPXI01000042.1
MKKTTIEPGLAPLYLHSAIRGLAALSKALGVRQNVLEKLALSAETLYRVARSEVKSDGSIRQTYDALPRLKAVQIRIKERLLQRVIFPSYLHGSLRERSPRTNAATHIRAKITFAEDISNFFPSASRALVHRVWKDLFGFSEDVAALLTTLTTKDGGLPQGAVTSSYLANLIFWDYEPDLVKTLALRGLRYSRYVDDITVSSRLGIKASDKTYVISQIYGMLLHHGFTPKRKKHEITSAAKSMRTTKLVHHTRVSLPITERKKTRAAVYALELRVSAGESGPGVMKELASVSTRVGRLGSFHKTQAMALKKRLDVVRATLNTFEASPTVS

SEQ ID NO: 3761 - protein, 336 aa, Burkholderia cepacia
  source 1..336: note = Related to NZ_LR890523.1
MDRPIYKHRPVQTISALARALRISESLLLGIAGRATDLYIGPKPKPKKNGGIRYVFDTKPPLKSLLRRINGTFFKHTQFPKYLTGSLSGRDFVANVEIHRDARNAVTEDIAQFFDCISAECVYRIWKDFFHFGDEVAELLTKLTTKDGRVFQGTPTSSYLANLAFWDRECALVEKLKARGIRYSRYVDDITISTVSPLAKGDKRWAISQIYAMIGTAGFKPQRSKHGSFSASSPIRIMGLNANRAPTLPKQERSAIRAQVYQLEQRVAQADQSDDLRAALSAAIGKVGRLKRLHPSEGTALRLRLDAIRRTLDAQPVVTHATIPIQVSDEAASTPF

SEQ ID NO: 3762 - protein, 336 aa, Burkholderia multivorans
  source 1..336: note = Related to JAHPOI010000008.1
MDRPVYKHRPVQTISSLARALRVSESLLLAIGERSADLYIGPKPKPKKNGGIRYVFDTKPPLKSLLRRINATFFKHTHFPKYLTGSLSGRDFVANVEIHKDARNAVTEDIAQFFDCISADSVYRIWKDFFHFSDEVAALLTKLTTKDGRVFQGTPTSSYLANLAFWDREFALVEKLKARGIRYSRYVDDITISTTSALTEENKRWAISQIYAMIGAAGFKPQRSKHGSFSASHAIRIMGLNANRSPTLPKQERSAIRAQVYQLEQQIVQANSGPELRAAVSSAISKVGRLKRFHPREAEALRIRLNAIRQILDARPVVTNASVPVEVTEDVGAAPF

SEQ ID NO: 3763 - protein, 336 aa, Paraburkholderia oxyphila
  source 1..336: note = Related to NZ_BAYD01000021.1
MDHPIYKHRPVQTISSLARALRISESLLLGIAGRATDLYIGPKPKPKKNGGIRYVFDTKPPLKSLLRRINATFFKHTQFPKYLTGSLSGRDFVANVEIHRDARNAVTEDIAQFFDCISADCVYRIWKDFFHFGDEVAALLTKLTTKDGRVFQGTPTSSYLANLAFWDREFALVEKLKARGIRYSRYVDDITISTVSTLAEGDKRWAISQIYAMIGAAGFKPQRSKHGSFSANSPIRIMGLNANRAPTLPKQERSAIRAQVYQLEQRVAQADQSVDLSAALSAAIGKVGRLKRLHPSEGAALRLRLDAIRRTLDAQPVVTHATTPIQASNEVDTAPF

SEQ ID NO: 3764 - protein, 337 aa, Ralstonia mannitolilytica
  source 1..337: note = Related to CP049132.1
MDRPTYPHERIQSIQSLCCALGLSEPTLRAIASRAPNLYIGPKPKPKKNGGIRYVFDTKSPLKPLLKKINSVFFRRVVFPQYLTGSLSGRDFVANVDVHRNSRQAITEDIAQFFDCITADHVYRIWRDFFAFGEDVADLLTRLTTKNGRVYQGTPTSSYLANLAFWDREPILVEKLATRNIRYSRYVDDITMSSVGVLEADDKSWAIAQAYAMIGANGFKPQRTKHAAFEGGSPIRIMGLNANRHPTLPKQERAQIRALVFQLEQSLARGDTGAVFRSRLNTASGKVGRLKRLHSREGEALRLRLNKIRRVLDVLPLVTCPTTPPGERVQGEDAAPF

SEQ ID NO: 3765 - protein, 314 aa, unidentified
  source 1..314: note = Related to JAIENU010000130.1; note = Burkholderiales bacterium
MLRSIIQRAHNLYIGPKPQVKKNGGVRYVFDTKPPLKPLLKKINSIFFRRTHFPPYLTGSIAGRDFIANVEVHKGARVVITEDIAQFFDCITEQHVYRIWREFFRFSDEIADLLTHLMTKDGRVFQGTPTSSYLANLAFWDFEPQLVNRLAARGIRYSRYVDDISISTTNDLSDSEKRWVVAQIYAMIGRGGFKPQRSKHQYLSSARPITIMGLNANSSRAPTITRRERSRIRALIFQLEQRFASGETGPEFRQSLSHAIGKVGRLKRLHKVEGAALRTRLDTIQAALDALPVKTKASAKFESPPADAIDDHPF

SEQ ID NO: 3766 - protein, 336 aa, Herbaspirillum frisingense
  source 1..336: note = Related to NZ_CP083589.1
MTKGPAYRYAPILSIQALCRALGCNEPFLRSLAERASGMYIGPKPMQKKSGGIRFVYDTKHPLKDVLKKVNRVFFKKTHYPTYLTGSLDGRDYSTNAGIHAGATGAITEDISQFFPSITADMVYEIWTKLFRFGHEPAMLLTALTTKDGVVFQGTPTGSYIANLVFWSTEHIVVEKLQSLNIRYSRYVDDVTLSKASTLSLDEKTWAISQIYSMIGAQGFKPKREKHGILSGKGAIKIMGLNANAKVSLPRKERSLIRAKVHALEKRFESGEIDFSFRTELNKVSGVVGKMSRFHKHEASQLRGRINVIRRSIELIPIITIGSQYPRTVLPQDVQN

SEQ ID NO: 3767 - protein, 381 aa, unidentified
  source 1..381: note = Related to JAFKGG010000183.1; note = Burkholderiales bacterium
ALGHRPFYELIEQLLRNRRFNNLRCGLAFAWHTDSSSSWYASNTKVLTGSHDPIQSVGSLCRALAIAEPLLCSIAERVPNLYIGPTRKPKKSGNGFRDVYDTRLPLKPLLKRINKVFFERVVFPDYLHGSIRSCDFISNARMHEGSVTVITEDIKGFFDHITEEHAYAIWRRFFGFGEVPSELLTKLVTNGGRVYQGSPTSSYLANLVFWDIEPRMVETLGVRGLRYSRFVDDVTMSHPTSIGTEEKTWAIAQVYAMLGSHGFKPARQKHAIFNGSASRTIMRVNVNEHLTITPAERRQVRAMVHQLEQRVRSGENTSEVRQLLSSAIGKIGRIQRLHPSYAEKLRVQARGIQLTLDEMPFSTESQASFIASQADEGDSPF

SEQ ID NO: 3768 - protein, 313 aa, unidentified
  source 1..313: note = Related to nan
MQYLSYTKENRIQNISSLCLALKIKQDDLLEIANNVQNYYKPPYFIEKKNGGQRCIIDTVDPLKPLLKSINKVFFKNVYFPDYLTGSISGRDYISNVKIHRNSKNIITEDITSFFDNITESHVYDIWRRFFRFSDSVAQILTQLTTKDGKIHQGVPTSSYLANLSLWRHEQHFVNDLKKKGFVYSRYVDDMTISSSNVISREDKTWVISHLIGMLSANTLRIKRSKHAVLTSNKPMNIMGLNINGSKPTTPKKDRDIIRATLHRFDKHPASFSVEDLRSLQGKIINIRRMHVSKGEKFLKQFKETLHKNHITI

SEQ ID NO: 3769 - protein, 313 aa, Hydrogenophaga sp.
  source 1..313: note = Related to JAHUZX010000055.1
MYFVAKTVLKDDGTERTLYDTRQPLKTVLHRINAHFLRQVVYPEYLTGGVPGKDYTDSVKIHVGARTVVKEDISKFYPSVSFDVVRDIWGRFFGFADEVAELLAMLTTRDGHLEQGAPTSGYLANLALWDVESKLITKLDSIGVTRYSRHVDDITLSSAEHLSSQRIDWVVRAVSAALATKGLLVHTGKHEVMQADGQIKILKLVGNAKPSLPPKERSRVRALVHNFCQRVDAGGSQEELEQLLPRVRGQAYKVKRFHLRSGGQLVERVAQAASLLEDRRSKSPPRISHIGSHLDDSDWLSEHPPVGGAPWEL

SEQ ID NO: 3770 - protein, 348 aa, Ralstonia sp.
  source 1..348: note = Related to NZ_JSZO01000019.1
MNAPRYRHHRVQSIESLRHPLGMGPSELLALAKRASHLYRIAKTVPKDDGTLRVLYDTREPLKAVLGRINEHFLRRVIYPDYLTGGVPRKDYTDSVKIHVGAKSVIKEDISKFYPSVSFDVVREIWSGFFGFADEVSDLLTMLTTRDGYLEQGAPTSGYLANLALWDIESQLIAQIASAGATRYSRHVDDITISSPEHLSTSRVDWIVRMVAGALASKGLRVNASKHEVMQAGGQIKILKLVGNAKPSLPPKERSRVRALVHTFCLRVESGESPEELALLLPRVRGQAHKVKRFHRRAGERLVEQVNQAAQLLKNQTAEAQPVKQPTPNLVFDEAIAGQQPPESDPPW

SEQ ID NO: 3771 - protein, 323 aa, Cupriavidus sp.
  source 1..323: note = Related to NZ_CP017751.1
MNEAKYLRRRVRSIEALRHPLGMGPRDLQRLALRASSLYFVATTMPKADGTLRVLYDTRKPLKSVLQRINEHFLRKVVYPPYLTGGVPGKDYTDSVKIHAGAKTVITEDISKFYPSVGLEVVRNIWSGLFGFSDEVADLLAALTTRDGHLEQGAPTSGYLANLALWDVEPALINRLTAMGVSRYSRHVDDITLSSLEPLGTSRVDWVVRTVTRTLASKGLQIHPGKHQVMDAGEQIKVLKLVGNIKASLTPEERSRVRALVHNYCKRVESGDGLEELRALLPSIRGQAHKVKRFHPRVGARLVAEVEQAAQQLQHRMVTWIKS

SEQ ID NO: 3772 - protein, 352 aa, Achromobacter aloeverae
  source 1..352: note = Related to PYAL01000004.1
MTAPRYPHDRIQSIGSLRHPLGMDARELTALAKRASRLYFVAKTIPKNDGTQRVLYDTAKPLKPVLQRINDNFLRRVIYPHYLTGGVPGKDYTDSVKIHIGAKSVIKEDISKFYPSVTFDVVCDIWSGFFGFSHEVADLLALLTTRDGHLEQGAPTSGYLANLALWDVESSLIAKLASIGVTRYSRHVDDITLSSQEHLSAARVDWVVRTVAAALARKGLLVHAGKHEVMHAGGQIEVLKLIGNTKPSLPPKERSRVRALVNNFCRRVESGDSVEELQSLLPRIRGQAYKVKRFHRRKGEQLIEQIDRVAKILRARAGEAQPNIDKLQRDMVDSYSANESFGRQSAVVDPPW

SEQ ID NO: 3773 - protein, 302 aa, Parapusillimonas granuli
  source 1..302: note = Related to NZ_JACHHM010000015.1
MEPNELLRLAKRASRMYFVAKTVPKDDGTQRILYDTRKPLKTVLHRINEHFLRRVIYPDYLTGGVPGKDYTDSVKIHVHAESVIKEDISKFYPSVSFDVVYDIWSSFFSFSNEVAELLTMLTTRDGHLEQGAPTSGYLANLALWDIEAPLVAKLASIGVTRYSRHVDDITLSSPDHLSASRVDWVVRTVATALASKSLLVHPGKHEVMHAGRRAIEVLKLVGNTKPSLPSKERSRVRALVHTFCRRVEAGDSGEELERLLPRVRGQAYKVKRFHQRIGEQLVLQVDQAAKLLRDSPSDVGSR

SEQ ID NO: 3774 - protein, 310 aa, Achromobacter xylosoxidans
  source 1..310: note = Related to JAKLXU010000051.1
MYFVAKRIPKEDGTIRVLFDTRQPLKAVLQRINSQFLRKVHYPPYLTGGVPGKDYVSSTRLHAHATLVIKEDIRTFFPSVHADVVLDIWERFFGFSTDVAQLLTLLTTRDGHLEQGAPTSGYLANLALWDVEARVVSQLARECELTGYSRHVDDICVSSPTPISASQKARAVSLIFGMLASKNLAPKRAKHITMHGGQQIRILKLVANRKPSLSAIEQSRIRAAVHQFCRRAANLGDPTSLRAELPKIRGLAHHLKRFHPRKGAVMLAAIDTVARALNSTDVAQSDVAPTVSTFSGPVATNAPDSQAPWD

SEQ ID NO: 3775 - protein, 318 aa, Burkholderia contaminans
  source 1..318: note = Related to CABVQR010000004.1
MSSASYPHARIQSVESLRHPLGMGPVGLRRLAKRASDMYFVAHRIPKDDGSERIVYDTREPLKSVLRRINQHILRRVVYPDYLTGGVPGKDYKSNVEIHVGAATVVKEDISSFFPSVSEVLVFDIWHRFFGFSTDVAEVLTALTTRDGHLEQGAPTSGYLANLALWDVEPNLVHRLAEEGFTAYSRHVDDIVLSSNEELEGGEIAWAVSQIYGTLRKKGLQAKRAKHEVMRLNRPIVILKLIGNEKASLPARERSRVRAVVHRFCTNIESGVDIALLEADLPSVRGLVHKVKRFHPTEGNKLVAQVEQAVQLMRASNG

SEQ ID NO: 3776 - protein, 340 aa, Spiribacter salinus
  source 1..340: note = Related to VIFK01000111.1
MVGNDPLVPRYPHRPIGSIDALARHLGVSRRELERLTRAAPRLYRANPLPKKGGGFRWTYDARPPLKRLHAAIKEKLLQPVEYPSYLQGSIRDPDTPREPLTNADLHAGNYLFIQEDVAGFFGSIGPSVVNDMWRRFFAFPADVSEILTNLTTLKGLVPEGARPSSYIANLALWDVEPQLVRELQGRGFVYSRYVDDVVISAPRNLSHEEKTEVVGRLYGMFAAKGLRAKRQKHSIAKKGQAAGKGRGVTVTGYSVAGGRAAVSKAERNRVRSAVRQIEVEARTRGTSPELQARFQSASSRVDRIARAGSAQGVRLRQRLAELKPSVFPKSNRRDIYGGG

SEQ ID NO: 3777 - protein, 315 aa, unidentified
  source 1..315: note = Related to PAQT01000005.1; note = Xanthomonadales bacterium
MRAHYPKQPIGSISALSRALDVEEDLLTHIGANVSTFYRPGPPQPKKDGTLRITHNAAPELKGIHRKINKRLLQEVQYPDYLHGSIRVINDPRSIKTNAALHTNQKTILCEDVAGFFDATTPALVRKVWQHLFCFPPTVAELLTKLCTHDGFLPQGWRCSSYLANLVLWEDEDRLVRNLRCRGFTYSRYVDDMTISAPRFLSRADKSWVVQSLISTLARNGYRLKRGKHEILKAAGTMKVNGQIVNGKRPTLSTKYRNNVRWNVYALQKMHALDASSEEYRSRWESCSGKAIRVASYHERTGQKLLDQLSAIAPQ

SEQ ID NO: 3778 - protein, 335 aa, Burkholderia thailandensis
  source 1..335: note = Related to CP013360.1
MKSLQNKPCYKNAPIKNVGALARTLRLTEPQLIQLARNASHMYRRVPVPKKDGTTRHTWDAQKQLKEVHGIINSRIFHRTTFPLFLQGGIHDPLYPRDYVRNADIHVDPSILVTLDIADFFPSTSDSAVMGIWSDFFRFPPAVAKLLTMLTTKDGFLPQGARTSSYLANLAFFRSEHDLVACLERQGWRYSRLVDDITISKQRRASDDELTQVNTTLFAFVNRHGYSVKRSKHDVQRRNARMSVNGLVVNKKVSLPKSQRRSIASVLHRTNAAIDVGEGHTMPVNRVRGQVAMVKRMHPELGEKMLARLKQSISAAESRPAIELNDCETVPLDER

SEQ ID NO: 3779 - protein, 319 aa, Pandoraea fibrosis
  source 1..319: note = Related to NZ_CP047386.1
MTEPQLLQLARNASRMYRKVPVPKKDGSTRYTWDAQKQLKEVHGHINSRIFHRTMFPLFLQGGIRDRLHPRDYVRNAEIHVDPTILVTLDIADFFPSTSDSAVMDIWSKFFRFSPAVAKLLTMLTTKDGFLPQGARTSSYLANLVFFSDEHDLVARLERQGWRYSRLVDDITISKQQRVNSDEVTETNRMLFAFVNRHGYSVKRPKHDVQRSNARTSVNGLVVNKKVSLPKPQRRSISSLLHRTNLAISIGEESTMPVSRVRGQAAMVKRMHPELGEKMLERLKQSLSVGARRPAVMPDDQEVSPPIRRQTKRKNSPGT

SEQ ID NO: 3780 - protein, 338 aa, Burkholderia gladioli
  source 1..338: note = Related to JAHPLT010000004.1
MKSPLNKPFYKNAPIKSVGALAQTLQLTERQLLQLARNASRMYRKVPIPKKDGTTRYTWDAQKQLKEVHGLINSRIFHRTTFPLFLQGGIRDQLYPRDYVRNADIHVDATTLVTLDIADFFPSTSDSAVMDIWSTFFRFPPVVAALLTMLTTKDGFLPQGAKTSSYLANLAFFRDEHDLVTRLQKQGWRYSRLVDDITISNQRRVSNDEVAAVNRTLFAFVNRHGYSVKRPKHDIQRCDARMSVNNLVVNKKVSLPKSQRRSIASLLHRTSEAIFVGEECAIPINKVRGQIAMVKRMHPELGEKMLARLKQSISAVENRPTIVLDDQEAVSSTSDAQL

SEQ ID NO: 3781 - protein, 323 aa, Paraburkholderia phenazinium
  source 1..323: note = Related to NZ_FNCJ01000045.1
MSSRPNKPSYNFAPIKDVRTLALALGLAERQLNRLAVNAGNMYRRKPIAKKDGTERVTWDAHKQLKEVQGRINQLFFHKVLFPLYLQGSIRDKAYPRDYVRNAEIHAGACVAVTLDIADFFPSTRAELVQDIWRDFFRFAPPVAEVLTRLTTKDGFLPQGARTSSYLANLVFWQREHCLVETLEKRGWRYSRLVDDITISKATDTSQAELTDINRIAIGCFQGYGYSVKRSKHKVLRRNHRITVNSLVVNVHPALPKDERRRIGAQVHQVKEALTSGTQADVPSVASTRGKIAKVVRLHPELGSRLSDKLRQAIPLDTEGSPE

SEQ ID NO: 3782 - protein, 325 aa, Bordetella avium
  source 1..325: note = Related to UFTG01000001.1
MSRPNRPLYKGDEIASSDALAEVLGLTSPQLHQLAANASKMYRENPQRKKDGSLRMTWDAHPQLKKAQKQINLRIFGRILFPLYLQGSIRDRAYPRDYARNANIHSGAAVTIAIDIQDFFPSITPDQVLSAWLGVCHFPWQVAELLTRLTTKDSFLPQGAPTSSYLANLVLWENEHELVRTLQTRGWHYSRLTDDITLSKKAPVEKDEITRTTCTAIGFIQRNGFTVKRSKLKVMKRNVPMTVNNLVINEHPALPKAERRQIRAQLHQAKLALASGALVDAQAINSARGKVGKVVRFHPQLGAKMKGELDQELDSWTVRQLNDEG

SEQ ID NO: 3783 - protein, 354 aa, unidentified
  source 1..354: note = Related to MGYT01000040.1; note = Gammaproteobacteria bacterium RIFCSPLOWO2_02_FULL_61_13
MHPNLLKPFYSHGPIQNLDTLAEVLEISCKQLCRLARKANQMYRLVPQQKKDGSVRKTYDADHALKRVQHLIKTRILSKVRYPLYLQGGIRDPENPRDYARNAAIHAGQACVINEDIADFYPSTTSHQVRDIWKHFFRFPAGVADCLTRLTTRRGFLPQGAKTSSYLANLVFWRTEYELVRHLAAKGLRYSRLADDITGSSSKPLTRGQKSEVISAVYSFIKRDGFSPKYRKHAIFERNEAMLVNNLVVNAHPALPVRERQAVRCLVHRASNTLNAGNGTVSNVPLAHIKGKIGKVKRFHARAGRRLAATLQAALTSVQKLDGSGAHHRGRVDRDHRNARRYDGHLHAPAPAGS

SEQ ID NO: 3784 - protein, 319 aa, unidentified
  source 1..319: note = Related to nan
MNRLCFRGRPIASIEALASTLHVSPRYLWWVIERTDRLYRPMKPIIKPDGSVRQTYNPAAPLKDVQRRINRNIFSRVEFPIYLQGGIRDRKTPRHCVANAQLHTNAAIVINEDIAGFFPSISRQQVQDVWQHFFRFPLAIAETLTALTTYNGALPQGAPTSSYLANLVLWRQEPELVTNLAARGIRYSRYVDDITLSSKRFLNNHLKADAVRQVRRLCNGNGFRMKGRKERIETSGKPMRVNNLQINHGVTLPKKERARIRAAVRVCEVYPAESRDSSEYQKLLNSTLGRVSRLRQLHPKEGADLMRRLTIMRGASRSK

SEQ ID NO: 3785 - protein, 319 aa, unidentified
  source 1..319: note = Related to nan
MNRPRFKGRPIGSIEALARALYVSLRQLHWAIGRADALYRPMKPITKPDGSVRQTYNPAAPLKEIQRSINRNIFSRVKFPIYLQGGIRDRNNPRHCIANAKLHCGATIVFNEDIFSFFPSITRRQVQDVWQNLFRFPPEIAEALTILTTYQGILPQGAPTSSYLANLVLWRQEPELVTNLAARGIRYSRYVDDITLSSRRFICNHQKAEVIQQVRRLCNGNGFRMKGCKERIETSGKPMCVNNLQINHGVTLPKKERARIRAAVRACEVYHSESRDSSEYQKLLNSTLGRVSRLRQLHPKEGTDLMRRLTIMTEVSRSK

SEQ ID NO: 3786 - protein, 315 aa, unidentified
  source 1..315: note = Related to nan
MNQPCFKDKPIASTAALARALHIPHRHLTWATNRADRLYRALQPMVKPDGSIRQVFNPARPLKDIQRRINRHIFGRVDFPFYLQGGIRDRKNPRHCLANAKLHSDAKIVINEDISGFFPSITKRQVQNIWQHFFRFPPDIAIILTKLTIHDGQLPQGAPTSSYLANLALWEHEPPTVEALFIKGIRYSRYIDDITLSSTYFQNDHSKTAMIRKVRSMCNRNKYEVKRSKHRIESSGQPMRINNLQINNGISLPKRERACIRAAVHSCEKHIEEERTANEYHVLFNSTVGRVNHLRQFHRHEGKRLLKRLDACAPL

SEQ ID NO: 3787 - protein, 302 aa, unidentified
  source 1..302: note = Related to JAIEPW010000014.1; note = Bryobacteraceae bacterium
MENAADSLYRPVMVKKKDGTRRECFDAKPPLKAMQARIQNMIMKKVIYPGYLTGGLADPKTPRDYVRNAEAHTGARLMVNEDVAKFFPSTTHEVVYDIWRFVFRFPKEVARTLTRLTTRCGELPQGAKTSSYLANLVFWAHEPRLVQWLHNAGFRYTRYIDDITLSSTADKTREELGQAIGRVASMLRRHGLRFKRSKHHIAYAGERMEVTGLTVGERSVGLSRKRKSMIRASVRQCEWAAKKGIFDDAMQKSAASLVGQYTRLHRNKGKALKRRLAALEVSRKLPAIEPVVSAVGIEPTTR

SEQ ID NO: 3788 - protein, 373 aa, Pseudomonas corrugata
  source 1..373: note = Related to JABFMR010000045.1
MDAPIYPFKPIHSIRALALALGESEQLLERLATRADQMYRHVPQEKKVKPGKPPEMRDTYDAHEPLKRVQRKLVDRILSKATFPPYLHGGIKDRKSPRSIHSNAAVHAGARFVILQDIRNFYPSILKRHVDALFRGLFGFGASVAALLSSICTREGSTPQGASTSGYIANLVFWDVEPKIVKGLLGRGFQYTRFADDITISCGRKPSSDELTNIVSTITGMLAAKGCHQKRTKLHLRVRGQGIKADGAIFQPVTVTGLSVFNSSPGLTKLERRRIRSAVREFEVMSESTNNWSDLESTYHRAMGRVGRLLACGHPDGAMLKERLNLVMRSYQAPLLERYQQAIVANSNTETSSLAAPPILEYSSEQDGPLPWQ

SEQ ID NO: 3789 - protein, 356 aa, Pseudomonas koreensis
  source 1..356: note = Related to SUQH01000001.1
MDAPTYPFKPIHSLRVLALALGESEQLLERLAARADRMYRHVPQEKKVKPGKPPETRDTYDAHEPLKRVQRKIVDRILCNATFPQYLHGGIRDRKSPRSIHSNAAIHAGARFVILQDIKNFYPSISIKHVDALFRGLFGFGAGVSVLLSSICTREGCTPQGASTSGYIANLVFWDVEPKVVNDLLGRGFRYSRFADDVTISSGHEPSSDDLTNIISTITGMLAAKGCHQKRTKLHIRVRGQGIEADDATFQPITVTGLSVFNSSPGLTKLERKRIRSAVRELEVMSESTSDWTVLEPKYHRAMGRVGRLLACGHPDGEALKARLNVAKRSCQIPLLERYQQAISESLAKAVEVDVE

SEQ ID NO: 3790 - protein, 374 aa, Pseudomonas putida
  source 1..374: note = Related to NZ_CP066306.1
MKAPLYPHKPIHSIRALALALGESEALLERLAARADRMYRHVPQEKKVKPGQPPETRDTYDAHEPLKRIQRKLVDRVLSKAIFPTYLHGGIRDCKSPRSIHSNAAVHAGARFVILQDIRNFYPSISKSHVHAMFRGLFGFGAGVAELLSSLCTRSGSTPQGASTSGYIANLVFWDVEPKVVSDLSGKGFQYSRFADDITISCTREPEADELTGIVSAITGMLASKGCHQKRSKLHVRIRGQALKSEGTTFQPITVTGLSIFNASPGLTKSERKRIRSAVRELELSSETTSNWVELEPMYHRAMGRVGRLLACAHPDGESLKVRLNLIKRSYEKPLLERYQQEIVEQSAREINNVSCARTLPSQPTEPVDSPPWE

SEQ ID NO: 3791 - protein, 360 aa, Pseudomonas cremoricolorata
  source 1..360: note = Related to NZ_AUEA01000002.1
MKSLALALGESEQLLERLAARADRMYRHVPQQKKVKPGMPPETRDTYDAHEPLKRVQRKLVDRLLSKAVFPAYLHGGIKDRQSPRSIHSNAAVHAGSKYLVLQDIQNFYPSISMQQVDALFRQLFGFSTPVATLLSSICTREGSTPQGASTSGYIANLLFWDVEPKIVEDLMGRGFQYSRFADDITVSCRHEPSSDELSDIVSTITGMLASKGCRQKRAKLHIRVRGQGIKADDATFQPVTVTGLSVFNPTPGLTKSERKCIRSAVRELELMSEAGSRWLDLEPVYNRAMGRVGRLIACGHPDGKAFKGRLNAVKLSHQTPLLDRYQLAATGVAESATPPVGVGLREPYSAERDGPLPWD

SEQ ID NO: 3792 - protein, 348 aa, Pseudomonas syringae
  source 1..348: note = Related to CP068034.2
MEAPIYPFRPIHSTQALALALGESEHLLERLAVRADRMYRHVPQKKKGRPGETRDTYDAHEPLKRVQRKLVDRVLSKAIFPAYLHGGIRDLKSPRSIHSNAAVHAGARFVILQDIRNFYPSISKIQVDALFRGLFGFGASVAALLSSICTRDSCVPQGASSSGYIANLVFWDVEPKVVKDLQDRGFQYSRFADDITISSGQEPSTEEISTIVSTITGMLASKGCRQKRTKLHMRIRGQGIKSNDATFQPVTVTGLSVFNSAPGLTKLERKRIRSAVRELELLRELTSDWADLEPKYHRAMGRVGRLLACGHPDGVALKSRLNVVKRSYQKSLLERYQQSENASPNSDS

SEQ ID NO: 3793 - protein, 348 aa, Pseudomonas sp.
  source 1..348: note = Related to JAFIBJ010000001.1
MEAPIYPFKPIYSAQSLALALGESEHLLERLAVRADRMYRHVPQKKKGKPGETRDTYDAYEPLKRVQRKLVDRVLSKAIFPAYLHGGIRDLKSPRSIHSNAAVHAGARFVILQDIRNFYPSISKIQVDTLFRGLFGFAAGVSALLASICTRGESTPQGASTSGYIANLIFWDVEPKIVKSLTDRGFQYSRFADDITISCIREPSSEELSDIVSTITGMLASKGCHQKRSKLHMRVRGQGIRADDATFLPVTVTGLSVFNGTPSLTKLERKRIRSAVKELEVISGSMPEWAALEPMYHRAMGRVGRLLACGHPDGEALKARLNVIKRSYQTPLLERYQQTLNAEYEGLN

SEQ ID NO: 3794 - protein, 350 aa, Pseudomonas tehranensis
  source 1..350: note = Related to NZ_JABWQV010000038.1
MDAPTYPFKPIHSIQALALALDESERLLERLAIRADRMYRHVPQEKKGKRRDTYDAHEPLKRVQRKLVDRVLSKAIFPAYLHGGIRDRKSPRSIHSNASVHAGARYVILQDIRNFYPSILKSQVDDLFRGLFGFGASVSALLSLICTRDGCAPQGASTSGYIANLIFWNVEPKIVQDFLAQGFQYSRFADDITISCSREPTSEELSGIVSTVTGMLAAKGCHQKRTKLHMRVRGQGIKGDDATFTPLTVTGLSVFNGAPSLTKLERKRIRSAVKELEVMSESTPGWAVLEPKYHRAMGRVGRLLACGHPDGEALKARLNVVKRSCQIPLHERYQQAISECLAKAVEVDVG

SEQ ID NO: 3795 - protein, 336 aa, Pseudomonas sp.
  source 1..336: note = Related to NZ_CP027732.1
MDAPTYPLKPIHSIQALALALGESERLLERLAARADRMYRHVPQEKKGKKRDTYDAHEPLKRVQRKLVDRILSRAIFPRYLHGGIRDIKTPRSILSNAAPHAGAKYVILQDIKNFYPSISVDQVEALFRGLFGFGVPVSALLSSICTREGSTPQGASTSGYIANLIFWDVEPKIVRSLLDDGFQYSRFADDITISSGRKPSSDELSFIVSTVTGMLASKGCHQKRAKLHMRVRGQGIKEDDQTFKPLTVTGLSVYNSAPGLTKLERKRIRSAVRELEIASESVRDWNVLEPMYHRAMGRVGRLLACRHPDGEALKARLNTLKHSHQKPLLERYQQV

SEQ ID NO: 3796 - protein, 370 aa, Pseudomonas viridiflava
  source 1..370: note = Related to NZ_UWCS01000683.1
MDAPTYPFKPIYSLRALALALGEDERLLERVAARADRMYRHVPQEKKGTKGEIRHTYDAHEPLKRVQRKVVDRILAKAKFPLYLHGGIRDVSSPRSILSNAMVHAGARYVVLQDIENFFPSISTHQVFRIYRDLFGFGEPVSMLLASISTREGSTPQGASTSGYLANLLFWDVEPKVVNELFIRDFRYSRFADDITISSERKPTPQELADIISTITGMLASKGCRQKRKKLHVRVRGQGVKVAEGDYEALTVTGLSVFNSTPGLTKLERKRIRSAVRELEILASSTPSWSTIEPRYHQVMGRVGRLLACGHPDGEALKIRLNSVKRLCQVPLLERYRLGLSDDKDVLELACSSASGVAPSLGVNEPLPWE

SEQ ID NO: 3797 - protein, 342 aa, Pseudomonas viridiflava
  source 1..342: note = Related to JAHRDY010000001.1
MEYPLYPHRPIHNLNSLALLLGEPLSLLIKLARNSDKLYRKVPQVKKDGTTRETFDASEPLKSIQRKVVDRLLVKVLFPNYLHGGIRDINSPRSVYSNVKTHVGARSIILQDIKNFFPSITLERVFSVFKGLMGFSDAVSNVLAHLVTRYGAVPQGASTSSYIANLVFWDVEPRLVAWIRNQKMAYSRFADDITISSFDMISDDLKTEVVRRVTGMLAAKGFAQKRQKLHVLKRGQAITKANQSEVAVITGLSVAGPRPGVTKEERKKIRSAVKEFETLALMNPDSDRLKELYNRAMGRIGRLLACGQSDGFALKQRMNIAFEKTKKSIFVKHAFIENTVPD

SEQ ID NO: 3798 - protein, 343 aa, Pseudomonas sp.
  source 1..343: note = Related to NZ_AZRW02000052.1
MDSPLYPYKSIHNIKSLALLLGETVPLLNKLAEDSHKMYRRVPQVKKDGSERETFDAHEPLKSVQRKIVDRLLAKVSYPDYLHGGIRDSNYPRSIYSNVKSHSGARNLVLQDIKNFFPSITIDKVLSIFKGMMGFGDEVAVMLTRLVTKGGIVPQGASTSSYIANLVFWNVEPRLVVWIRALGMSYSRFADDISISSKNIILPDQKTEIVRRVTGMLAAKGFLQKRQKMHVLKKGQTITTAKKPEPVVVTGLSVAGPRPGVTKEERKKIRSAVREFEILAEAGADLIKLRELYNRAMGRVGRLLACGQSDGLALKNRLNLAMRQCNKPLLEKYEKGEVGGISI

SEQ ID NO: 3799 - protein, 348 aa, Pseudomonas sp.
  source 1..348: note = Related to NZ_CP016849.1
MDKPRYSQKPIFNIESLALRLGESPMLLNNLARNSHRLYRTVPQQKKDGSVRETFDAHQPLKAIQRKIVDRIFSGVIFPDYLHGGIRDVNSPRSIYSNVACHAGARVVLMQDIKNFFPSITEDKVLGVFKGVLGFGDDVSSLLVKLTTRRGVVPQGASTSSYLANLVFWDVEPRLVTWVKANNLSYSRFADDITISSKGDVRDELKTDVIRKVTGMLASKGFYQKRQKMHVLKKGQVIVTKGGVEPFVITGLAVSGPNPGVAKFERKKIRAAVKEFEDLIGSGVFVSDVENKYNSAMGRVGRLIACGQSDGIILKERLNAARLKASVPLLEKYLAANIIPVVQAKVEE

SEQ ID NO: 3800 - protein, 347 aa, Pseudomonas chlororaphis
  source 1..347: note = Related to NZ_CP027722.1
MTTARYTRKPVYSLKTLGLMLGESPELLLRLGASSSGFYREVLQQKKDKSVRVTFDAFQPLKRVQRKIVDRLLIHVSYPSYLHGGIRDVDSPRSPLSNARAHLGAKSIALQDITNFFPSISRDKVRNIFTGLFGFGSGVAELLSLLVTKDGFVPQGASTSSYLANLVFWDVEPRLVSWIHSQNLIYTRFADDITISSKVLVSDEQWTEIISKVTGMLATKGFKQKRTKLHVLKKGQALTKGNKPEPLVITGLGISGSSTGVVKAERHKIRAAVRQFEAAIESGSSFDEVAHLYHSAMGRVGRMLACGQPSGFEFKKRLNEAKRLGQISLIDKYIAETSAVSDEEVRG

SEQ ID NO: 3801 - protein, 346 aa, Pseudomonas sp.
  source 1..346: note = Related to NZ_AP014637.1
MDAILYHCRPIYSLKSLALALGESVEFLGWLACQADSLYRPVQLVKKDGTPRYAYDARADLKKVQRKIVDRILARVVYPKYLHGGIKDADFRRSIYSNANLHTGAKSYIVQDISNFFPSISFAKVYDVFSLFFNFGHVVAHLLTRLVTRAGVVPQGASTSSYLANLVFWDVEPEVVLGLKEKGFCYSRFADDITVSSPSALSADEKTEIVTKVTGMLARKGFKQKRSKMHVLKKGQAIALSNGKYEPALITGLSISGPKPVITKKERNRIRGLVKNYQALIDMGRPDSELEKVFHKVMGQVGRIIACGQAEGAELKKTLNEARRLSKKSIFERHDSLINASESSQA

SEQ ID NO: 3802 - protein, 371 aa, Pseudomonas orientalis
  source 1..371: note = Related to NZ_LT629782.1
MDAPFYPHSSINSIKALARALGEPAERLLALAQRSSRLYRYVPQTKKDGITPRHTYDAHEPLKTIQRKIVDRVLSKVTYPEYLHGGIRDPKLPRSIYSNARIHIGAKTVILQDIADFFPSITTEHIQRLFVGLFRFSADVASLLASLVTREGQVPQGASTSSYLANLVFWDIEPALVTRFKAQGMAYSRFADDITVSSKTRIASAATTQVIASVTWMLGQKGCLQKRSKLHVRKRGQALITGEKAEAVTVTGLVVNGPIPALPKKARLAIRSAVKQLEDRVRGNSGQLSAEDDKEVRRVMGRIGRLIACGHPEGPRLKARVRVLLARTPLFKRYAAGVEIQPLVVADTPLGLNAVANTLPHGQRELPWYTE

SEQ ID NO: 3803 - protein, 373 aa, Pseudomonas syringae
  source 1..373: note = Related to CP074410.1
MDAPFYPHSPIHSVKALARALGEPAERLLALAQRSSRLYRYVPQTKKDGVTPRHTYDAHEPLKTIQRKIVDRMLCKVIYPEYLHGGIKDAKLPRSIYSNARVHIGAKTVVLQDIADFFPSITTEHIHRVFVGLFRFSPVVATLLASLVTREGQVPQGASTSSYLANLVFWDVEPALVKRFAAQEMAYSRFADDITVSSKTHISPIATTQIIASVTWMLGQKGCLQKRSKLHVRKRGQALITGDKADAVTVTGLVVNGSIPALPKQARLAIRAAVKQLEDRVEGNSGQLSAEDEKEVRRVMGRIGRLIACGHPEGQRLKARVRAVLTKETLFKRYTADPEFHPHVVAATSEKRGVPVSSIGSIKPLRDPPWNKE

SEQ ID NO: 3804 - protein, 371 aa, Pseudomonas tritici
  source 1..371: note = Related to CP077084.1
MDAPFYPHSPIHSISALARALGEPVERLIALAHRSSRLYRYVPQTKKDGITPRHTYDAHEPLKTIQRKIVDRILSKVAFPGYLHGGIRDPKLPRSIYSNARVHTGAKTVILQDIADFFPSITNEHIHRLFVGLFRFSADVATLLADLVTREGQVPQGASTSSYLANLVFWDIEPALVTRFKAQGLAYSRFADDITVSSKTRIDQATTSQVIASVTWMLGQKGCLQKRSKLHVRKRGQALITSDKADAVTVTGLVVNGPIPALPKKHRMAIRAAVKQLEDRFEGNSGQLSADDEKEARRVMGRIGRLIACGHPEGQRLKARVRVLLMRAPLMERYADTEFQVQMVAETTADLDVAASSLQIDLPVDLPWKVG

SEQ ID NO: 3805 - protein, 362 aa, Pseudomonas fluorescens
  source 1..362: note = Related to MOBU01000006.1
MDAPLYPHSPIHSINALARALGEPAERLLALAQRTSRLYRYVAQTKKDRITPRHTYDAHEPLKTIQRKIVDRMLRKVVYPRYLHGGIRDRKLPRSIYSNARVHTGAKTVILQDISDFFPSITTEHIQRLFVGLFRFSADVASLLANLVTREGQVPQGASTSSYLANLVFWDIEPALVTRFEAQGLAYSRFADDITVSSRSPISAAVTTQVIASVTWMLSQKGCLQKRSKLHVRKRGQALLSGESAEAVTVTGLVVDKPIPGLPKKVRLAIRAAVKQLEDRVKGDLRQLRAEDEKEARRLMGRIGRLIACGHPEGQRLKARVRVLLTRAPLLESYAADADHQPRLPAAKLPSSYPDTPTISDQ

SEQ ID NO: 3806 - protein, 373 aa, Pseudomonas protegens
  source 1..373: note = Related to MOAT01000002.1
MDVPFYPHNPIHSVKALARALGEPVERLLALAQRSSRLYRYVPQTKKDGITPRHTYDAHEPLKTIQRKIVDRMLCKVTYPGYLHGGIKDAKYPRSIYSNARVHTGAKTVILQDIADFFPSITTEHIHRIFVGLFSFSAEVATLLANLVTRDGQVPQGASTSSYLANLVFWDIEPALVIRFKAQGLEYSRFADDITVSSKARISPAATTQIIASVTWMLGQKGCFQKRSKLHVRKRGQALITGEKAEAITVTGLVVDKPIPALPKKARLAIRAAVKQLEDRVHGYPGQLSIEDEKEVRRVMGRIGRLIACGHPEGQRLKTRVRALLTRAPLLERYVADAEFQPQMVAATSGELSVMAASALPIDLPLDLPWEAG

SEQ ID NO: 3807 - protein, 384 aa, Pseudomonas putida
  source 1..384: note = Related to JAJSRK010000022.1
MEAPLYPHSPIYSVKALARALDEPFERLVALAKRSSRLYRYVPQFKKDGITPRHTYDAYEPLKTIQRKIVDRILSKVNYPRYLHGGIKDAKQPRSIYSNARVHAGAKTVILQDIADFFPTITTEHIRLIFTGLFRFSEDVGALLAALVTREGQVPQGASTSSYLANLVFWDIEPALVARFKAQGLEFSRFADDITVSSKSNLRDAVTAQIISSVTWMLGQKGCQQKRSKMHVRKRGQALLRTEKAEAVTVTGLVVDRPTLSLPKKERMAIRAAVKQLELRVVGHQGQFSEEDDREIRRVMGRIGRLIACGHPDGQRLKSRVRALLMAAPLLDRYMGSDEVPVVMLASTDELVSTESAAVEDLDLPWDVNELSLACKQRSQGSET

SEQ ID NO: 3808 - protein, 353 aa, Pseudomonas guariconensis
  source 1..353: note = Related to JADLJL010000006.1
MEVLRYPYSPIHSLNALARALDEPAERLVAIAKRSSRLYRYVPQKKKDGITPRHTYDAHEPLKSIQRKIVDRMLTKVSYPDYLQGGIKDARNPRSIYANARVHAGSKVVILQDIADFFPSITVAHVREVFSKLFGFSHDVAQLLANLVTREGQVPQGASTSSYLANLVFWDIEPALIERLKAKGLRYSRFADDITVSSKAEITQDSVTQIIGSVTWMLGQKGCRPKRSKLHVRKRGQALISDEKINAVTVTGLVIDRSFPGLPKKERMAIRAAVKQLEDSACEWPEGPPAEEKKAIQRLMGRIGRLIACGHPDGQRLKARVRTVTRLVPLIERYTPNVVESVTLNQTAQDPAQ

SEQ ID NO: 3809 - protein, 345 aa, Pseudomonas sp.
  source 1..345: note = Related to JABWRM010000011.1
MDALHYPHSPIYSVSALARALGEPTERLIALAKRGSRLYRYVPQTKKDGKTPRHTYDAHEPLKTIQRKIVDRILSKISYPCYLQGGIKDVHAPRSIYANARVHAGSKSIILQDIADFFPSITVAHVRQVFSKLLGFSDEVSELLADLVTREGQVPQGASTSSYLANLVFWDIEPALAERFNAKGLRYSRFADDITVSSKTDMPQEVATLVIGSVTWMLGQKGCRPKRSKLHVRKRGQALISGDKVDAVTITGLVVDGSSPSLPKKERMAIRTAVKQLEDSARDWVGGPPLEMQKDIQRLMGRIGRLIACGHPEGLRLKARVRLVTRRGPPLEQHTQIAGNIEVHS

SEQ ID NO: 3810 - protein, 371 aa, Pseudomonas putida
  source 1..371: note = Related to AP015029.1
MEAPLYPHRPIYSLKALSLALAEPEALLVAIAKRSSNLYRYVPQKKRDGSPRDTFDAFEPLKAIQRKIVDRILIKVKYPVYLHGGIRDVAQPRSIYSNARSHAGSKSIILQDIKNFFPSITTAHVKEIFSGFFGFSSEVSSLLAALTTRAGQVPQGASTSSYLANLVFWNVEPALVKQLGSEGLAYSRFADDITVSSKSEILPEAKSRIISAVTWMLSQKGCQQKRSKLHIRRRGHSLLEVSEPGAVTVTGLTVDRASPGIPKDERRLIRAMVRRIELQAAAEPGPLSIDLEREVRRLMGKVGRLIACGHPDGLRFKARLRTLLVRVPVLERYADTLPINEIEALTSNSDVQDGGIFIPPWEIETPTTDRV

SEQ ID NO: 3811 - protein, 375 aa, Pseudomonas putida
  source 1..375: note = Related to NZ_KZ987399.1
MDAPLYPHRPIYSLKALSLALAEPEALLVAIAKRSSNLYRYVPQKKRDGSRRDTFDAYEPLKAIQRKIVDRILTKVKYPAYLHGGIRDAVQPRSIYSNARSHAGSKSIILQDIKNFFPSITTAHVEEIFSGLFGFSNEVSSLLAALTTRAGQVPQGASTSSYLANLVFWDVEPTLVKQLSSEGLAYSRFADDITVSSKSEIPPIAKSRVISAVTWMLSQKGCQQKRSKLHIRRRGQSLIQVNEPGAVTVTGLTVDKVKPGIPKDERRLIRAMVKRIEIQAAAEPGPLSIDLERECRKLMGKVGRLIACGHPDGLRFKARLRALLVRLPVLERYTEASPDHENGVVVRGTADQYSSEYGDVIIPSWDIDVPSAHGV

SEQ ID NO: 3812 - protein, 349 aa, Pseudomonas fluvialis
  source 1..349: note = Related to BMDE01000009.1
MDAPRYPCKSIHSLKALSLALGEPVELLLSLAKRSSNLYRHVPQTKKDGSVRHTYDAHEPLKKVQRKIVDKFLARVRYPDYLHGGIKDPNSRRSIYSNARIHGKAKTILLQDIKDFFPSIGVQHVQQIFSGLFGFSDEVAQVLALLTTRHGVVPQGASTSGYLANLVFWDTEPALVARLHARGLKYSRFADDITISAMTTLERSALTGLVAAVTDMLAKKGCQQKRTKLHIRKRGQSLLAKPKVEAGYEPLTVTGLSVFNEAPGLPKAERKAIRAAVKQAEDQASQGASWAQLEPTFRSVMGRVGRLIACGHPDGERYKLRLKALKTRCQVPLLDRYAAAATGADVPVV

SEQ ID NO: 3813 - protein, 328 aa, unidentified
  source 1..328: note = Related to PARA01000024.1; note = Pseudomonadales bacterium
MDAPRYPYKPIYSLKALSLALGEPVELLKSLAKRSSSLYRHVPQTKKDGSVRDTYDAHQPLKAIQRKIVDKFLARVRYPDYLHGGIKDPSSPRSIYSNALTHGKAKTILLQDIKDFFPSIRVQHVEHIFTGLFGFSEEVAQLLALLTTRNGVIPQGASTSGYLANLVFWDIEPTLVSRLNLRGLKYSRFADDITISAMMPLDGLVLTELVGAVTVMLAKKGCQQKRSKLHVRKRGQTIQAKAGFEALTITGLSVFNAAPSLTKAERKAIRAAVKQVEDQATQGGSWGQLEPTFRSVMGRVGRLIACGHPDGERYKQRLKSVQEHCYKK

SEQ ID NO: 3814 - protein, 348 aa, Pseudomonas laurylsulfativorans
  source 1..348: note = Related to NZ_MUJK01000005.1
MDAPLYPFKPIYSLKALSLTLGEPAELLESLAKRSSNLYRHVPQTKKDGTPRDTYDAYEPLKAIQRKIVDRLLARVRFPGYLHGGIKDPVKRRSIYSNAHIHGRAQCVVLQDIKDFFPSIKTQHVQQLFVGLFGFSETVAGILALLTTRHGVVPQGASSSGYIANLVFWDIEPALVAKLNTQGLNYSRFADDITITSTKPLDSSALTSIVSAVTNMLAQKGCYQKRSKLHIRKRGQTVLSKNGFEPLTVTGLTIFNAVPGIPKAERKAIRSAVKQLEDQATQGMTWSELEPLVRRVMGRVGRLIACAHPEGDRLKQRLHALKARSQVALLDRYAAALQDATVTGQIPG

SEQ ID NO: 3815 - protein, 300 aa, Pseudomonas agarici
  source 1..300: note = Related to FOAR01000004.1
MIGLISFWGQEMDAPLYPFKPIYSLKALSLTLGESVELLESLAMCSSNLYRYVPQEKKDGTPRDTYDAFQPLKSIQRKIVDRLLARVRFPAYLHGGIKDPVNRRSIYSNAKVHGNAKFVLLQDIKDFFPSIKVQHVQQIFERLFGFSEEVSKLLALLTTRNGVVPQGASSSGYLANLVFWDVEPMLVARLEAQGLNYSRFADDITISSLTPLNSVMLTKLVSAVTGMLAEKGCYQKRSKLHVRRRGQTLKMKVIDEFVPLTVTGLTIFNQIPGIPKAERKAIRAAVKQLEDQATQGRTWT

SEQ ID NO: 3816 - protein, 342 aa, Pseudomonas stutzeri
  source 1..342: note = Related to WIGH01000001.1
MNSALLYLDKHKMDFPSYPCSPIYSLNALSRLLGEPLDVLTRIALKSDSLYRHVPQRKKDGTPRPTYDAHEPLKKIQKKIASRILNRIIYPQYLHGGVKDLKSPRSIYTNCAPHLGKNLIILMDIENFYPSISREHVFSIFNKCLGFSSDVSLLLSTLLTRNNQVPQGACTSSHLANLVFWDLESTTFSYLEENEFTYTRFADDITISTDANKDKKQTGEAVSKVIAMLARKGCRLKRTKFHIRRRGQAIVKDEKLTPITVTGLSPFNKHTLAITQRERNKIRSSVKKIEIRAHAGESWKDLAPSYNRAMGRVGRLISCRHPEGDRLKRRLQMLKTYFEAAV

SEQ ID NO: 3817 - protein, 327 aa, unidentified
  source 1..327: note = Related to nan
MELPKYPNAPIYSINSLSRMLSEPPSALQKLSAKADTLYRSVPQKKKDGSPRETFDAYEPLKSIQKKIALRLLNKTKYPSYLHGGVRDPSSPRSIYSNSRPHLGSCHIILLDIKDFYPSITKSHVTNIFQNFFGFSSDVSDTLSRLLTKDGRVPQGACTSSHLANLIFWDVEPQLVHDLQANGFNYTRFADDITISSASNRDNKTTGEVVSKVISMLKSKNCHLKRSKFHIRSRGQSITGKDGEKFPLTITGLSIYNKSKPSISQHDRNNIRSSVKEIEVKTHEGATWSEIAPLYNRAMGRVGRLISCGHPEGTRLKNRLRMVKNCF

SEQ ID NO: 3818 - protein, 356 aa, Pseudomonas aeruginosa
  source 1..356: note = Related to NZ_CP089067.2
MDAPYYPCKPIYSLRALSLFLGEPAETLLRLSKNADHMYRLVPQKKKDGSLRETFDAYESLKRVQKKLVSRMFGRVRFPAYLHGGIRDFNSPRSIFSNAGVHAGAKTVVLQDIEDFFPSIRFEYVYSIYQGFFGFEHSVAEVLARLTTKHGCVPQGACTSSYIANLVFWDVEPIVYRALAEKGVRYTRFADDMTISSAIELSNDDIGDVISRIVSMLRSKGCRQKRSKLNVRRRGQGLKKAEGFESLTVTGLTVSNFHGVGITQKERNKIRSSVKEIEIKAHMDMPWSDLEVLYQRAMGRVGRLLACKHPEGERLKNRLNTVKSFYDVSNVRETKVVMGDKFVVLDASGDVPPWVG

SEQ ID NO: 3819 - protein, 343 aa, Chromohalobacter salexigens
  source 1..343: note = Related to NC_007963.1
MEHTYYPHHPINSLKALNRALGIDEDEIFHALSNISYKEVPIKKKDGAIRVTYDATSALKVVQKKVTSNIFHRVNFPHYIHGCIRDTKTPRNIYTNAYPHAGCKQVILCDIKDFFPSIKAKTVFFIFRHCLGFSPNVSQRLTDLCTYNGTLPQGASTSSYIANLAFWDVEPLLVKKLESLGLTYTRFADDITISAKKSISKSLKTQVLHEVRRTIRKRGCSLKKNKTIVLKRSQVIIGKDKETQETTRNPITVTSLSIHHSSVTISKVERRKVRAFVDKLSKTEFNRVSYHEWCRRYSSAMGRVSRLISCGHKEGEPLKQRLKALKDEHKKFHQRSSNVSGRK

SEQ ID NO: 3820 - protein, 343 aa, Halomonas sp.
  source 1..343: note = Related to NZ_CP022134.1
MDKIQYPHSPINSLKALHRALRVDESVMSNALQNINYKEVPLKKKDGTTRITYDAAPALKAVQKKITSQIFHKITFPYYIHGCIRDANNPRSIYTNASPHAGKKNIILCDIKDFFPSIKEKTVFFIFRECLSFSPEVSQKLTELCTYNGTLPQGASTSSYIANLAFWDIEPLLVEKLSSFGFTYTRFADDITMSTDKPISTTLKTQALHEVRRAIRKRNCSLKKRKTMVLKRGQVIKGIDEKKQKPTDSPITVTSLSIHHKNLAISKQERRKVRACVYNLEKTNMEEISYQEWCRRYSSAMGKVSRIITCGHKEGEPLKQRLKKLKDVHKRHHLRSSKVSGRK

SEQ ID NO: 3821 - protein, 320 aa, Halomonas sp.
  source 1..320: note = Related to JAHCLU010000015.1
MRSRCELTSTYPHNAIIDPEHLALLLNTPPEKLKDIANVASGSYRPVPQMKKDGTPRMTYDAYPELKRIQHQIVKKILRKVRFPRYLHGGIRDTDFPRDHVSNAALHTGATILVLDDIADFYPSLDRQLVFTTWLRFFGFSPEVSELLTNLTTRHGVVPQGARTSSYLANLAFWDKEAQLVEDLGNIGLTYSRFVDDVTYSSHRQILNSTIGNARAKVYRMLASKGCRPKRSKSHVCRKGQKLEVTGLVTAGSSPTIDKDERKRIRSAVHNLEKAVGKEGMTPENRKKWDSAKGRVGRLVRLKHPESRKLSQRLDAIRQG

SEQ ID NO: 3822 - protein, 318 aa, Halomonas salicampi
  source 1..318: note = Related to JACCDF010000013.1
MRSICKLTPTYPHNAIIDPQHLALLLNTPLESLKATAKIASGSYRPVPQTKRDGSPRMTYDAYPELKRIQHQIVKKILRKVRFPRYLQGGIRDTEFPRDHVSNAALHTGASILVLDDIADFYPSLESQLVFTIWLRFFGFSPDVSELLTKLTTRHCVVPQGARTSSYLANLAFWDKEAKLVEDLGNMGLTYSRFVDDVSYSSHHQVSNSTIGEARAKVYRMLASKGCRPKRSKSQVCRKGQKLKVTGLVAAGNYPAVGKAERKRIRSAVHNLEKAVGRDGMTPENLKAWNSAKGRVGMLFRLEHLEARSLSQRLDTLL

SEQ ID NO: 3823 - protein, 330 aa, Halomonas sp.
  source 1..330: note = Related to VOGA01000005.1
MFVSSELTPFYPHNPIVDPEHLARLLNTPLPKLEAIAESASSSYRPVPQKKKDGSPRMTYDAYPALKRVQHQIVQKTLHKVRFPRYLHGGIKDTEFPRDHVSNAALHTGAAILILDDIADFYPSLDRKLVFSVWLRFFRFSPEVAALLTKLTTRKGSIPQGAKTSSYLANLAFWDREAQLVEDLKAMGLTYSRFVDDVTYSSRCRIPDSAVGEARAKVYRMLTSKGCRPKRSKSQVSRKGRKLEVTGLITAGRSPAISKDERNRIRSAVRHLEKAVNEEGMTPENRKAWDSAKGRVGRLVRLKHAEGRRLSQRLDALLQAAPLAHRVDNQ

SEQ ID NO: 3824 - protein, 321 aa, Thalassolituus oleivorans
  source 1..321: note = Related to NC_020888.1
MKATPPLYLHASIGSINSLSLLLGVSPDSLKSIGDAAQKMYREVPQKKKDGSLRMTYDAHPSLKKIQDKISKLILKKVVYPDYLQGGLPKKDQVSNAAKHSKAIILIQDDIEDFYPSLSDTTVRGVWQQFFKFSPEVAKLLTSLTTLNGKVPQGAKTSSYLANLAFWDCEHLLVQKLLDKDLTYTRFADDIIVSTRAIISNSEIAVVRASIYNMLALKSCKPKRSKSRVCRKGTRLSVTGLNTSLKSPMVNKQERRKIRALLHNLEVSVSLNGYTAENVAAWESIRGKVVRLKRLRHKEALGFDERLHLLKSRLFSSSSVL

SEQ ID NO: 3825 - protein, 332 aa, Ketobacter sp.
  source 1..332: note = Related to RCHN01000010.1
MLRDRYLIIKIPSIANTSSLASLLEITEKELFYIADNVHEFYKPGKIMRKKNGDPRPTHDAKPVLKQIHARIKNRILKQVVYPYYMLGGISDLESPRSCKTHAQIHSGKKILISEDIANFYPNTSYEVVKKIWKYHFKFGDEVSELLTKLTTFNGELPQGWKASGYIANLALIDKEPELVRILEEKGLSYSRFIDDITVSSPFYLTSNDKQFIISNIYAMLFSCGYKPKRIKHEIVSREMPMSVTSLNVNTKKPTIPSKERKIIRALVYQLECAYPDDGRSIRFYKLWLSVYGKVNRVKSFHAEEGSKLQIRMRQIKPPKHFFSNKKLLSTS

SEQ ID NO: 3826 - protein, 320 aa, Legionella pneumophila
  source 1..320: note = Related to DACUBM010000007.1
MPRNRYPQPSIPPIANITSLASLLSVNVTDLLYIADNINLFYKPGKILQKKNGEHRYTHDAKRTLKLIHQHIKNRILKKIEYPYFMLGGISDPQNPRSCKAHAQIHCNKKILINEDILDFYPTTSYELVKRVWKHQFNFSDTVAEILTKITTYSGQLPQGWKTSSYIANLALLPIEAHLVELLENKGYSYSRFIDDITVSSPTFISPQEKKSIISNIYGMLFKCGYKPKRTKHEIVSNKEKMIVTSLNVNTETPTLSKQERNNIRAMVYQLEKLFSIQGNTQAYIQKWHSLYGKVNRLKSFHKKNGEQLQERMKLIKPLK

SEQ ID NO: 3827 - protein, 320 aa, Legionella pneumophila
  source 1..320: note = Related to NZ_LEAU01000005.1
MRKIRYPIANIQPIAKISSLARLLSVREADLLNIIDNIESFHRPGKLLKKKNGDPRPTHDAKSELKIIHARINNRILKKVQFPYYLQGGIADKSYPRSCKEHAQTHSGMKIIICEDIADFYPSTSYITVLKIWKHFFNFSNEVAEILTRLTTYQGALPQGWKTSSYIANLTFWHCEPELVKIIEEKGLSYSRYIDDITVGSRLHISNNGKEFVISSVYGMLFSNGYKPKREKQEIVSSEKPMIVTSLNVNSQKPTIPKKFRNNVRAMVYQLEKSFISIGNSIEYDKKWRSVNGSVCRVKSFHLSEGAKLQERMRQIKPIK

SEQ ID NO: 3828 - protein, 321 aa, unidentified
  source 1..321: note = Related to LVCQ01000131.1; note = Piscirickettsiaceae bacterium NZ-RLO1
MSIKIYTPEPKIQYISKISSLARILSVNSNDLLNISNNTQKFYKQGKLISKKNGEKRVTHDAKPNLKNIHEIIKNRLLKTVNYPFYLHGGIADPSIKRSCLSHAKTHINSHIIFQEDIANFFPNTDKNTIKKTWKYLFNFSDEIAEILSNLTTHENMLPQGWKTSGYLANLVFWEKEAQLVSNLEKKNLSYSRFIDDIVVSSPCRINNNNKNFIISSIYNMLYHYGYEPKRSKHKISTRKDPMSITGLNINPKFKSLTISKSERNEARLAVYNLEKNYNRIEKEDYIRLWNSASGIIARISLFHKKEAKTLREKINKVKLL

SEQ ID NO: 3829 - protein, 322 aa, unidentified
  source 1..322: note = Related to JADGCO010000009.1; note = Magnetococcales bacterium
MSTNNFPIINIPSFSNPASLASLLSVSEQDLFRITSSVDNLYKPGKILQKKNGELRRTHDAKKPLKDLHEIIKNRILKKVVYPYYLLGGIADPFKPRNCTNNALIHSGKKILIAEDIENFFPSSSSDIVFNIWKLCFKFSPKIADILTKLTTYQNQLPQGWKTSGYLANLVFWDNEPDLVRDFEKRGYSYSRFIDDIAISSNQFINDNQKSYIISRIYSMLRLKGYKPKRTKHEIQTQIKSMHLTGLGINRKRPTVPRNRRNNVRLLVYNLEKRHRHEGDTHQYREDWISVSGKVGHIRSFHNNEWEKLKFRLNKIKPNDKV

SEQ ID NO: 3830 - protein, 320 aa, unidentified
  source 1..320: note = Related to VXTZ01000022.1; note = Candidatus Dadabacteria bacterium
MPRDRHPVINISPIAKVSSLASLLSIKESDLLYIAANVDRFHRPGKELKKRNGEPRQTHDAEQRLKIIHGRINNRILKKVDYPYYLQGGIADKKRSRGCRANAIIHSRKKLIITEDIKDFFPCTSKRIVKGIWQYCFRFHPEIADILTRLTIYQNQLPQGWKTSSYLANLVFWDKEPDLVSLLEQRGYSYSRYMDDITVSSGHYINNHQKNYIISKVYEMLFSKGFAPKRSKHEIVSQSQRMDITGLVVNRKNPTVLKSKRRGVRVGVFKLEELPINNRSDADYRECWEHLSGLVSYISAYHPKEGKKLRARLRNIKPNR

SEQ ID NO: 3831 - protein, 335 aa, Thioalkalivibrio nitratireducens
  source 1..335: note = Related to NC_019902.2
MAPESNKTCSKVGPIAHVKALASILSTTPSELIALSENVPSLWKPGKVLRKKDGTPRPTHDARKALKVVHERIKNRLLRQVDYPGYLLGGISDKLTTRDYSRHAALHAKKKILISEDIQDFFPSTTAEVVQEIWQRLFNFHPDVAELLTRLTIYEGALPQGWKTSGYLANLALWRREPDFVARLHRQGLAYSRFMDDVTVSAPYPLSKTQLTNIISGIYGMLASGEFAPKRAKHKIATGRSRMEVTGLNVNAAKPSMPKKRRDQIRAQVYQCEQGYKRDPRSPEYLTQWRNASGKVGTMKRFNPGEAKSLRTRPALYPQVAQTSRYGAVSFDFIS

SEQ ID NO: 3832 - protein, 332 aa, unidentified
  source 1..332: note = Related to JAICBS010000011.1; note = Candidatus Thiodiazotropha sp. (ex. Lucinisca nassula)
MALENNKACSKVGSIARIEALASVLSTTPAELLELSENIHSLWKPGKILRKKDGKPRHTHDARKPLKVIHERIKNRLLKQVDYPHYILGGISDKQTTRDYSRHAALHSKKKILISEDIRDFFPSTTSDVVLNIWLRFFNFHPEVAALLTKLTTHEGVLPQGWKTSGYLANLALWDREPDFVTQLHRQGLVYSRFMDDVTVSAPYPISKTQVTNIISGIYGMLASRDYKPKRSKHKISTGRHRMEVTGLNVNATRPSMPKLRRNQIRAQVFQCEQLFKQNARSPEYLAQWRNASGNVGTMKRFNPSEAKGLRARLTAVKPCAPRRDCTRGFPC

SEQ ID NO: 3833 - protein, 321 aa, unidentified
  source 1..321: note = Related to NZ_SMSC01000017.1; note = Candidatus Thiosymbion oneisti
MEHQDRKAYSKVGPIGCIDALASMLSISAKDLLTVSKSVESFWIPGKTLRKKSGEPRLTSNAKEPLKGLHEKIKNRLLKRVCYPYYLLGGISDSMMPRDYKCHAAIHSGKNILISEDIKDFFSSTKTDVVHSIWQCLFHTSPDVASVLTSLTTYNDCLPQGWKTSGYLANLAFWDLEPDLVERLEKRGFSYSRFIDDITVSSRCRIGASKKSFVISEIYRMLSLRGYSPKRAKHRIATNDNRMGVTGLNVNKNTSSMPKEKRKIIRAMVHRCENHYMQDRTSEGYRKSWERTSGKVSTLTRFHETEGNKLRKRLQTVKPIR

SEQ ID NO: 3834 - protein, 341 aa, Psychrobacter sp.
  source 1..341: note = Related to PJBX01000118.1
MGFHPLPQVTPIANISSLANLLEITVEDLEYVLANKDRYWCPGKKLTKPNGEVRHTHNAKPRLKAIHQKILDKLLKKVFYPIYMQGGVADLLNPRSCRTHAAFHCNKSIVISEDIKSFFPNCDYKNIRSIWQGFFCMAPEIAEILTQLTTYQNELPQGWKTSGYLAQLIFYDIEPKLVEELDRQQVAYSRYIDDITISSSRLLTDRQKTDIISKIYSMVFHKAHHPNRKKQTIFSPSVNGVGKTVTGLTVNSKKPTINNDKRKKLRSDIHKLSLRFHTDKNLYSYDKDWRSITSKVGHIKTSHPRQWKKFRQEMNAIKPTFKRKKKTNTKKAVFKGTIDGK

SEQ ID NO: 3835 - protein, 321 aa, unidentified
  source 1..321: note = Related to BQJL01000324.1; note = marine bacterium B5-7
MSSKDLAPRVGSISNIARVSSLARILGTTDDRLLYIAGNIDKYWKPGKKLPKSDGSIRITNDANDVLKNIHERINRNLLKPCFYPRYLNGSLPGRSIRKNAEFHLRSMVLVNEDIENFYPSARFRQIKGIWKYFFKCSDEVAVILTKLTTYKGSLPQGWKPSSYLANLLFWDTEYILVEKLQAAGFSYSRLMDDITVSSRKPYTPEKLSVLISDLNLFLHSKEFKLKRSKHSIKPSYTRQTVNNQIVNGSKVTVPRERRKLIRALVHSLEIDYSYGAVFSDKYKTKWKSASQRVGGLKHGHLSERNSLRQRLQNIKPRIRF

SEQ ID NO: 3836 - protein, 302 aa, unidentified
  source 1..302: note = Related to JABDOQ010000026.1; note = Woeseiaceae bacterium
MAKHLGLPTEHLIEIAQNSASHWRQGPDLVKPDGSIRKTNSATQQLKDVHTRVKFKILRKTFYPDYLYGSLPKTLEQGVRNHIANAELHAGQRLIISADIKGYFPSVDPVVVHGIWQGFYPFAHDVAEVLTKLSTYKNEMPQGWGPSSYLAQLVFYDTEHDVVEYLQSQGFQYSRLTDDITLSTNRSLKKSEITDAIRTLNRMLNRKGTNINRSKTRVDSPKRQQSVNKINVSVRGMTLSQKYRKAVRAKVHNVVTNPELFGDKLHRELQSAKGKISYLGKFHEADAKKLKSRIRNFELSTK

SEQ ID NO: 3837 - protein, 324 aa, unidentified
  source 1..324: note = Related to JAEUQA010000033.1; note = Chromatiales bacterium
MRLSQLSPRYARRRIQRVESLAKLLGTSPTDLAALAANSAHYWIPGRTKTKSDGTKRHTSNALEPLKSIHKAIKNKILRATSYPHYLMGGLPSDEEAGCIRHCEENAKRHSGQRIVVTEDIKSFYPSITASRIHDIWQGFYRFSPEVAELLTKLTTYRGVVPQGWVPSSYLANLALWDCEPGLVAHLERQGLTYTRWIDDITISSKTFVAPACKTAIVTAVYGMLRSANFSPARTKHRIRTRGQNQRVMNLNVSGKRPTVPRQRLAELRATVRNLLRDAGSLSAADYTSKRDRIEGQIGSISRMHPRLAERLRNQLASVRRPAN

SEQ ID NO: 3838 - protein, 307 aa, unidentified
  source 1..307: note = Related to NZ_AP018005.1; note = Candidatus Rickettsiella viridis
MSIVLSSFYPYKPISRLDSLAKVLSVDVSALEKIASLASSYYRENKLKNNRITYTVLSPLKEIQEKIKKNLLDKVVWAYYLHSYIKKRNTKTNATAHLFKKALFNKDIKKYFDNCKEKHIYNVWSKFFNFTDNVASILTKLTIRNGELPQGSCTSPSLSNLIFWKDEPRLVSEFNKIGLAYTRYADDISVSSKNKKLDKVYIIGKIYGMFSKNGFKPAREKHKIYNSSEKMVVNGQTVNSKNVTLDKKYILKVRSYIYKLEKRINTLTKSEFDIDYQSILGKINYIKQYNKKGLGLESRLNKLLDIF

SEQ ID NO: 3839 - protein, 319 aa, Proteus faecis
  source 1..319: note = Related to NZ_QEXA01000001.1
MKPHYLNKPISSISSLAKCLQTTVDELQNLSTNADKYFFLANRVQKEDGSYRDTYDVRQRLKIIHDKITKNILKKVYYPDYLQGSLAKKDHISNAEIHSGKKVIIKGDISNFFPSISKDIIYQIWIEFFNFSKEVAELLSRLTTFNGKMVQGCKTSSYLANLVLWSREYKFVNLLKSQGFTYTRYVDDVHVSSERIMHKSEKTKIISRIYNLFASINVRPNRKKQEIMPRNQQQIVHKLNVDKSTPNMPKQKRNEIRKLVFICGKAFEDNNITLSEYTKNYNTVMGKVNYLRRLHPKCGNLLLSNLRSISPLKRMKIIS

SEQ ID NO: 3840 - protein, 316 aa, Providencia stuartii
  source 1..316: note = Related to WLTV01000024.1
MKPRYLNKPISSIFSLAKSLQTTVEELQYLSANADKYFFLASKVQKDDGSYREIYDVSQKLKNIHDKITKNILKKVYYPDYLQGSLSKKDHISNAEIHTRKKVIVKGDISNFFPSIGKNIVYQVWVVFFNFSKEVAELLSNLITFNGRMVQGCKTSSYLANLVLWSRESKLVESLKLQGFTYTRYVDDVHVSAKRIMSKSEKTRIIKGIYNLFASINVRPNRKKQEIMPRNLQQTIHKLNVNKSMPSMPKQKRNDIRQLVFLCGKAFGDNRLAINEYTKMYNSVMGNVNYLRRIHPEEGGRLLSKLKSITPSNRFI

SEQ ID NO: 3841 - protein, 318 aa, Morganella morganii
  source 1..318: note = Related to CP076623.1
MIVYPYKPISSLKSLSIVLCISEQELHYIYMNSDSYYFLTKDIIKNDGSHRLTYDVKSKLKTIHDKITKLILKKVNYPDYLQGSLSGKDFISNAKNHSKKRIIISEDITNFFPSISKEIIYQTFSKLFNFSPIVCDILSKLVTYKGYLVQGCKTSSYLCNLVLWNREKALVDNFKKKGFTYTRYVDDIHISSNSFINNDEKEYIIKKVYNLMRSINVKPNRKKHKIMTNDNSQSVHGVIVNKKAAFSKEYRNEIRGLVFNCQKKFKLSINEKEYTKFYQSVLGKVNLLKRLNENEAKKHLNTLSKIKPIHFKEKEKHD

SEQ ID NO: 3842 - protein, 314 aa, Photorhabdus hainanensis
  source 1..314: note = Related to NZ_RCWD01000007.1
MMKFSYQNKPISSIDSLAKALSISVDELFYLYNNSDKFYYVAKIEPKPDGSFRKTYDVKTRLKKIHEKINTNILKCVKYPDYLQGSLKERDFLSDANKHTNKKIIIKEDVSNFFPSISKKIVYQVWAIFFNFTHEVSEMLSELITYKGFVVQGCKTSSYICNLILWNREEKLVNEFKKRGFIYTRYVDDIHVSSCNIIKKENKRYIINNIYKLMYSVGVRPNREKHSVMPKSDVQTVHNVNVDKAIPSFPKQKRNKIRLGVYNCEKLYDIEKHTEKYRKLYFRVLGQINMMKRLHEKEAHKLIQRLRKIRPENI

SEQ ID NO: 3843 - protein, 314 aa, Gilliamella apicola
  source 1..314: note = Related to NZ_LZGX01000010.1
MIPKYLFKPVADLDLLAKILGITKQELDDLYHSSDSFFFLHERKQKSDGSYRDTYNVKKRLKIIHGKISKEFLKKVNYPDYLQGSLKDKDFLTNAKNHLGQKILITEDITNFFPSISKKIVFEVWVGFFKFSKEVSEYLAELITFEGYLVQGGKTSSYICNLIFWSRESELVDYLAKKGYKYTRYVDDITVSANKIITLKEKTDIIRRIYSLLKSVGAKPNRIKHQIMPRNKRQIIHNLNVNQNKPSMTKKKKNMIKAAVFECEKKFQTDPNSKEYLKLFNKTMGRVNHMKRIHPKIGDVLQKKLKLIKPQDKF

SEQ ID NO: 3844 - protein, 321 aa, unidentified
  source 1..321: note = Related to nan
MSEHSSFRYPYKPIASLEKLAICLNITLEELNYLQENADSFYFLTTREQKKDGSFRECYDVKKRLKDIHEKISIKFLKLIEYPEYLQGGIKKRDYISNASQHTCSFDLIEEDISNFYPSISREIIYQVWVGFFCFSHEVADCLSKLVTFQGYLVQGSKVSGLLCNLILWNRETKLVMNLKRQGLTYTRYVDDVTVSCDRYLSNKEKQQIIRKIYALFYTVGAKPNRRKHKIERKGTRQTVNNLNVTSENPTLPKEQRNKIRAAVFECEKIFRIGNSSLIQYKELFESTKGRVNQLKRFHKKQANSLLKRLEEIHPNKFKAT

SEQ ID NO: 3845 - protein, 321 aa, Neisseria sp.
  source 1..321: note = Related to RBKF01000628.1
MNDCTSFNYPGKPIASLEKLALLLGISLEDLIYLQKNADSFYFLVKREEKKNGCFRECYDVRERLKNIHEKNFVRLLKVISYPEYLQGGIKKRDYISNANQHTRSHTIINEDISNFYPSISRKIIYQVWVGFFHFSPEVADCLSQLVTFQGKLVQGSKVSGLLCNLILWNREDKLVMSLKSRGLTYTRYVDDITVSSNRYLSNREKQQIIREIYTLFYTVGAKPNRSKHKIAYKGTKQTVNNLNVTSEKPTLPKEKRNEIRAAVFECEKKFQEGSSSIVEYKKIFESTKGRVNQLKRFHKKQANDLLQRLEKIHPNSFKAA

SEQ ID NO: 3846 - protein, 320 aa, Neisseria musculi
  source 1..320: note = Related to CP060414.1
MNKPVSFCYPHKPIASLEKLAIYLGITLEELLYLRQYSNSFYFLHERKEKADGTFRDTYNVRDRLKNVHEKIAKKFFTILDYPEYLQGGICKRSSITNAKQHIGMNILIKEDISNFFPSISKKIVHQVWTGFFHFSHDVADCLAELVTYQGYLVQGSKVSGFLCNLIWWQREADLVAEFQKQGLVYTRFVDDVTVSTKRNLSNAEKKKIISKIYSLFHSVDAKANRKKQKIMHKGHQQTVNNMNVSIGKPTLPKEKRKEIRTIVFKCELTFQNKEIHITAYEKLFNSAKGKVFYLKQFHTVQAEQLLQRLNKIQPKFFNS

SEQ ID NO: 3847 - protein, 311 aa, Enhydrobacter sp.
  source 1..311: note = Related to LR733345.1
MAEFAYPHRPIASLEKLAIVLDTTVAELDFLSQNANNFYFKVKSIQKADASYRDTYDVRDRLKTIHAKIVKNFLRIIDYPDYIQGGVPHRDYLSNTAMHTAKQVVISEDITNFFSSVSCTIIYQVWSRFFKFAPVVCECLTNLVTYQGFLVQGAKTSGYLCNLIFWNREQFLVDTLASQGFTYSRFVDDISISSPKVITSEHKTEVIAKTYGMLQSCGVKPNRKKHHIMSKGSSQKVHRVNVVSNKPTFDKKERNAIRAAVHECEMNFSKSKSSSEYEKLFNTTMGRVQKIKRLHIEEANKLLARLQKIKP

SEQ ID NO: 3848 - protein, 313 aa, Moraxella bovoculi
  source 1..313: note = Related to CP011374.1
MDNNAFHYPYKPIANLKSLALSLDITLERLLFLQKNSDNFFFLQGRVKKEDGSFRETYDVKEELKKVHAKIVKNFFNVLKFPSYLHGGIKKRDYITNAKQHLQPKTIISEDIKNFFPSITKNLVYQIWSNFFKFSHEVAECLAEITTFKGSLVQGSKVSGYIGNLVLWQREPKLVEEFGKKGWIYTRFVDDITISSKRILSNKEKSEIISKVYGLLASINVKPNRKKHSIMKNGKDRQKVTQINVSTQRLTLSKKERNSIRSEVYFCEKFYKNYNKEEYKKLYNSIKGKVYNLRRFHQDEADKLLNKLNKIPP

SEQ ID NO: 3849 - protein, 316 aa, Haemophilus parainfluenzae
  source 1..316: note = Related to CP063120.1
MSNPIYPHKPIGSLEVLANVLGIRDIDELLLIKKHSDNFFFVASVIKKRDGTLRNTYDIKHKLKSIHRKIKNVFLKKIYYPEYLQGSLAKRDYLTNANIHTNSKCIITEDIKNFFPSISKDIVVSIWKNIFHFPHDVSETLAELITYKGFLVQGSPVSSYIANLALWYKEPELVNTLSQKGFIYTRYVDDISVSSKRPITKKEKTRIIRQIHTMLSSIGVELNRKKHKIMPRNNRQEIHRVNVNTNAPTLPKKEREKIESAVYQCEIMYKSSPKSSEYKTLFNATQGRVNMLSRLHSPLATRLKCRLEKIKPIKNT

SEQ ID NO: 3850 - protein, 315 aa, Haemophilus parainfluenzae
  source 1..315: note = Related to NZ_CP063124.1
MDILTKVLGLKDTNQLKELKENSDSFFFIAKKEKKRDGTIRITYDVKSELKLVHKKITRKLLKKVNYPDYLKGSLPKRDYLDNADAHTSSKCIITEDIKNFFPSIRKDIVISIWKNIFHFPHDVAETLAELITYKGCLVQGGTASSYIANLALWYKEPALVKELHDQGFRYTRYVDDISVSSKTIITPKEKTKIIRKIHIMLSSIGVKLNRKKHKIMPRNESQKIHRINVNTNNPTLPKNERRKIGSAVYQCEQMFNSSSNSQEYENLFNSTLGRVNMLSRLHDSLAAKLKCRLEKIKPIKKTTMSQASSLVPRS

SEQ ID NO: 3851 - protein, 312 aa, Mannheimia haemolytica
  source 1..312: note = Related to CP097335.1
MNKPNYPYEPIGSISTLARVLGLETQKLQNLYDNSDDFFFVTKKKLKSDGSFRITYDVKAELKSVHRKIAKELFKKVFYPEYLQGGIARRDYIGNANIHIDSKCIITEDMKNFFPSISKEIVIDVWKNVFHFPPDVSEILAELITYKGYLVQGCVASGYICNLVLWNREAKLVVKLKNRGFIYSRYVDDISVSSKRIFTTKEKTEIIKDIHSMVTSIGVKLNRKKHEIMPRNNRQKIHRLNVNSYQASMPKSEREKIKAAVYQCEKLYITEPSSEKYKSLFNSTQGRVNSLSRLHKDHGDKLNLRLMKIKPY

SEQ ID NO: 3852 - protein, 313 aa, Pasteurella sp.
  source 1..313: note = Related to NZ_CP076656.1
MNSPTYPNSPIGSPAILARVLGIDPNILLSLKKNSNSFFFQAKTEEKSDGTLRITYDVKEPLKTIHRRIAERLLKKVTYPLYLQGSLPKRDYLGNAAIHTNSTCIISQDVKNFFPSISKNTVVQVWKNVFKFPEDISEILAELITYEGFLVQGCITSSYICNLVLWNRESKLVDELKEKGFTYTRYVDDITVSSKRIFTLEEKKEIIKSIHSMLKSISVKLNRRKHKIMPRNSQQQVHRVNVNSDRTTMPKSEREKIKAAVHQCEELYKTLAETEEYKKLFNQTLGRVVHLSRLHERQGKKLKQKLSKIYPRK

SEQ ID NO: 3853 - protein, 329 aa, Alteromonas mediterranea
  source 1..329: note = Related to NZ_CP018028.1
MNKLSYPHAPIGELDKLAKALNIELSELQTITDKSDSLFFQTKEIIKNDGSSRFTYDARPTLKVIHGKVCEAFLKRVNYPDYLQGSIKRRDYLTDARKHAGSKVLISEDITNFFPSISKKVVHEMWVGVFGFSNVVAECLAELVTLNGFVVQGAKTSSYICNLVLWNREERLVNSLKTRGLIYTRYVDDVTVSSKRLISLNEKSKIINSIYSLFRSIGAKPNRNKHKIMPRNTQQEVHGVNVNKNQPTMPKEKRKKIRAAVHRCEITYKQTPDSIEYCALFNSVMGKVNTLGRMHTSEADKLRLRLSQVKPVSAQSLNKPLVSNTGLIT

SEQ ID NO: 3854 - protein, 314 aa, Oceanospirillum beijerinckii
  source 1..314: note = Related to NZ_AULT01000052.1
MRKPNYPHAPIGDLDKLALALHVSKKGLQTVTAQSNDLFFLTRKIKKEDGSYRLTYDAKPSLKSLHGKICEAFLKRVEYPDYLQGSIRKRDYLTDARSHVGSKVLISEDITNFFPSISKKTVHEMWVGVFGFSNIVAECLAELVTMNGDVVQGAKTSSYICNLVLWNREAQLVSQLRKKGLVYTRYVDDITVSSRRSLSKSEKSRIISSIYSMFRSIGAKPNRRKHKIMPRNTQQDVHGVNVNKDRPTMPMEKRNQIRAAVHRCEIAFNGRPSSSEYVSLFNSVMGKVNTMGRMHRSEAGKLKARLLQVKPVIT

SEQ ID NO: 3855 - protein, 314 aa, Nitrincola alkalilacustris
  source 1..314: note = Related to NZ_WBOM01000002.1
MNQPRYPFAPIGDLEKLSLALGVKLLELYDLKARSNELFFQTRDIVKPDGSHRITYDVRAPLKLVHGKICEVFLRRVEYPEYLQGSIKKRDYLTDANKHVRSKVLISEDITNFFPCISKKVIHEVWVGVFGFSNEVSDFLAELVTLDGFVVQGSKTSSYLCNLVLWSREAQLVKRLKMKGLVYTRYVDDITVSSKRILNNKEKSDIINSIYAMFRSVGAKPNRRKHKIMPRSAQQEVHGVNVNRQQATMPKYKRNQIRAAVHECEIIFDSDSSSETYISTFNSAMGRVNTLGRMHKVEAEKLKVRLEAVKPILV

SEQ ID NO: 3856 - protein, 314 aa, Vibrio parahaemolyticus
  source 1..314: note = Related to CP006005.1
MNLPVYPHASVANLSSLALALGLSLKELHELASTSDDYYFLTRKIEKPDGSLRLTYDAQPILKAIHGKISEVFLKRVDYPRFLQGSIKKRDYISDAKQHVSSKMLISEDITNFFPSISKKVVHEVWVGVFGFSNEVADLLAELVTYQGYVVQGSKTSSYICNLVLWKREAELVSKLEAKGFTYTRYVDDVTVSTKRIVSKAEKSEIINSIYSLFRSVGAKPNRKKHKVMPRNNRQEVHGVNVNKTAPTMPKKARDQIRAAVHQCELAFGDDPTTSEYQSAYSSAMGRVNTMGRMHEKEARDLRARLAAVKPVTN

SEQ ID NO: 3857 - protein, 314 aa, Pseudoalteromonas sp.
  source 1..314: note = Related to SGPH01000013.1
MTPKYPHDPIAHVDSLCLSLGVTQSKLKEIQRKSDTYFFVTKEIVKKDNTIRQTFDVKPELKRIHERICSAFLKKVEYPAYLQGSIKKRDYLSNCALHTGQKLVISEDVTNFFPSISSLVVHQMWVGVFKFSNEIATILTDLVCFNGWLVQGAKPSSFICNLILWNRESKLVEELNQRGLKYTRYVDDITVSSPTNLSKSSITEILSNIYGMLASVNAKPNRKKHQVMPNGKRQNVHRVNVNHSTPTLPKKERSKIKAAVYQCEKDFAIKVSKDEYELLYNQTLGRVNNLKRMHPKMGEELLARLRKIKPCNRS

SEQ ID NO: 3858 - protein, 312 aa, Pseudoalteromonas spongiae
  source 1..312: note = Related to NZ_CP023398.1
MTPQYPHEPIANLNTLCLALGLTASKLKYLQTNSDSYFFITKEIVKPDQSIRQTFDVKPELKRIHERICSAFLRKVDYPNYLQGSIKKRDYLSNCALHTNKKLVISEDVTNFFPSISSKIVHEMWVGVFKFSNEIASILTDLVCFKGWLVQGAKPSSFICNLILWNREARLVLKLNSMGLTYTRYVDDITVSSSMNLSKSLITEILSDIYGMLGSVNAKPNRKKHKLMPNGSRQNVHRVNVNTDIPTLPKKERNKVKAAVHECSLKFKADNSSIEYKSLYNSTLGRVNNLARMHPKLGKELRTKLIRFKPII

SEQ ID NO: 3859 - protein, 333 aa, Methylomonas methanica
  source 1..333: note = Related to NC_015572.1
MLIKPTYLHKPIGSIESLAKSLGLSKEDLIELASNSNEYFFIAKKVEKPDKSIRLTYDVKPRLKQIHEKICCNLLKKVNYPDYIQGGVRGKSYLSNCQNHTHKKIVIKEDVSNFFPSISKKIIHEVWAGFFHFPSDVSELLSELVTFNGYLVQGGKASGFLCNLVLYDRESKLVEEFSKKGFKYTRFVDDITISCLRNITKDEQTYIIRKTYGLLKSIEVNPNKRKHKIMSNGVQQQLHGVNLNTNKPTLPKAERKKIEAAVFQCEKAHSENSNSIQYIKQFNSAMGRVNTMKRMHPKAGQALLERLCKIKPQINSRTFEQKHRLEIFRNLVN

SEQ ID NO: 3860 - protein, 312 aa, Psychromonas arctica
  source 1..312: note = Related to NZ_AXWP01000102.1
MIPLYPHKPIASLNSLAKALGTTSDTLSNLTANSDKYFYLTKVINKPDGSVRNTYDVKPELKKFHERINTFFLKQVKYPNFLHGSLKGKDYISNTKEHTNKKVVISTDVSNFFPSISKKTIHEVWVGVFNFSHTVADCLSELVTHKGFLVQGSKVSSYLANLVLWGRESKLVCFFNKKGYVYTRYVDDITISCDRNLTKIEIADITSQVYAMLKSIDVAPNRKKYAVMTNGNSQSVHRLNVNRSVPTMSKSERAKIKSAVFECESKAAENRGTHEYIKLYNQTMGRVNSMKRLHSDLGDKLISRLKCVKPTP

SEQ ID NO: 3861 - protein, 312 aa, Vibrio vulnificus
  source 1..312: note = Related to DACQHB010000005.1
MKPTYPHQPVAKLDSLALALGLTHSELIELASVANSMYFVTRVIEKPDGSKRITHDVKARLKRVHERINSVFLKQVSYPSYLQGSLKGRDYLSNTKQHINKHIIISEDISNFYPSISNKVVHEVWVGCFGFSNEVASCLTALVTHNGHLVQGGKTSSYISNLVLWSRESKLVEELKRKGMTYTRYVDDVTVSSPRPLSKSEITNAISSVYGLFKTINVKPNRTKHEVMSKGKRQTVHRVNVSAGRPTFSKKERSKIKTAVFQCEQLFPKASTTQEYLSMYRSALGRVNTLARLHKKEADSLKERLKAIQPFM

SEQ ID NO: 3862 - protein, 318 aa, Photobacterium aquimaris
  source 1..318: note = Related to MSCC01000004.1
MTLTPKYNFKTIGSINALARLLQIPLNRVIYLSNNASDFYRVARVEQKKTGGQRITYDAYKTLKVIHRKIQTQIFKKVIYPQYMHGSISGRSYITNIKNHTKSKIVICEDISNFFPTIKAEQVEKMFIRLFHYPKNVAKTLTNLVTLNGSVPQGGICSSYIANLVMWEKESILVARLAREELTYTRYVDDITVSAKSYMSKPKVSEVIALIYGMLRYYGLEPNKKKHEVLGNGTYQTVHRVGVNGRRPSFGHDEKQLIRSAVHNLHILFVDKQCTYENYLKVFSSVSSKVGKLKQLNEYQGKKYRTLLNTIKLSIKDN

SEQ ID NO: 3863 - protein, 321 aa, Moritella sp.
  source 1..321: note = Related to JABSQS010000004.1
MTLTPKYTLSPIGSINALARLLQLPLNRVQYLAKNSSDLYRIARIEQKKSGGKRVTYDAYKELKSVHRKLQHQIFKKVIYPQFMQGSISGRSYITNVKLHTKSKLVICEDISNFFPTIQAEKVENMFMRLFHFPQDVAKTLTSLVTLNGSIPQGGICSSYIANLVMWEKESVLVLRLNNAKLTYTRYVDDITVSSKNYINKQEISDVIASIYGMLQHYGFKPNRSKHDVLGNGSHQTVHRVGVNGKRASFGKEEKKKVRSAVHNLINLFSDGQCSYEHYLKIFSSVSSRVGKIQQLNEYQGKKYRESLNAIKPSIKRFYHG

SEQ ID NO: 3864 - protein, 321 aa, Shewanella hanedai
  source 1..321: note = Related to NZ_VKGK01000009.1
MTLTPEYKLKSIGSIDALAFLLDLPLNRVQYLANNASDLYRVARIEQKKSGGQRVTYDAYKVLKAIHRKLQHQIFKKVIYPQYMQGSISGRSYITNVRYHTKCKIVICEDISNFFPTIQAVQVEKMFMRLFRFPLEVAKTLTNLVTLNGSVPQGGICSSYIANLVMWEKESILVSRLLTVKLTYTRYVDDITVSSKSYMTKQEISEVIASIYGMLRYYGVEPNKSKHEVLGNGSHQAVHRVGVNGNRPSFGKEEKKKIRSAVHNLSTLFSDDKCTYEAYLREFSSVSSQVGKLQQLNEYQGKRYRGDLNTMKPSIKRFNLG

SEQ ID NO: 3865 - protein, 302 aa, Vibrio furnissii
  source 1..302: note = Related to NZ_CP046798.1
MLQLPVPRIRYLAQNASDFYRVARIKTKANGDKRITYDAYRSLKDLHKTLKVRLFQNVSYPDYIQGAISGRSYIGNVKKHTKSTIIICEDITNFFPTIRESDVEKMFMRLFHFPKEVASILTGLVTLNGTVPQGGVCSSYVANLVMWERESALVSLLQAKNLTYTRYVDDITVSSKYYIEKVEIGNVIASIYGMLKHFGVKPNKAKHEVLSNGMHQKVHRVGVNGKRPSFGKEEKKRVRSAVYNLEALFKDNTCSYDEYLKAFNSASALVAKLKQLNEHQGQKYRESLNLLKPSAKRVELSN

SEQ ID NO: 3866 - protein, 325 aa, Colwellia psychrerythraea
  source 1..325: note = Related to JQED01000042.1
MNQTPEYPHLSIGSINSLARLLRLPVNRVKYLATNSSDFFRVARIEEKKSGGQRITYDAFKCLKDVHRRLKVQIFQRVIYPSYLQGSLKGCSYITNVKNHTKSKIVICEDISNYFPSIKSPLIEKMFIRLFSFPEDVARILTQLVTLNGLLPQGGVCSSYIANLIMWEKEVLLVGSFEKRGLTYTRYVDDITVSSKAHLTKSEISEVISSIYGMMKHYGIKPNLKKHQVLGDGSHQKVHNVGVNGRRPSFGKEEKKRVRSAVHKLKLLFDSPDCTYEDYLAAFGRASSLVGKLKQLNEQQATKHRGELNKIKPSFRNASNSNLVE

SEQ ID NO: 3867 - protein, 325 aa, Enterovibrio norvegicus
  source 1..325: note = Related to SYUS01000035.1
MTLIPRYTSLSLGSINALARLLQLPINRVSHLAENSSSYYRVAKITEKKNGDKRVTYDAFKVLKDVHRKLKNQLFNKVIYPDYLQGSLRGRSYLSNVKKHTKSKLLICEDITNFFPSISAAQVEKMFMRLFSFPKCVAEILTKLVTLNGCVPQGGVCSSYIANLVMWNKEAVLVEKLISDGLRYTRYVDDITVSSRRYVTKEKISKVIALIYGMLGHYGVKPNRAKHEVLGNGSHQTVHRVGVNGSQPSFGKDEKKRIRSAVHKLDTMFHDNNCSYADYLKAFGSVSSKVGKLKQLNEHQATKFRGQLNVIRPSVKRLKLDMDNS

SEQ ID NO: 3868 - protein, 319 aa, Methyloprofundus sp.
  source 1..319: note = Related to WTCN01000233.1
MNSAFYNGKPIASIAALSSALNVPEDILIDMSHNANKYYKKNRPEIKSNGKERIHYSVSESLKAIHQRIKVILFQNVTYPEYLQGSIRDTKKTRDYISDARMHSGKRMLISEDVSDFFPSIKYDQVLKLWMYFFNFPKKIATTLTDLTTYKGFLPQGSKTSSYVANLIFWQYEPALYNKLKAQGITYSRYVDDTTLSFDRYVSDKELGQIISSIFGMMCQVNIKPNREKQDIKSRKNNTTVHNLNVTKKSPTIPKKKKNNLRMAVFNCIKHSDLHGRKSETYKKMYRSTITRVGQLGRLHPNQSQKLKDKLAPYKPFNS

SEQ ID NO: 3869 - protein, 312 aa, Thiothrix lacustris
  source 1..312: note = Related to NZ_JHYQ01000015.1
MSAYYPHKPIASIESLAKTLDVTEAELLEVAQNSDSLFFVAKCVKKENGKVRVTYDARPALKNIHDRIKIALFRVVKYPFYLQGGISGRDYISNTKIHAGKKFLITEDVSNFFPSIQDSVVKKMWLYFFHFSPEVADVLTKLTTHNGFVPQGAKTSGYIANLILWDKEPVLVEYLRKKGMSYSRLVDDITISCDYKPSKKLLASMISDVYGMLLSKDVKPNRGKHKIMTQGEKQRIHNLNVDKGRPSLPKSKRADIRAAVFQCEEMAKYGRKTEEYNKLFNSTVGRVATMKRLHPTQATILRNRLDMIKPKK

SEQ ID NO: 3870 - protein, 379 aa, Vibrio parahaemolyticus
  source 1..379: note = Related to ABEZCS010000006.1
MNLRPKYTQKPIGSIEALANLLNLTLHDLDKLIQSSNDDYIVADKIEKDDGSIRVTYKAKPKLRTALDSIKSRVFDKVEHPDYITAGQIGKSYVDNAQAHINSRMLMSEDIRNFFPSISVKEVNRIFQHFFCFPPKVSNALSELSTKEGFLVQGSPLSGEIANLIFYRDEPELVKFCQDQGLRYTRYYDDIHISSDEKDFYELIPHLKSEIYRIFGKSGVKPHRAKKKSHFSTCSSRLSVHDVTVNSKKTNPSQKRISKVRQLLFTYEYMVDNNCDIEDIIKKYRSIHGHINTLQQQGYSQAGKLKEHLSLITCRISESEAKKYARKYRKVKSKKELTQFSSKVSILKRISGRVAMVINSEKKCANDKIKKKLSRNSSM

SEQ ID NO: 3871 - protein, 379 aa, Oceanimonas baumannii
  source 1..379: note = Related to NZ_SODO01000025.1
MNLQPKYTQKPVGSIKALANLLNLTLNELEELIQSSNNDYIIASKIEKADGSLRVTYKAKQKLRIALDTIKSRIFDKVKHPDYIAAGQLGKSYTNNAKAHINSKMLMSEDIKNFFPSISTKEVNRIFQHFFCFPPEVSNALSELSTKDGFLVQGSPLSGEIANLIFYQDEPELVEYCQSQELRYTRYYDDIHISSDKKEFHELIPHLKSKIYRIFGKHGVRPHRSKKKSHFSTCSSRLSVHDVTVNSKKTNPSHERISKVRQLLFTYEYMVDNNSNIEDIIKKHRSIRGHINTLQQQDYSQVNRLKEQLSFITRKINESEAKKYARKYRKVKSKKELTQFSSKVCILKKISVRVAMVINSEKKAADDKIKRKLSRNSVS

SEQ ID NO: 3872 - protein, 351 aa, Vibrio vulnificus
  source 1..351: note = Related to RBZH01000046.1
MHLRVERVYIVANKIEKDDGSLRVTYKAKPKLRVVLDSIKSRIFDKVEHPDYITAGQIGKSYIDNAKVHINSRMLMSEDIRNFFPSISIKEVNRIFQHFFCFPPKVSNALSELSTKEGYLVQGSPLSGEIANLVFYRDEPELVKYCQDQGLRYTRYYDDIHISSDKKEFNELIPHLKSEIYRIFGKSGVKPHRSKKKSHFSSCSSRLSVHDVTVNSKKTNPSHKRISQVRKLLFTYEHMVDNNFNIEDIIKKYRSILGHINTLQQQGYSKAGKLKEQLSLITCRISESEAKKYARKYRKVKSKKELTQFSSKVYILKRISGRVAMVINSEKNLQMIKLRKSYLVIQIYNQH

SEQ ID NO: 3873 - protein, 379 aa, Vibrio nigripulchritudo
  source 1..379: note = Related to NZ_AP024087.1
MRNLSPVYKQKPISSIDALCRLLQVEQRDLLSLAEKSNSHYLKKTVEKSGSKPRVTYKASPELRPILDSLKDRVFSCVSFPAYIAAGQLGKSYVANAESHIGAKMLMSEDIKDFFPSITQSQVENVYKHFFKFAPNVSLLLSELCTKDGKLVQGSPLSGYLANLVFFREEHSIVASCIEHGLHYTRYYDDIHISSCQLFYEEVHDLKQLLYGMMGRVGVSPHRSPKKCNIKLSNTRLYVHDVTINSHKTSPSRKRVSTVRNLLFNFNNCVSSGCDIETLVKHYRSILGHINTLQQQGYGKSKTLKKELREAVHHIDEKSAKKYARGYRKVKNSKEFKAFSLKASILKRISGRVASVINAEHDTAKKKLERNRASRKPTS

SEQ ID NO: 3874 - protein, 376 aa, Aliivibrio fischeri
  source 1..376: note = Related to WOBG01000017.1
MCNLSPIYNLKPIGSIEALCRVLQIEQSLLFSIAKNSNAHYFKKTIKKNNGKPRITYKASPQLRNILDKLKHRVFSHIVFPSYISAGQLGKSYVDNANSHTGAKMLMSEDIKDFFPSITQLQIQQVYKHFFKFTPEVSLLLSELCTKDGKLVQGSPLSGYLANLVFFKEEHTIVDLCIKNGLHYTRYYDDIHISSHTPFFEEVSELKQQLYGMMGRVGVSPHRSQKKCNIKLSNTRLDVHDITINSHKTSPSKKRVSRVRNLLFQFQKSVSLNDDIEGIINQYRSILGHINTLQQQGYLKSKALKKELSNIALCINEKNAKKYARGYRKVKNDKELKAFSAKVSILKRINGKVASVINAEQDAAKRKLKNRQSKSN

SEQ ID NO: 3875 - protein, 371 aa, unidentified
  source 1..371: note = Related to ASZI01000003.1; note = Osedax symbiont Rs2
MVTNLQFKYTNKPISSYESLSKTLSISIQEIHDIESKSNDFYTISKKIKKPDGSLRVTYKVHPRLRCVLDLLKKRVFDSVEAPEYILAGQKNRSYILNAKTHTESQMLLCEDIKSFFPSIHKKFVKKIFQHFFFFSPDISESLAEISTLNNYLVQGSPLSGEIANLIFFDLEPALVERLKKYNLRYTRYYDDIYISSKEHNFYEHTEEIKRQIYRMFNTVNLKPNRKKNKISKQSSRISVHNITVNSSKISPSKERLSMVRKKIYIFKCSIENNIDIQDLIGQYKSLQGHISTLKTQEYTKHKITKRELELLISKIDERLAKKYSRKFRSVKTKENFNKLANSSNLLTKISPRVTGVYKDEKMKAKKRLWK

SEQ ID NO: 3876 - protein, 383 aa, Alteromonas lipotrueae
  source 1..383: note = Related to NZ_JAESDJ010000001.1
MVSEANTVENFQCRQSQIGSIKALAKTLSLIESELIDLAECSDQYYKVSKEIPKSDGSVRRTYSVSYPLKKVLIRIRSRIISNVDYPDYILAGRLGRSYLDNANKHKSSAMILSEDITRFFDSIKQEYVEQIFKYFFHFPPDVAKTLSQLCTLDGYLVQGSPLSGDIANLIFNEKEPNVVKLAAELGLKYSRYYDDIYVSSLTNNFDAHIGTLRTAIYGMFASVEVKPNKSPQKSRVMRSSHRMDVHDVTVNSHKLSPSKKRTSKVRLSVDRLRKMVAEDAAISDILKVYRSTFGQLITLKSQGSPKYVKMRSELDQIMKSIEPAKARKFARKFRNIKTEADFKSFAQKISVLKRISPSVAGVINAESKSAKLKIKFKQATTH

SEQ ID NO: 3877 - protein, 378 aa, Alteromonas macleodii
  source 1..378: note = Related to DNJR01000290.1
MVSETDPVNDFQCKQSQVGSIRTLAKTLSLTEPELVRLAKHSDKYYNVSKEIPKSDGSVRLTYSVSYPLKKVLIRIRNRIISNVNYPDYILAGRQGKSYLDNAKKHKSSTMILSEDITRFFDSIKQEYVEQLFKYFFRFPPDVSQTLSQLCTLDGSLVQGSPISGDIANLIFHEKEPSVVRLAASLGLKYSRYYDDIYVSSATTNFDSHVGTMRTAIYGMFASVEVKPNKSPQKSRVMRSSKRMDVHDVTVNSHKLSPSKKRTSEVRLRIDRLRKMVADNAEMADILKFYRSTFGKLITLKSQGSPKYAKMRSELDGVMKSIEPAKARKFARKFRKIKNQSEFSSFAQRISILKRISPSVAGVINAESAIAKFKIEAK

SEQ ID NO: 3878 - protein, 374 aa, Pseudoalteromonas luteoviolacea
  source 1..374: note = Related to JAGJEH010000010.1
MERFNFFYTQKQIGSLSVLAKTLSITVNELNRLRANSDSYYQIAKRVVKADGSERITYDVKYPLKTILQKLRSRVIKNVQLPKYILAGRKGKSYLDNAMEHMSTKMIQSEDISNFFDSIKSKYVINVFKYLFKFPNDVAEALTDLCTFKGHLVQGSPVSGDIANLIFYHKEPQLVQAIESLGLKYTRYYDDIYVSSKEGNFYQHVSFLKAQIYGMFSSIQVKPNRSLSKSRVMRNSSRIDVHDVTVNSHKLSPSRKRVSNVRAQINKLKNSVNSRGCLSETISLFKSTLGQVNTLKAQGSPKAKDMLKNILDALKGIDEAQAKKYCRKARKVKELRQLNKLAQNLSVLKKVSPTIAGVANAELKQARERIKKKQ

SEQ ID NO: 3879 - protein, 371 aa, Alteromonas sp.
  source 1..371: note = Related to NZ_MODU01000004.1
MSSQIEYPQAGIASIDSLASALRIPSSELVALANNTSNLYRKSEQIEKDDGSKRITYDALPPLKIVLSNFRKRIIDKVLLPEYISAGKKGKSYIDNAEVHAGSKGLLSEDIKNFFPQVSFKSVFEAFKYLYKMSPEVAEVAALLCTKDGYLVQGSPVSGSLANIIFYAKEPFLVDRLKLLGFRYTRYYDDVHISHKTDDFSRDIGELRTKVYGIFISQGLQPHRTAKKSNYANSSRRMSVHGIVINNEKIKPNPKKVSDTRAMLFKFERLLETDYTIDSVVSLYRSIRGKIQTLKAQGSTKSEAYLTTLNSLMRKVDEAKAKKFVRKVRKVKTIKEYNKLSSKLSVLKKINVKVTRVVKIECDLAKKSLKA

SEQ ID NO: 3880 - protein, 370 aa, Pectobacterium wasabiae
  source 1..370: note = Related to CP015750.1
MHKNWSYSNRPLANIESLLKMLETNEERLAYVLKNKKNYFKTVPVLRKGKKRTTYKVVGELLKIHELIKQHVFSKISLPEYITGGRRGVSYLDDCISHCNKSIIIQEDIKDFFPSIKEELIAKAFQYYMNFSPEVSSLIAKLSTLEGSLVQGTKLSTDIANLIFLEEEALISAEVGKLGGNYTRYVDDITISFESEVNNEDISKIKTMILSMALKSGVRLNRQKSKVLRNGHSKIVHGVKVIKELRPTQKRKDSIRMCLFNLKKKVIEKESIMDILALYFKIRGLINTLKQQGDKNHAEYIKQANQLVAAVDKKDAIKSIRKMRKVKDVKKLRSFYSKLKPLGNISKTISVILDSEYKTCKCKFNNKSIE

SEQ ID NO: 3881 - protein, 366 aa, Pectobacterium parmentieri
  source 1..366: note = Related to NZ_CP065946.1
MHKNWNYSNRPLANLESLFKILETKEERLGYILKNKMVYFKKVPVIRKEKKRTTYKVIGELSKIHDLIKQRIFSKITLPEYVTGGRRGISYIDDCMSHCDKSIIIQEDIKDFFPSITEELIAKAFQYYMNFSPEVSSLIANLSTLEGSLVQGTKLSTDIANLIFLEEEVLISEEVAKLGGNYTRYVDDITISFESEVNNEDISKIKTMILSMAIKSGVRLNKKKSRVLRNGQCKIVHGVKVIKELRPTQKRKNNIRMYLFNLRKKVFDKENVMDVLSFYFKIRGLINTLKQQGDINHAKYLKEANQLVADIDKKDAIKSIRAMRKVKDIKKIRALYSKLKPLGNISKSISAILDAEYKSCKYKFNN

SEQ ID NO: 3882 - protein, 367 aa, Dickeya zeae
  source 1..367: note = Related to NZ_APMV01000009.1
MHKNWTYSDRPLANLESLFKLLETKQERLTYILKNKKIYFKKVPVIRKGKKRTTYKVTGELSRIHELIKQRIFSKITLPEYITGGRRGISYIDDCISHCDKSIIIQEDVKDFFPSITEGLIAKAFQYYMNFSPEVSSLIANLSTLEGSLVQGTKLSTDIANLIFLEEEIFISEEVTKLGGNYTRYVDDITISFESEVNNKDISKIKTMIFSMAIKSGVRLNKKKSRILRNGQSKVVHGVKVIKELRPTQKRKSDIRMCLFNLRKKILDKENIMDILSFYFKIRGLINTLKQQGDAKHTEYLNEVNHILTGIDKKDAIKSIRAMRKLREVKKLRVFYSKLKPLGRVSENVSTILDVEYRACKSKLNKI

SEQ ID NO: 3883 - protein, 331 aa, unidentified
  source 1..331: note = Related to JAAZOJ010000541.1; note = Candidatus Methanofastidiosa archaeon
METNPIYKGKQISTIQDLSEILNVEVNRIKHILYRANSFYIENPQPKDDGTMRMTYIIKPPLQQIQERIKDNIFSCVEFPHYLMGGIRDEANPRDHIRNAKIHSGKKWLISLDIKNYFPSIKNEYVYFMWRKFFGFSDEVSRVLTRLTTYNGFLPQGSKTSSGIANLLLWDKEPHFVDSLNKQDFVYTRFVDDITISSTKLVEKEMVSKIIVDMKHLLRQYDLKLKGKKTKFQTRSQKMTVNKVTVNGKKPTISSEERNNIRLEVHLFEKKADNTKNWNEIDHDYYSLMGKLNYIKKVHSAYAEKLISRLEIKREEFYSKNYEKDGNGCRL

SEQ ID NO: 3884 - protein, 311 aa, unidentified
  source 1..311: note = Related to JACKCF010000001.1; note = Anaerolineaceae bacterium
MDKPQYKKKPIGYVDSLAKALSAERDHLIRVANDADSFYRLHKRIEKPDGTFREIYDARYPLKLFQRRINRKLISRVDFPQYLHAVKHRSHITAASKHNIPLLLLNLDISNFFPSISSELVFDIWRLFFRFPKHVSQMLTKLTTYNGFLPQGAPTSPGLANLAFWDIESKLVEGMNAKGFVYTRFVDDVTISSERKVQMDELAPIIASIFGMFRNRGVKANRNKIHISTSGHEMLVHNLNINSGVPTIPKRERGRIRAAVKDCEITYTEIIQTEVYKKLWHSTLGRVNYLNHFHPTEAQKYHQRLQAVRPS

SEQ ID NO: 3885 - protein, 313 aa, unidentified
  source 1..313: note = Related to JACDGI010000160.1; note = Anaerolineae bacterium
MDKPQYQKKPIAHIDSLAKLLSVDTNKLVNLADQADSFYYLSERIEKPDGSFRDVYGVRDELKILQQQIVNKIYSNVRFPNYLYGSIKGTNHIMDAYVHAHAQLLVKMDISNFFPTLTSKNIFNIWKRFFNFSEPVAKILTKLTTFNNFLPQGAPTSPGLANLAFWDIESAIVDRLQRNGFTYTRFVDDVTVSSKSRTEMHKLNTIFKSVFGMFRSKGVKANRKKTNISTSGYRMAVHNLNINSGTPTISTKKRSQIRSAVRGCEKSYQDQKQSEDYKKLWESAIGRVNYLSQFHPTQAQALHKRLQAVLPVS

SEQ ID NO: 3886 - protein, 343 aa, Oceanobacter kriegii
  source 1..343: note = Related to NZ_KE383931.1
MSQNHLSKSLQTPLLAPKFSGTRISSVESLSFVLKTPIDELVSIADTSESYYRIHKEIEKPDGSIRKIYSVREPLKGIQRKINSLILKKCKYPEYLTGSLPNCTHIKNINFHVGQKTIISIDATNFFPSINASDVMNLWAEFFNFESQTSTLLTQLCSFQGGLAQGAPTSSYISNLVFWDVEPLIVQEFHRKGYIYSRYVDDICISKSSRTTKEEKTWAIKTAQKVFISKGLSIKSRKTKIMEKGSRQEVNKKTIHNGKVNASKADKDKIRAEIHNLKIRIDKNLLPDIPYEKRYLSIRGKILYLEKFNKTAAQKLQNQLDELVAYIKSKGVIWRSPKNKYIP

SEQ ID NO: 3887 - protein, 341 aa, unidentified
  source 1..341: note = Related to JADLCU010000112.1; note = Trueperaceae bacterium
MAELEYPFAPIGSLNALARHLGLSRWYLDGAIAKAGPRAYRVRKVTPSDARGVPDKVEYAPAPWLKELQRTINRRLLKAVEMPAYVIGGVPGRRIEDAIQRHACSQALLSFDVRRFYESTSAAEVRKVFMRLLRFPPELTDALLALTTVRGHLPRGAPTSSYLANLVLFDVEPELVDFLSGLQPRALRYSRWVDDINISSPWPIDERLAGEVKDRVSTMLRRHGLSINWTKYRENLRTKSVVVHHVRIEGSRFSVAGSKRRNVRAAVHNLELASQKRPLSASELSELTRQRSRVEFIRPFHPREMEPLRIKLQAIKEKQPGRSKSKDGPDWRSTVWGCTKT

SEQ ID NO: 3888 - protein, 335 aa, unidentified
  source 1..335: note = Related to MGHL01000006.1; note = Candidatus Woesebacteria bacterium RIFCSPLOWO2_01_FULL_44_14
MSTKKQSPELRPLVSLSYLEYLLGTKRDRLQKIATSAGSYYQPFDIHKKGTDKWRHIDNPQHPLKTLQKRILKNILNRNIRRLPDGMTGGISGRSIVENAKIHIGKECIGVIDIKNCFPSTNYHQINQVWIDHFGCGYKTANLLTKLTTFQHRLPQGAPTSPLLCNFALAPVFGEIKAVADSAGLDITIFIDDITVSGSKKSITDSIEPIIKILVKHGYAVRKRKVKVITSNYSQKVTGIPVNRKLSIGRGHIQQIRNLILETASLKGYIPSNDYCKIQGKISFAKSVSKTQGVKLGKFAEKMLVHPLMQVGVKKDEASRDCKRFSDNHKYTERN

SEQ ID NO: 3889 - protein, 326 aa, unidentified
  source 1..326: note = Related to PFRF01000009.1; note = Candidatus Levybacteria bacterium CG_4_9_14_0_2_um_filter_35_21
MNNSLISLKKLEFTLCTSRDELRRIADRVGRLYEPYDLHKKGTDKWRHIDNPHDELKKLQRIINKNVLKKNISLLPERMTGGITGKSIIDNAKNHVGKEYILIVDIKNCFPNTDQLKILHVWRTYFGCGNTTARILTQLTTFQARLPQGAPTSSLLCNFALLPIFRKIDHYASLNNLSFSIFVDDITISGRKADVIKSIKPIIKILKEHDYAVKKKKIKIFASGYSQRTTGINVNKKLSVGRRKLNEIRKLIIESAKLKGYLPSTLINKITGDINFTKQVSPNDGKKLKELANKLLIAPIKIVKSESDCNTRTCNDFKRNHKYILD

SEQ ID NO: 3890 - protein, 325 aa, unidentified
  source 1..325: note = Related to DMZH01000002.1; note = Candidatus Woesebacteria bacterium
MSTLQKTKIKSVAELSQTLKVGVKEFVKTAKNANLFYRPFDLSKKGSEKWRHIDNPTGKLKIIQKAINKQILRDLMFQLPPNIMGGIENKSILENAKVHVGQEMVVTIDIKNCFPKTKNEVIFTIWKNLLGFEPNSARLLTQLTTTKGHLPQGSPASPSLSNLALLPISKEILNYSKKHHLNFTIYVDDITLSGKKSSALDSISPVVKIIQKYGYAIRNKKVKKMPSYKTQTTTGIQLNSEISIGKQKIDEIRKEIINLAKLQKPYITKKSIFSKIDYVKKISPEKGQKLLEFANMILEEDIDYIAVDPEKDEKRDCNGKACLAK

SEQ ID NO: 3891 - protein, 341 aa, unidentified
  source 1..341: note = Related to MGFX01000001.1; note = Candidatus Woesebacteria bacterium RBG_16_42_24
MSGHEHQLNIPSPFPILSVNKLAFILRTKPNELKKLSENAGNYYTPFDRKQIKDNGKVKWRHIDNPAPKLKKIQQKINRVLLKAKVESLPTGMTGGIKGRSIFTNAAQHLNQKAVVTIDLKDCFPRTSNKRIFRVWRNHLGTSECVANILTKLTTFQRRLPQGSPTSSSLCNLALFPLFKKTKRYCQKEKFNLTLYVDDITISGQTIPIRLAIGRIINFIQEEGYAVRRNKIKIMTASVQQKTTGLIVNKQLSVSAKAREEIRKEIFILSRQEMFSSKRMRSLWGKINYIKKVSPKQGGKLASLAHTLLLDTLASHSYENVTSEKEVTRECKNTRRHKYSL

SEQ ID NO: 3892 - protein, 335 aa, unidentified
  source 1..335: note = Related to JADZCA010000099.1; note = Planctomycetes bacterium
MSLARPQIVSWNLIRQVTGFSADELRSVAERAGGLYESRDRLAHKAKKPKWRHIDDPVPELKRIQRALVRGLLRPIPLPAFFCGSVSGRSPVDAIKPHVGRPSILALDLRDFFPRTSHKRVYRAWTRVVGCSPEIAGVLTQLTTLHRRLPQGAPSSPPLANLAFLEIGLAIESACRNAGLRVTFFVDDILISGDQPGTVLDEIIDLLQQSGYGVKRSKMEFMGPRERHAALGAVFNRFISYGRGPFAIIRQRILALIDSAEVTPSQIRSLTGAAHYVRFLNKNQGDKLLALIVQLRPTVEDGPREPKAQWETCRGGNKCKAKPRGSRPLVTTTGS

SEQ ID NO: 3893 - protein, 348 aa, unidentified
  source 1..348: note = Related to JADZDC010000110.1; note = Candidatus Eisenbacteria bacterium
MTQSPAADPGLVPLVSMRRLEQLLGRSREDLIRLAEHAGRYYAPFDEFKPNRAEPRHIDRPVGELKLVQERIQTSILRHIPLPPTMLGGVKRCSIRDNAQYHLGSPLVVTIDLRDCFPRTHDLAVYSAFCRVLGASEKIARLLTKLTTYQHRVPQGAPTSSLLVNWVLLPLHDAIQTIAQGADCRCTFWVDDITVSGPAALDVVEPIVMAIQRHGYSIRHRKLHLMPACRPQEVTGVLVNRHPAARREYRTELRATILQLSSEVEVSARKLERIKGRISHVRHLHPRHGESLDQLLERTMMGRRVDELGACPPKEVRTRVRCNHVRRHRAGRRASARSRADTGGIAGE

SEQ ID NO: 3894 - protein, 357 aa, Hyalangium minutum
  source 1..357: note = Related to NZ_JMCB01000022.1
MSEATARTFYSKAGLGFHLKRDWSTLESLAEHAGAHYRSFDEWMGNKWRHFDVPSKRLADVQREIARFLKARVKFPDTMLGGLKGGSPKKNAEAHRGQGLVFKLDIRDCFPSIGHRRVFRMFREQLKFSDPISNLLTKLTTFQNRLPQGSPASSVIANLVLMELHESIQLECEALGLKCTFFVDDITLSGERVREVIAPVVRLVQRHGFSMRPCKVRLLAAHREKLSVTGVLVNRRRLSVGRTRKNKLRARIHQLSRGERVTDSDLRSIQSSVVQVKHISNHQGETLERLVQEKLPKRGVQTPKERAKKIRRVCKCTHKHRHKRNEESVTATHQPASSVAAGLPRQHFVHTLEAGLR

SEQ ID NO: 3895 - protein, 320 aa, unidentified
  source 1..320: note = Related to JAIOJS010000141.1; note = Thermoanaerobaculia bacterium
MMLSAKPLVSRRELSFRLAFPRDRLESVAERAGRYYRPFDREKKPGAKKWRHIDNPIEPLKWVQKRIGRGILKSVDFPAELTGGLSGRSLVDNARPHIGQPTLVCLDLDSFFPHVNHDRVYDALRRHLGCSGEIANLLTKLTTFQKRLPQGSPASTFLANLVLIDIVEELRAIARDRHLALSCYIDDLTFSGIGAEEAIGDVVAVLKAHHLKISREKLSIAHEHEARSVTGIGVSRRLTKPRDKMLEARDFINSLAASETVSERDLARARGIVAHVGQVNKSQAAYLARRLARLPPAGDDAPQEVEKTKTRRCSSFLRPH

SEQ ID NO: 3896 - protein, 325 aa, unidentified
  source 1..325: note = Related to RFGL01000253.1; note = Acidobacteria bacterium
MINSYSDLSPLVSIRRLERLLGFDRQAIQWIANRAGRYYRPFDVRRVGTRKWRHIDNPQGKLKTIQKRILTNILKTVNFPAAILGGIAGASIKENARVHLGQPILVVIDIKDFFPNITHRKAYSAYKTCLGCSAKIAGLLTKLTTFQRRIPQGAPTSTLLANMSVLTLHDELKELADNLGLRVTFWVDDIAFSGPNADKIIGAAVEIISRHGFAVSSKKIRVMGRGSRQEVTGVPINRKISAGRKYIEELRNSILDFKRTGITAHEFASLRSKISHVRWLCPSQGIKLEEFAKEQLSDLVLSIGCKAAKNEYRKCEDWSRHRREP

SEQ ID NO: 3897 - protein, 327 aa, unidentified
  source 1..327: note = Related to JACQZW010000093.1; note = Acidobacteria bacterium
MAGTAPPAESIFPIKSLRRLERLLCVPREELRFLADAAEHHYRPFDRFRPRADGTVKVRHIDNPVDRLKSVQARINSRLLRTVPFPATMIGGVRRRGPRDGASLHCASPDLVTLDLSNCYPRTTNRQVFAVFRNTLGCSEEVARLLTRLTTRQGHLPQGAPTSGLLSNLCLLDLHQTIAGLAASRGLAFSQYVDDFALSGPGARNALGDILPMFFGHASARLNRSKLRCCGRGSRQEVTGICVNRRTMSARGPKYEALRNRVRSFDPNASDAGTERQAILGAIAHVRSINQLQADSVVRLAERCGLRRDGCRDTPDSVRPVGRAAGD

SEQ ID NO: 3898 - protein, 323 aa, unidentified
  source 1..323: note = Related to JAHJDO010000130.1; note = unidentified bacterium
MSRRKIESLLGEKIEYLEHVASKVGNYYKPFDIYTPGKKPRHIDNPNSDLKKIQKKIKSRVLETVILPETMMGGIKDKSHKDNALRHIDKKVVITLDLKSYFPKTNNRNIYDVFINVFGCNRETAHLFTKLTSYQRRLPQGAPSSTLLANMCVLPMHNDLQELFNRNDITWTFYIDDIAFSGDNADKVIDEAIKIIQNHGQGVSCKKKKIMYANNRQMVTKLCVNRKVGIKKEKINKIREDIINLSWQPNIDNRKLQAIKGSINYVKSICAVRGQSLDNLYKKMLPAKTGLIGKKPKIKTTSCKCSKKHREYVKGVRNISNKE

SEQ ID NO: 3899 - protein, 309 aa, unidentified
  source 1..309: note = Related to CP011806.1; note = Acidobacteria bacterium Mor1
MKSLNQDDNVKLRSMRRLESLLGRSRKDIKRIAENSGRYYRPFPKRQGDKVRTIDNPTGELKQIQKRIQERILTDFELPESMLGGVKGRSIKLNAKLHCGAPTVVHLDLVKCFPRISNKVVYKAFVEHLGCTPRIAGLLTQLTTYRRRLPQGSPASTMLANICLLRMHNELRDVAQTNGSMLSFFVDDIGLSGNRPEVLIEQMIGIVRNHGHSVSHRKRKIMRSHEPQTLTGLSLNRRPLVPRTRRAQVRKQIYHWASQGNCTDELQRIRGAVNFVRWVSEHQGEALERTLSRAQSSTSAESDRSRQGC

SEQ ID NO: 3900 - protein, 303 aa, unidentified
  source 1..303: note = Related to JADFXX010000012.1; note = Candidatus Omnitrophica bacterium
MTSSEQQKSSPNPFPLESPNKFAWIIRVKPHELQEVAAVAESLYNPYFEKKKGKKPRLIHNPSDRLKIIQKKINTWILQKYPFPDFIVGGIKGKALEDHFKLHLRKDIVVTLDIKNCFPSITNKHIYDVFKDKLGALSDTARLATLLTAYKGQLPVGAPTSPLLANLVLLPVLIEIKKLVNSHGFEMSQFIDDSAFSGKRLPVELVSEVCKMMARAGFTISHKKTLVMPKSDSQTVTKRIVNQTPGIPRKEMNRIRSAVNELKNTPKNDPLYGKRLASVKGRVISIRKFYPQVAEKFLQEIGG

SEQ ID NO: 3901 - protein, 312 aa, Sinimarinibacterium flocculans
  source 1..312: note = Related to NZ_QICN01000006.1
MVAAPILSIRDLAARVGTPIERMTEIADDIDSHYRPTALYDEKRGRSRMLNVPRKELKALQQRIHRVILDPIELSACVHGAVSGRSPRTNAEQHLGKPCVICVDVKSFFDSVRHYVVYRMFRNDLGFGRDVARLLTRLTTYDSQLPQGAPTSPAIANLVLAFQVDKPLEAAAASLDLTYTRFVDDIAISGGDPRPLINVAAKLLSARRLKVHRATGRGRLKPKLKIMSGGVQQKITGLVVNSASAPTIPRRYRDQVRAAIHQLREMQSGASFNRSVDSIRGRIAHVRRLHPSGAARLAGELARVIENRRECG

SEQ ID NO: 3902 - protein, 307 aa, unidentified
  source 1..307: note = Related to SCTY01000068.1; note = Betaproteobacteria bacterium
MILVQPILSVRDLAARLGIEAGYLREVGRDIESHYKIQPLKQGAKVRMLAIPQAELKMIQRRINRAILAKVPLAKAVYGGVAGGSPRKNAAEHANQRCVITMDVKHFFPNVRHYMVYRMFRSELGFGRDVASILTRLTTYRSYLPQGAPTSTAVANLLLAAPVDVPMSAEAERQGVRYSRFVDDIAISGENPRPLINKVAKLLSSRRLPVHRRKINGPSKLRIAPSGVAQRITGLIVNAQNGLSVPRERRDKVRAAIYALRRAPKHELKKAVASIRGKITHIAQFNAAAAKRLNTYLDGTLRQRLDG

SEQ ID NO: 3903 - protein, 312 aa, Schlegelella koreensis
  source 1..312: note = Related to JABWMJ010000023.1
MNEPILSLQKLAWRLGVPVNRLRQLADEISRDHREHYNAFALKTGKDKIRQIRPPKEELKAIQRKIVKRVLAPIGLAPTAHGGVPGRSQRSNAELHLGQARVVTVDVKNFFDRVQHRRIYRMFRNEHGFGADVSRLLTRLITLRGSLPQGAPTSPAAANLFLRRAVDEKLGSTLAKLPVTYSRFIDDLTFSGPDPRSLITTVAHLLSECGLTVKKSKVKIAPRHCPQKVTGLLVNSATGGRLTIPRAQREAVRAAIHQLPRLAIRKEWDKQVRSIRGRIAHVERYHPGDGARLRKCLRVALDGQQPKSDAPL

SEQ ID NO: 3904 - protein, 301 aa, unidentified
  source 1..301: note = Related to JADYYY010000015.1; note = Acidobacteria bacterium
MRSPVDHYSDAWLSFELRHPVDRLRLLAGMVPEDLYSVRRVEINRKVRDISNPCDELKAVQRSIRERLLLPIPLSPIVYSDVPGHSAAQNAERHLHQANVGSADIRDCYNSMTNAMVFRVFRHTLRLGDSLADLLTGLTTSRGHLPHGAPTSGALANLILSPIDVELERIAVELDLKITRYVDNIDFSGQRTRHAFLPIVALIQSLGFAVKRRKVFNASRQRVQIVTGRTVSGRVLRLPRAKRANVRANVHEVLCRRRDGLPIQDKQINRLRGRLNYLRTQGHPKEARDLATRLAAVGINI

SEQ ID NO: 3905 - protein, 300 aa, unidentified
  source 1..300: note = Related to MEKY01000029.1; note = Acidobacteria bacterium RIFCSPLOWO2_12_FULL_59_11
MRMPVEHYSERWLSFTLSHPRERLRVLASTAERLYKSGWRDVKGKQRYITEPFEELKIVQRAIREHLLLPIPLSSIVYSDVPGRSATMNAVQHVNQPNVASIDIRDCYPSMTNAMVFRVFRGPVGLGDNLAHTLTRLTTLSGHLPQGTPTSGALANLILSPVDVILEQIAEGLRLVVTRYVDNIDFSGVRSREAILPTIVALQAAGFSVRHKKVMNAGYRRAHVVTGNLVDGCRLRLPHRKRANVRAAVYEIVQRYEDGLPIATKAMNRLRGRLQHLRTQGHPRDAERLAAQLVAAGIAI

SEQ ID NO: 3906 - protein, 304 aa, unidentified
  source 1..304: note = Related to JACKCN010000006.1; note = Candidatus Delongbacteria bacterium
MPYNVKSIKSLAKLLDVDVEELVRIEQNPEKYYEPFEKKRGEKSRSIDNPTGELAALQIRIKKFLLCDVDVFRPIATGGVKGHSTKTSALLHTNKDCVATVDVKSFFPCVTNNKVYKVFCNLGYSPPVSRMLTRITTYKGHLPQGSATSTIIANLALYNFDEYLYNQSLRLGCDCIRFVDDIIISGSYGKVTELVSLVFPALHRMRFSVHRAKKLKIMKSNKRQEVLGLTVNRAVGVTKSYVEEVRTQIACVEKCSVTSCVYLKLVGKIQYIGTTKPIIAGNLMRKLRNSLMRPEKECLASIEQ

SEQ ID NO: 3907 - protein, 337 aa, unidentified
  source 1..337: note = Related to JAIQGL010000020.1; note = Acidobacteriia bacterium
MTVDLPEKNIDLAAAPKLDLLSIRELEFKLGLERGYLRTLAAHAGGHYNPFVKPEKVFPFQRRFKNKKKRIIDNPDEQLRDVQKRIYRRLLRPESLPDYIYGGVTNKCIQDNVNRHLGARMLVTVDIANFFPSVTNEYIYWLWNHVLRCSSEISILLTKLTSFERHLPQGAATSTPLANILICTIDKQIRSECERMGITYSTWVDDLAFSGDDPRRIIPVVIGALRKSGLRLSRKKITIMGPATRKVLNGIVLGKKLGVTREVRSRIRAGIHRLKTGAVPIQDQPKYMRSLIARIRQAETINSSQIQKLRSQLAAVLRDRSIALTERQQFLKQLGCA

SEQ ID NO: 3908 - protein, 318 aa, unidentified
  source 1..318: note = Related to JADJOS010000001.1; note = Acidobacteria bacterium
MSIPQLSIVSVNDLAQRLRIDPKKLRHIAAHAGDYYKPFKQRKKPKPFAKKSKPAKVREIDNPSELLKTIQRRICDNLLCGVPWPEHVFGGIKERNTVKNAKLHLGNEKLVTIDIRSYFPSISNKVIYDIWFRFLGCGSEVSAMLTQLTTFRRRLPQGAPTSTALANLVLISIDGELVEFCRQNSITYTTWVDDLAFSGENAELALEKAISSLRRAGLRVARNKVKVMRGSKPQILMNQTLNNSMGVNKIYRSNVRSAINKLVTHPPLNLKEQFASINSKIRYVDTINKNQARALTKNLNSTLNRIKNSSLSPYTKAI

SEQ ID NO: 3909 - protein, 302 aa, unidentified
  source 1..302: note = Related to QHXL01000591.1; note = Acidobacteria bacterium
MNRNGRNQLRLNIGSLDVLGYALGLSPEDPFIKISNPAPFAADPIEPKQRKIDNPILITKEIQKRINRSLLRPLHLPGHICGGVKGKTLLDNIIPHLNARVIVTADIKGFFPSITTFQVYAIWSRLLGCSPEIAAILTRLTTFERRLPQGAPTSSTLANLILFSFDQPIRSFCAQHGITYTTWVDDLIFSGAESRSVINVAVAALREGGFSLPHKKLKIMTAGKRMRVTGVLLGKKPGVIRRYARDTRAGIYRLTKGDLAEPKVDRYVKSIRGRIAHINRLNPNVARSLDHQFQLALKRAVS

SEQ ID NO: 3910 - protein, 329 aa, Terriglobus roseus
  source 1..329: note = Related to FNSD01000001.1
MTLQRNKRLPLDQLPLRSLRELEHLLGASREALLRLAEWEANYSPFEQAKPLKPHAKKPQTKKLRKIDNPGVELKKIQRRILSRLLLPLNLPNFLFGAVPKRSVREHAAAHLGATTIVKMDIKSYYPNLTNEHVYKVWHEILCCSAPVSKILTKLTTCDFHLPQGAPTSPTLANLFLASIYGPIIQDCVAKDIVATVWVDDLTFSGERSRDVMELVRQTLACNGLRDSRKKRVILTGKSSKLVTGARLGREELRACKLKVREIRAGIHNLKRGKVTTRGRSKDVQSLLGKVGFVRSLCPSDAIPLEKQLRSINVSIPSQAGLTSRSAKG

SEQ ID NO: 3911 - protein, 320 aa, Granulicella sp.
  source 1..320: note = Related to NZ_CP042596.1
MDLPQTKPIVGSLSDLEHRLGIKRGDLAVLLQCRAGLYRPFKIPKKQHPYPGKLRRLKASEPVKYRQIDDPVKQLKDIQRRILATVLSRVELPAYMFGAVSGRTLLGHAKEHVPNQSSIVVRMDISSYYPNITCEHVYYVWNVVLGCPPPIARLLTELTTFDWHLPQGAPTSPAIANIFLASIYAPICLASEQAGLTITTWVDDLIFSGVAAHTVMETVRATLAAHGFKMAPDKREIFGPKDQKNITGTRLGRFEVRVTHKKMSELRAAIFRLAIGALEPGELEKYRRNLSARIAHIATIHKGDAAKVRRHAIKSSVILK

SEQ ID NO: 3912 - protein, 324 aa, unidentified
  source 1..324: note = Related to SOIB01000190.1; note = Candidatus Stahlbacteria bacterium
MMIMKKKNKHKLITISDLALHLGISEGYLQDILSELYSEDTKLYRSWDKIKPNGETRPMDAPRDKLKFIQKRINGRILQRTQISKIATGGVRGRKLKDNLIPHLRQQMVANFDLKRFFPNITNKQVYEIFILIGVSPDVARVLTRLTTFKNRIPQGAPTSSMLANLVAGYGGSHCLDGRIENLCAINNFNLRRWVDDISISGPNYIKKFEPTIEKIIFESGFIPNRDKTAFISKNNAQIITGHLVNEKANVVKQERRRIRAILHKCKTSGLDGYSKNRIDHLKRSLRGKIAHISSINPRSGNKLLDKFNSIEWSSLINEMTNSA

SEQ ID NO: 3913 - protein, 332 aa, unidentified
  source 1..332: note = Related to JAAYAY010000168.1; note = Planctomycetaceae bacterium
MLRIRQVKHLARRLKFPTRVLEKIAEAPELWCEELVLLDPAKPTKPRNVLNVRGQLRQLQSRMLRSILLPVLPVSQFSHGSTRQRHIKSNIEPHLRSTFAFTTDIADFYPSVSHNRVYRLFAKTLECSPDVARVCTKLCTYDHHLALGLITSPILADQTMHQIDRRIGLACWKAKLVYTRYVDDLTISGGYDLAKSGFANLVQGILEEHGFAVNPDKHRFGRLEEGTTITKIRVNRGHPDVRRQYVTELERQIEDAHRLAVDEQFDGPYYTEGQIWGRIQFVSWVNPGRQRALVRKFRAVPWNKVKEVAECRGLVCLKKVLSKRILASPGTV

SEQ ID NO: 3914 - protein, 327 aa, unidentified
  source 1..327: note = Related to JABMRQ010001902.1; note = Planctomycetes bacterium
MLNIQQVKHLAHRLGVSVKHLEEVAESPEGYCEELVLLDPAKPEKPRDVLDVRGPLRKMQLQLLREVLLPKLPISAHSHGGVRGRHIKSNVTPHLDSTFVFGTDISDFYPGIKHNRVYRLFTQQFGCAPDVARICTKLCTYQYHLALGLITSPILADQVMGPIDERIGTACRKAKLVYTRYVDDLTISGPFDLHENKSGIAGLVQRILNDHGFATNPSKNSFGRLADGVPITKIRVKRGHLDVRGEYVKELERQLADAASLANGGDFDGPYYTESQIRGRVQFVCWVNPGRKRELMRHFHVVPWDKVGQEAVRRGLVATKKVLMKRT

SEQ ID NO: 3915 - protein, 337 aa, unidentified
  source 1..337: note = Related to NZ_CP063458.1; note = Proposed Humisphaera borealis
MLNLKTPKNLAYRLGVSLSVLRDVADRPDDWIETLLLNDPTRPNKQREVLNVKGKLKQIQTRLLRVVLLPVLNVSPYSHGGISGRNIKTNASCHLNANYLFSADISNFYPSIGHRRVYQLFSKRLNCSPDVSRLCTKLTTYDYKLALGLPTSPILADQLFHPIDARIAGACRSMGLSYSRFVDDIAISGSFDLSPESCGVSALLERIVTGNGFELQLEKSRFGRLSEDEMTITQLRVRNGRLDVREQYVLELERQLADAGELSNDRHFDGPFYTESQVRGRVQFVGWINRDRKRQLLQRFREVNWTQAMAVGRSRGLVVQKKTLIRMQKSDLDSTET

SEQ ID NO: 3916 - protein, 331 aa, Lacipirellula parvula
  source 1..331: note = Related to NZ_AP021861.1
MLKIRQVKHLASALSTTPAEMAAVLKSPADFYEELELRDPSRPDKPRIVVNVTGALRALQSKLYRRILLPKLSQSAHSHGGVSGRSIKTNVEPHLGSKFVFKTDIANFYPSIHFRRVYKLFVEDFECSPDVASVCTKISTYRHHLALGLICSPMLADQVLRRVDRRIGGACAGLGLVYTRYVDDVAISGPFNIETSGLPRLVEDILAKDGFKANADKHLFGSLAEDLSITSLREVRGHLDVRREYLDELERQIDDAASLARDGEFIGPYFTSEQILGRVRFVCWVNPGRRRSLISRFRTVKWKKARKVAKRRGYEVTRKTLTKLPRREEPS

SEQ ID NO: 3917 - protein, 330 aa, unidentified
  source 1..330: note = Related to PABB01000067.1; note = Planctomycetaceae bacterium
MLRIRQTKHLLETLGVSSDELSAILANPSDYYEELLLTDPQKPHKPRAVVNVTGRLRTLQSRLYRRVLLTKLCPSIHSHGGVRGRSIKTNAEPHLGSAFVFRTDISDFYPSIHFRRVYRLFAERLECSPDVARICTKICTYRHHLALGLICSPILADQVLARVDRRLGGACAKENLTYTRYVDDIAISGPFDFEKSGFANLVQRILATDGFKVNPQKHVFGSLAKDCTITNLREVRGHLDVRHEYVEELQRQLADASSLAQDREFEGPYYTFGQILGRVRFVCWVNPGRRRDLMLRLRSVNWRTVKAIARKRGYEVSKKTLSKRDGPLAQ

SEQ ID NO: 3918 - protein, 330 aa, Paludisphaera sp.
  source 1..330: note = Related to NZ_JAHPZK010000007.1
MLNVRSERCLADILGVTVHALKVDLGRLNRDVREFQLIDPARPDKVREVIQIVGAWRRHLDRLMERLLLPRITPSIHNHGGVKGRSIFTNASAHAENVYVYTADVRDFFPSIHHRRVYRLFFGRFGCSPDVASICTRLCTHNYHLAVGLPSSPLLADQAMREVDERIHGACQSAGLTYTRFVDDLTISGGFDFAGSGFLKLLPRILEKHGFRLNPRKIEIGRLDDGPQVTKLWVNRGRPDVAREFIQRLMEQMEDAERLANGGDFVGPYFTPDQIYGRVCFVRSIRWGRGRDLMRRYRSVQWSKVEAEAGRLGLVAERKRLIPKPKEEAG

SEQ ID NO: 3919 - protein, 334 aa, Gimesia sp.
  source 1..334: note = Related to PBQK01000137.1
MLHIGYDKLLARMLGTTRAELNDILDNADEYFDELSLFNPEKPDKPRDVISVRGKLRTFQAKFYRKVLLRKLSVSPHSHGGVKGRNIKTNAKPHLNSRYIYKIDLQDFFPSIKQPRIYRLFNSKFACSPPVAKLCTRLCTYEHHLALGLITSPILADQIMQSVDTRIGSMCDNAKLEYTRFVDDLTISGPFDFEESGIPDLINQILLESGLTPNPKKYVYGKIDNGISITGIRKNQEGKIDVEEEYALKVEEQLEASKSLELGNWPDLSCLYHTPAQIRGRIDHIKWINESRGKKLLNIYKKINWSRVDEEARKLKLVVSKKRLTKKTKTLLVD

SEQ ID NO: 3920 - protein, 337 aa, unidentified
  source 1..337: note = Related to NZ_WRPR01000072.1; note = Candidatus Laterigemmans baculatus
MLNLWRLDQLCRLLKTDPEKLASALESPSKFIKELLLCDPAGEKRPRRVIDVSGDLRLVQERFYRRVLLQRLWPSHNSHGGIRGRSIKSNVIAHAGSRFAFKSDIRNFYPSIHRRRVYRLFADRLHCSADVARACTALTTFNHHLALGLVSSPILADQILCPIDNRIAEACKSIGVVYTRFVDDITLSARYDLRRSNVASIVRKILGDHGFEIHPGKEAFGRLEDLAITGIRMRDSKLDVTREYADRLDQQLKDAKSLADGAHFDGPFQTFNQLRGKVQFVGWVNPGRKAYLMRRLFSIGREKYRREAINRGLVASKTGLMSLDPTPAAQLRVFTPG

SEQ ID NO: 3921 - protein, 343 aa, Rhodopirellula sp.
  source 1..343: note = Related to LECT01000054.1
MSSIGMDAKLFSLHRPRQVADRLGLDESWLLRLSEELRTAEGRSNYIREFTLFDPRPGKKPRDIISVRGDLRLAQRRLHQRLLSHSIEPTPYSHGGVRGRSIKTNAGQHARNRFVYLTDIANFYPSIHSSRINDFFKSNGCLPAVARLLTSLTTLDYHLALGLITSPILAEAIIQPVDRRIAVACDRQGLVYSRYVDDICISSKHSLHGSGIDATVRTILRQSGFKVRVSKDRFIRVDEGCAVTGVRIHRGRLSVTPSYIGELETDLSSALSFARGGHHTGLFFTKEQLWGRVQFVRWINPGRAKPLIRLFRQIPWRRYRVAASQSGLIAAKAFFAERKSYVL

SEQ ID NO: 3922 - protein, 332 aa, Pirellula sp.
  source 1..332: note = Related to JAJTEK010000018.1
MQNPATRSKYINEFTIVDPREDRKPRDVISIRGDFRTVQRRIYQRILSQVIKPGPSSHGGIRGKSIKSNAEAHLGNVYAYQTDIANFFPSIHRDRVRSVLQNYVGSRDVAELLAQLVTLDDHLALGLVTSPILAEAVIQPVDTRISGACRKMGLTYSRFVDDICISGSFPIDKSCIPRMVRGILQNNGFKIRPEKDRFVSLSTDLFSLTGIEIRKNRLRVPQRYINDLVHDLESANAIAMGCEHPVTLYYTREQIVGRIQFVRWVNKGQSSILVKKFKKINWRLHSKQALLRGLIVLKPRSVDRSSGAVSDGTVVGESTPLQSKKRSIKSVD

SEQ ID NO: 3923 - protein, 328 aa, unidentified
  source 1..328: note = Related to JAAYCR010000064.1; note = Phycisphaerae bacterium
MESSNLQAMNCKTLRIRTIPHLANQLGIHENGLIDVAENTERYYRDFKRNVKGKDRDLVMSINPLAMLQRRILDRILHRLPISDYAYGAIKGRSILDNAKKHSNSLFIAKFDVKSFYPSVRYQKIYDFFMGQECAPDVSRILTLLTTRKYSLPLGTSTSPMLADQVIQPLDKRICGMAAKAGLKYTRYVDDITISGSYPVEQFTDLVIEIIRQNGFKVKQSKIDVYAPGDGKERIICGVRVQNGKVSASTDYIKTLRGELLKAIQQSQHRDISGDFDTRNQYRGRIGFVMWLDRPEGLKLLSLYRKVKWRHLEWILYERNKSPQKTSL

SEQ ID NO: 3924 - protein, 322 aa, unidentified
  source 1..322: note = Related to JAFGPY010000231.1; note = Planctomycetes bacterium
MEPDSPSSDGLRIQRIEHLASQLGFPVDRLVDCAEHAGDFYHDFKRNVKGKDRDLTMARPPLSVLQRRILDRILCRLPVSEHAFGAIKGRSIRDNAVAHARAPFVAKLDIRDFYPSIRYQKIYDFFMAQGCSPDVARTLTLLTTRNYSLPLGTSTSPFLADQVVHPIDTRIGGLAKAKGLRYTRYVDDVTLSGPFDLEQLAKQIVTIIRQAGFAIKRTKMEFYRPDDGKERIITGVRVQDGKVSAPSNYIELLKRDLVLARKASLHEVVHQDFDTRDQFRGKIGYVMWLDPKAGRKLIRLYRKVKWSHFEYATSRRKSMAKV

SEQ ID NO: 3925 - protein, 319 aa, unidentified
  source 1..319: note = Related to JAFGTU010000518.1; note = Sedimentisphaerales bacterium
MIKRIVDKLRIVEVKHLSMHLGSTPVELAHVCSSISRHPSQYYRWWNKCFPNGKTRPMVEVRGRLREILDRLNDLLQHVCLPEYVNGGVPGRSVLSNAMPHLNKPMLMKTDLANHFPRVSPGRVYAMFRKQQECSPEVARILTRLTTQSGGLPQGSPTSVAVSNLVTLGLSRRLRRFAEARGAVLTQYVDDYIFSGGKRLAGCKEKIISIVKQEGFKANEAKTVSVPADKEQIVTGIRVNGSQMDAPSSKVADVRKAIRRLRCELEVTGSVPTKRIKSIEGKISYIAAYNRGTGKYLRRQLDHIKTPGVRIAGREEIAG

SEQ ID NO: 3926 - protein, 314 aa, unidentified
  source 1..314: note = Related to JADHYA010000193.1; note = Phycisphaerae bacterium
MKRRIYNLRIRDVQHLAKLLSTTPQELHALCDTVASHPKRYYVQWSKPTKKGKIRPMVKIHGRLRAILDQLKSLLHTIALPSHVHGGVPKRSTYTNAIPHLGKPMLLRIDLQNHFPSVSHHKVYAMFRNEQGCTPDVARLLTRLTTLNGGLPQGSPTSTIISNLVTLHLSKRLRGFAQSRGAGCTQYVDDYTFSGERRLAKHSGRIVSIVAQEGFKANPTKTIAVPADCEQVTTGIRVNGKQADVPTSNLKDIRSDLNSLDKQIALGSKSSEKIIKRIEGKIRYVRRWNPGAAKSLTRKLTRITLKPATSASTV

SEQ ID NO: 3927 - protein, 321 aa, Niabella hibiscisoli
  source 1..321: note = Related to NZ_JAKWBK010000001.1
MAFHQGTTMVCNNLDNYQENGLSPINFMISTKAALYNTLKFTEKHIWYIIKNIAKHYKEKEVDKTKYGKPQLDKNGSIRKRNLRIPTYPLDRIQKTIHEFITAQSAFPDYMYGSIRGRNHIQNAFRHCNNVYFLKVDLKNFFPNISHRQVYGSLVKFGLPHDIARIVTPLTTVEGKLPQGAPTSCIIANLVLQNVARRLHDFARTNNLTFTCYLDDLTFSSKEDFRALNEKILNIIKEEGFFPSPKKISYRKISCEITGIIVKNNTLDLIHEMKREALTNLHIYHYYMSFLKQRDSLFNLSYPNTFSNAFLGAPRNITSPQ

SEQ ID NO: 3928 - protein, 306 aa, unidentified
  source 1..306: note = Related to JAFLBK010000001.1; note = Chitinophagales bacterium
MIKSVHNLYSFLGLTPGELDSITSRITENYYQRSRPKIKYGEFQRDDSGNIKYRDLLIPSYLLKSRQQRIARLLSGITLPVYMFGSIKERSNIQNARQHLNHQYFFTLDLKKFFPNINHRQVNMMLCENGFSFSVSRILTQLTTYQASLPQGAPSSPVIANLVFMPTGNRLNELAKMNNIIFTTFLDDLTFSSDHCFKKRIPEIIKIVKQGGFYPAYDKMHYRKGYSEVTGLFVKGDRLELPYSMNKKTRENHHIKSYKEQVRKYNSVRPCLIKHCKKDLRLFEANKKGHRLVTLAPLQNLPTGGL

SEQ ID NO: 3929 - protein, 303 aa, unidentified
  source 1..303: note = Related to JADKIE010000002.1; note = Chitinophagaceae bacterium
MPQKEMINTLTHLAFELKFKLPEIESIINNIDKFYYEKVEIKPDKFGNPKLKNGVIQKRVLNPSITRLKLLQKNIQRNILLKLEMPDYAFGAVKGKDNVQNAKQHQGKKYIFTTDLKSFFPSINHKRVFEMFRSFNFSPTVARVLTQLTTFKGRLPQGAPTSPTVANLVFVKTGKKLLEFAKENKLTFTSFVDDLTFSAPTDFKSKAQFIIETLQADGFKISHNKTNYKTKMPVVTGVVVKNNKLSLTDNFKIKLNNTEDSTPERIKGLQQYAAKVAKTNSSPLLTAIRQPLTGGLALLGQTW

SEQ ID NO: 3930 - protein, 311 aa, unidentified
  source 1..311: note = Related to JADJTY010000010.1; note = Chitinophagaceae bacterium
MNSSQFKKNEFKKLCATIGFKPAQVEELISKLDTYYKEWVEQKTDKKTGDFKRYKDGTIKQRTIRPSLKELKVIQTNIKTRILAPIALPNSVHGGVKKRSNISNAKPHQGNKYQFTTDLQEFYPNIDFKRVYNTFIGLKFSPHYAHWLTKLTTWKYELPQGTPTSTHIANLVFLETDIKLIDLCNKNGITYTRYVDDLTFSSQQDFRHLLNDILQIVTSGGFKLSYRKTKYSDNQTITGINVFLNKIDAPEKIIEKANAEKNTKFNTKPFTNYLNNIRKTNRAKRKPATNKSIAAIGAGRKPNHQQCISKL

SEQ ID NO: 3931 - protein, 300 aa, Chryseobacterium sp.
  source 1..300: note = Related to DMPU01000444.1
MNSSQFKINEFKKICSIVCFKPNEVENIAKNLDKYYKEWIEKKLDKKTGLPKKYLDGTEKQRTIRPSQKELKLIQSRIKNKILVPIKLPAEIHGGVKGCSNITNAKPHQGNKYVFTTDLQEFYPNITSQRVYDTFCKLKFSPHFSHWLTNLTTWKYELPQGTPTSTHIANLVFLDTDIKLIELCNANNITYTRYVDDLTFSSQQDFKHLLNPILDIVTSGNFKLSYRKTQYKGKQTITGVDVFLNKIDAPEKIIQKSKIEVDTKADLKPYTIYLNNIRKTNSLRKSLPPTLGLAKVGRTE

SEQ ID NO: 3932 - protein, 316 aa, Chitinophaga silvatica
  source 1..316: note = Related to NZ_QPMM01000003.1
MIKSLRHLEAVIGYKLKDIDAVLDNLHKYYNSFSRTKKSGKKRDIDSSENILRDLHNRINDRIFSQISLPYHVTGSVKYRSAVLNAKYHSGKKYHFQTDLVGYFQFVSNRLVYSTLVSFGFSADVASYITKITTYKGHVPQGVPTSPFLCNVVGLRILDGEILEFCKSRSIIYTRYIDDLTFSSDVDIKDFIPDILQIINNKNFLYSHRKTIYKAGDIVVTGVLTTCNGLKMPERLIEKMSNEVDIIKRKGYENFANQIQRIHKLGTLNAIVDRQRELVFPGRLKDRKKKNASSAVLDLVSLENKKLEIEREINLY

SEQ ID NO: 3933 - protein, 302 aa, unidentified
  source 1..302: note = Related to JAFDXL010000007.1; note = Bacteroidetes bacterium
MIKSKKIFSLVLGYELKTIDNIIECLEDEQKRGKYYNPYKVKKSGGKFRVIAPSRGELKKIQARIHENIFSHIQLPFYVTGSLKRRSGVINGKIHSGKKYHFQTDLVNFFGFVSYRNVLKALKMLGFSHDVAFYITKLTTYDGHLPQGVCTSPFLANLVGLNIDDAMLDFCKSRNITYSRYVDDLTFSSQSDFKDELKIFLSGIIAQGFIYSYRKTKYKIGSIDVTGTKVTNEGIKGTDKQYGRALLIDTKSSSFKGLVGHLEYVEEINDKFNLTTYRNENIFLRFPTRLFPYMNFKKKESK

SEQ ID NO: 3934 - protein, 312 aa, unidentified
  source 1..312: note = Related to JACPSJ010000001.1; note = Candidatus Kerfeldbacteria bacterium
MGGFDYASSLRLDGLAAALGVTVSFLEKLQIYPGAYYDDFAKKKDGGLRKIVKVDWPVRRLQERLHHNVFGKIKLPDFVECQSGRSSIDHALRHKNQTQIITFDIESYFPSITYRRVRQTLAFFGFNQLVSAVIARITIRDGSLPQGTPTSTDIANFVGTFLDRRLLGLCEKHNWVYSRYVDDVAISGFKNMGWAKKLINKIIISEGFRISTKQGGLSVTMVKDVPLVTGVRINKTFIQAPKEYYRSVRQKIYLWQKFGYESAYPGFSKKQSISKLHGKVHYLMYLDKVSKRFNGQGYQLFKQFQKLHKDPA

SEQ ID NO: 3935 - protein, 305 aa, Pseudodesulfovibrio alkaliphilus
  source 1..305: note = Related to WODC01000002.1
MSLPSSLTKWTPSLVTPPDPLCPIVGIKSPKSLARILGYPLSQLEELCGNIESNYHKKEITKKNGAVRVLSVPSGALRKVQTAILRQLQKHPLHPAAYGAVQRRCHIDNAKRHAAAPYVYCLDFSSFFPSISSNRIYKLLAEQLGCSPPVSNILTKLTTYKYKLPTGSPTSPVLTNILCFPLDNRLNSLACDYGLTYTRFIDDLTFSGRRIPEGFIRKTKEIITSFGLLLNDEKEELFTPYKGKLVTGINVNTNKVRVSRYYKKSVRAQKHQFGLFKDYMTDSEKSKEESRIDGKEQYIRLVQRR

SEQ ID NO: 3936 - protein, 302 aa, unidentified
  source 1..302: note = Related to nan
MSHLHFPINTVSELSTLLSMPIRDLWRLAKNTDKSYFTWKEPKSSGGFRSLCTPDSRLKEVQKKLHKLVFSKIIHSRFSHYGLKKKSNVTNASEHYGNDVIFAFDLKSFFPSIRPERVRKALIDEVGCPAPLASLITKLVTLNYQLPQGAPTSTDIANIVTFRLQRRLYSLAKQWGIKKFTIYADDITFSGNNIPHGFMKLAKKVVREEGYKIHPEKGGVFDKSGNQIITGINITHGLTVGKMNKIWRAERHQNFLQYLKGQLPTTEFDSSEKRFNSRIVYSNFIKKSGLKVADNYLSSAYK

SEQ ID NO: 3937 - protein, 466 aa, unidentified
  source 1..466: note = Related to AMFJ01036084.1; note = bacterium (gcode 4)
MEKWCILPNNLIQKLNKDDVIVASLTRFCKCSTDELFAVLKNRSKENRWWWYGYTQYTKNNGKKIRTISVPRKNLKKIQEAIKDRLDQIPVSLASTAWKIGDSAEKNIELHKHNLYLLSMDIKNAYPSITTHRVYKNLQWALPLKYRCPQLITDEDKDIFIRTITHLCVHDNQLPQWASTSGQIQNIVFSSLDIQIEKKIPELVWSHMVYSRYADDMAISFPHFSTLEILKEKMEKYIQTLKKHRERRSILLDEFSKDTFIVTDNFEQKYLQKKIEDIKELMKWSWLPDEEIYKHIGTLDAYKKNIKYSTWRISDIHDEILKVIWWEWRKINNIKTNMRTPQSDREREINGITLDEEGNKWLNKRKRAQYLKIFNHLIKHSQNDLKGFTFYREKFNTLENFDICSSTITQIIDGIYHRIARIYGTGRIPKPLHEAYQKAKHKRSSHEIYLTYLPNNSDTNNEELLF

SEQ ID NO: 3938 - protein, 321 aa, unidentified
  source 1..321: note = Related to JAGCVL010000005.1; note = Candidatus Saccharibacteria bacterium
MRNNEIRTLKRLCSLLHLKEEYILDLASRANSCYYSYDKKSRKKDGTAKIRHIDSPNIELKNIQKKIDSAIIKPYVNLLPDYIHGARTGKSIVTNATNHAGYEAILSLDIENCFPSITSKRIYYIFRNTIHCSDKVASVLTTLTTKDGVLPQGCPTSASLCNLVLVQMIEKLSEIDGSLDYNISHYIDDIFYSGRYCDLQKIRKPAMTEIGKNGFRPNTKKTLLVKNGRPMKVTGITVNTKVSAGRRRIRKIQRKILKITEKDKAEYDIVLKNRKRNNNSKIKACKIEKLFGEISNVISINKEQGYKLKKKIEAKLNDLIT

SEQ ID NO: 3939 - protein, 326 aa, unidentified
  source 1..326: note = Related to JAHBWW010000006.1; note = Phycisphaeraceae bacterium
MRQEPPTIRRPLEPRVVTIQQLAALVNLPVNQLDRFVLEAPKLYSSFEVPKPNGKTRTIRPPARPLRDLQRMLLEVLQECVRYPRWLMGGVPKRSIFDHAKPHVGWKMVATFDVKAFFPSTRSAMIRPVLERIGISDAAADAVLRLVIKDDELPQGSPTSGFLANLTLEPADRRIDALCRRHGLNFTRYVDDMAISGNTDLTKFQGAIVEAVKESGYEVAPEKIHYMDRSKTQLITKLRVNDKIRPTREFIAEVKADIWECLNVGAAVVAIERGVQLHRLKSSLTGKVSHIRSADREAGEKLKGMLYGVDWNQQLHTKFDVPSLTA

SEQ ID NO: 3940 - protein, 317 aa, unidentified
  source 1..317: note = Related to JACKHF010000001.1; note = Phycisphaeraceae bacterium
MRAEPPVVRYNRSLQISTLDQVAGWVGVELSPLSDTINRASTMYSCFEIKKPNGGSRTIRPPNKVLRTLQHNILRELQSMVRYPRWMMGGIPRRSIFLHAGPHVAKRMVATFDVKSFYPSTNSCLVRSVLERLGFSGEALDAMVQILIKDDELPQGGPASGLIANLALEPADRRIDAICRKHDLRFTRYVDDIAISGEHDLRVYQGAIIDAIGLCGYEVAPDKIKFMGKEQCQVITKLVVNEQLRPSKSFIFEVKAKIRECLANGAFVVAVEHGISVPQLKSKLNGKVSHIKQADQRLGKSLQRKLNGVNWSRQLPD

SEQ ID NO: 3941 - protein, 318 aa, unidentified
  source 1..318: note = Related to JAHBXR010000005.1; note = Pirellulales bacterium
MNMLSQHTMQQNDWPPPISTRERLARTLNVSPVVIGEFVAEPARWYSQFTVPKPSGGNRIIQPPKKPLRRVQRALLRLLYSRLQVPPYLHGGVPKRSILTHARSHLGRKMVATLDVKNFFPSTQQKFVQPIFEMAGIVDEALTDALAITMLAEGLPQGAPTSSLLANLAFVPVDKAVIALCRSRNLSFSRYVDDIALSGNVDFRELKGPLIDRIHAAEYEIAEHKVRFMPASERQVVTGLVVNQKLRPTAEFVATLKSDIRVCLGHGVDFLADSEGISTRGMRMRLSGRAAHIAAADPKLGKRIRGMLCGVKWTTASR

SEQ ID NO: 3942 - protein, 319 aa, Symmachiella dynata
  source 1..319: note = Related to NZ_CP036270.1
MPIQLHATRKAANLVSNLDGLGKLLGFPVVRLNAVIECPSRHYSSFDVPKKNGGVRTIEPPHRPLREIQRSLLNRLYRRIKIPKHIHGGVPRRSIFTFARPHVGKSMVATLDIKDFFPSVGPSHLEPVFFQLGFRGEALNAVVSLTMLRDCLPQGAPTSCLLANLSFSNADASFNAVCRKRNLLYGRFVDDIAISGNVDFGELRGTFLGIIEAKDFQAAEDKIHFYAQSQRQIVTGLVLNEKLRPTREYVASLKQRIHNCRTFGPTFIANSDGLTVRKLKNSLTSSARFVGQSDPKLGKKLRGLLCSVAWGASTNRFSD

SEQ ID NO: 3943 - protein, 348 aa, unidentified
  source 1..348: note = Related to JAGQOA010000100.1; note = Planctomycetes bacterium
MSYRHLLKPGARRAEALVDVDGLARACGQDATRLRRLRENLPSAYGRIERPKPKGGFRIIRPPRQDLKEVQRGLLDWLETRFTAKPWMHGGVAQRSIISHAQPHCGKAMVAVLDVRDFFGSVRRERLAALLTAAGLEGEALETLLDLVTLDDTLPQGAPTSCLLANLAFFPADQRFRRVSAKRGLVYTRYLDDLALSGDEDFKELRGPLVEALTLEGFQVAAEKVAFMGRHEPQVVTGLVVNDRLRPTRAFREALIAEINDCQIEGLGARSDRLGTNPQRLRARLLGQIRHLARFDPAPARRLERRLRSAPGGRATQSSRARRRTSKASSSSSAYLAQESSEPPSRRA

SEQ ID NO: 3944 - protein, 327 aa, unidentified
  source 1..327: note = Related to nan
MHYELLRRRPAQDALADVSDLARALLLPRKGLCELAENTESHYIEIRIPKRHGGLRRIHAPDPSLKKAQRAVLRLLEDRMVPKSWMHGGVTGRSIVTHAAPHCGRCWVAVLDLADFFPSVRRSRVQAILEAAGFTGDALKVLLALTTLGGALPQGAPTSSHLANLALFPLDRRLRSLARRWGLTYSRYLDDIALSGKRPLRPLKGPLHDAVIREGFRPSPSKTAFMGRHEPQVVTGLLVNDRLRPVKSYRRALVEEVEACRQDGPKVRAALQGISVARYRSRILGRIRHWARFDAEKAERLERRFRHLPRPGAAARETDGREKVGLR

SEQ ID NO: 3945 - protein, 302 aa, unidentified
  source 1..302: note = Related to JACKGY010000008.1; note = Planctomycetes bacterium
MWRVLNDDFAHWSPRRLAELLGRDLDRLVQLTEGTAGRYRAIRLPKRGGGHRELAVPEPELKALQHDLMVLLDRALEAPPWVLGGRRGRSFVDHAARHQGRSWLLTVDVADFFGRIGPALVAPVLREFGLPEASITLIVALAFRHGALPQGAPSSPLLANLAMAPIDLRLRRLARRRGLAFSRYFDDLAFSGDRDFGELRGPIAALLRQAGLPLAEHKTRYTGRDRPQVVTGLVVNDRLRPTRSFRGELEEELRLLQGGALPRPRLEARVEGRLHHLARFDRREADRLRRRYGRALPSSSSS

SEQ ID NO: 3946 - protein, 310 aa, unidentified
  source 1..310: note = Related to MFNO01000025.1; note = Candidatus Levybacteria bacterium RIFCSPHIGHO2_01_FULL_38_26
MLKIVPLKLNSIAEIENILGFSFDKIKKIVENKNNFYSKVSIVIKGKMRILDIPNSSLKIIQGKLAHYFGENVVWPYYVQGGVRNRSVKTNARQHSGKKFVLNLDIKDFFPSITTKMVKNSLMELGLNQKVSTLISELSTYENRVPQGSPSSTYVANMFFLKIDKLINNFCKKHSLIYTRFVDDLTISGKNNIFPYKGTIIQYIARNRLIVSEKKTTIRSSSEKQIVTKLVVNDKIRPDKKYILTLKKDIRETWKGNEGIRKVALKNNITMPKVKGNLWGRTNYIRQFDKKIGREVRALLVKSNFVDVSS

SEQ ID NO: 3947 - protein, 323 aa, unidentified
  source 1..323: note = Related to MHGR01000114.1; note = Omnitrophica WOR_2 bacterium RIFCSPHIGHO2_02_FULL_52_10
MKLLKFLFDITLNLTIHPHKSLKPHQIQTEQDVARLANQEVSALQEIISNKEEHYGFFRQEKKDGTLRDIHPPRKKLKLIQRKIKKFFDHFPWPRYVQGGIRKRSILSNARLHCGKKMVAWLDIRKFFPSTNPSMVLESLEKIGIGKAASKLIVELGTYKNALPQGSPASVSLANLVFLDADDRFELFCKKHRLIYSRYIDDISISGDIDFRPHKGQFLKFIEQKGYVVAKDKIDFIGRDRPQIVNNLVVNDKVRPNKDFINDLKNDIRCCWTEEGMELLAADFGLLPRELQRSLWGRINFTKQFDPKLYKDLKAIMIGAFFK

SEQ ID NO: 3948 - protein, 313 aa, unidentified
  source 1..313: note = Related to JAAZNU010000228.1; note = Veillonellaceae bacterium
MPEKRTEGIKQITQECVATLESILKNKSALYYEFKIPKKSGESRVITPSKPPLKNIQHRINKYFARKQFPACVHGYVRNRNVLTNAQSHVGKKWVITIDLKDFFPSCDTIKISQAFLNIFSNDQTINLLTELVTFNNQLPQGTPTSPIISNLVLHNLDQEFVRLSKKHGFTYTRYADDLTLSTNGKNPHDFLKAFTDIITSNGFKINPDKLKVMPCSARQIVTGFVVNKYDGNGFLKPTKKYISDFKILIRNCYQLNMFQQIAADQGKTVPKLKRSIEGKILYIKHANPALAREISNLRYPLKPSATEITVNI

SEQ ID NO: 3949 - protein, 383 aa, unidentified
  source 1..383: note = Related to JADJQZ010000001.1; note = Candidatus Obscuribacter sp.
MTHQDSKLTIDDIGNKLGVTPQFLLEAASAASTQYELFDLPKKSGGTRTICSPKNELKRLQRTILEELLHTFAMPDYVHGCVKGRSIVTNAKPHTNKPLVLTIDIKDFFGSINPEQINRIFRISFNCDDKSAEVLTALTTYGTFLPQGAPTSPALANIAALPLDAAILDICEQSGLQFSYTRYVDDITISGDNRLALMLASFYKTVSAHGFTASPGKLRVGRPSNRQKVTGIIVNKKMAPPKKLIRKIRQQLYYCEKFGIEDHCRKEGIEEQEFLNQINGMLGFIRLTQPTTADLFKIKLTTLQGYTFVSVDESVLLILKHAVEEEKHVNFVYHGSTRKVAPVEVFIDDEGMKFMRGYQTVPEQKWERYMIPDIQSLRLSENA

SEQ ID NO: 3950 - protein, 383 aa, unidentified
  source 1..383: note = Related to JADKJY010000001.1; note = Candidatus Obscuribacter sp.
MTHQKSKLTIDDIGKRLGLTPQFLFEAAKTAETQYELFDLPKKSGGARTICTPKGELKRVQRAILEELLQQFEMPEFVHGCVKGRSIVTNAKPHVDKPLVLKIDIKDFFGSIKPARVLEIYKDIFDCDEKSAEALTALTTYGNFLPQGAPTSPALANLVALPLDRTLLDICEQSGLQYDYTRYVDDITISGDSRLGQLLAAFYKAIQHHGFIASPGKLKVSRPCNRQKVTGIIVNKKMAPPKKLIRKIRQQLYYCEKFGLEDHCQKEGIEEEEFLDRINGMLGFIRLTQPVTADLFKSKLTRLQKFELVDQDESILLLLKLAVEEERHVIFSYHEATRKVAPVEIFIDDDGFKFMRGYQTMPEPKWERYLIPDIRSLRIFEKL

SEQ ID NO: 3951 - protein, 404 aa, unidentified
  source 1..404: note = Related to JAFEAT010000019.1; note = Cyanobacteria bacterium SZAS-4
MTSNLSLTLTDLCDELELPSQFVLDLANSAEDEKRYHSYKRLKKSGGARYINASVGSLKRLQRSIHERILSRHKMPEHLHGGIKGRSIVTNAAAHVGKKLVINIDLTDFFSTIKVAVVKQIYMRDLHFDDETATVLAQVSTFKGALPTGAPTSSALANLAGLVVDDAVISTLTKKIERTEFGYSRYVDDITISGDDRIVEILPDIFEAVKSAGFTCNDKKTRILRRSTRQWVTGVVVNRKLNPPKNIVRKIRQYLYYMHRWGVEEHCETHGINPYRFMRQITGYIAYVRLTQPELADEFLRSLKPHLARFHQVDEESAPSTLNILKVMIDKEEIAHFLYDREDRAVNHPSYEPVAVSVAPESLDVDDDGTLTMRGFELAPKQRWGIYHLESISALSDKPLTDVT

SEQ ID NO: 3952 - protein, 438 aa, unidentified
  source 1..438: note = Related to MEZY01000015.1; note = Candidatus Berkelbacteria bacterium RIFOXYA2_FULL_43_10
MHSLALEAVIADLGKENCRAALTLLAEMVGVERQAILDCLELLNRHGEVEDGERVVAYTSFYRPKKSGGKRLIIAPVEPIKDLLRKVKDEILCRSSLPRFVHGYRTRRSWLTNARVHFDAGAVYAINLDIKDCFPSTKIQLVRRVYWQTTGRMLRDEGIPEEVARAAVEILTALSTLKYGRSKVPVLPVGSPTSPALVNLVLTPACIRIARALKRLPGEYAFSIYGDDLTVSSREPLPPEVKMIVLREWQRLGYRANPGKTRVMRRDGSGTPIEVTGLILGRDRILLPDDWLQRTELMLIAYAGSPKYPGDKAKRGLQSRVSMVRKLYGVEMPGRVGNCLKSLIAQAKSNLVMRERLAELLRGKMPEVVEGSEEAPEPAMEQAVEQDRDWRTEYGPVPQSMDARGQLFWDFDDDSPGGADDPFVPEHGQLEQGEWEGE

SEQ ID NO: 3953 - protein, 310 aa, unidentified
  source 1..310: note = Related to JAIESO010000413.1; note = Burkholderiaceae bacterium
MNSKQAMKWADIRPILQSSEGLSRHLSVSEDTLFRLSRTASRLYTRREIEKGRILNLPSGELKRIQSLIHKKILLFAPYHASIHGYRKGRSQRSAAEPHQDKPMLLKGDIQKYFPSISPDAVLKAFRQLGISYQVSKLLVDLCTHEGQLPQGAPTSPLISNLIWSRPARRIRGFADQHGFDHTIFGDDVFISGACRAKKFKNLLKRIIREEGLSVSERKTQALPCTTRQVVLGLVVNKNLGVDKDVRRDIRQVIHNYVSKGFSDPLGSNLRAAKTSLAGRIAHIKHINPSQGQKLQREFKRINWEEGASV

SEQ ID NO: 3954 - protein, 301 aa, Nitrospira sp.
  source 1..301: note = Related to MSXM01000005.1
MKWGEVRAHLQSIDSLARYLGVGKDTLFRLCRTSSRCYVRGEEPKDSGGVREFYKPRGELKEIQRLIHKSILLFAPSHEAIHGYRKKRNQRTAAMPHLKKDMLVKADIKTFFPSVKPKQVYDAFMGIGLPHCVADMLTKLCTHADQLPQGAPTSPMVANLLWLRPARRIQGVADKHGFGHTILGDDVFLSGKKRAAKYKSFLKRVISEEGFRANDRKTIAVSHNGPQTVAGLSVNQKVNVPKAYRKALRNEIYRYALSGEDENGLARQKGRASLEGKIAYVKQFNSLQGAKLQQKLAAGRK

SEQ ID NO: 3955 - protein, 302 aa, Nitrospira sp.
  source 1..302: note = Related to WIAI01000061.1
MFDSRLATVEELSVLIGVPSGELIYFATAIEKNYRRKVEHKPDGDTRIFFVPSPGLKKIQKCIHRRFLRKLPVHESIHSYRRRRDTISNASVHVGKQILAKLDIKKFFPSILPQRVYRVFLSRGCSPSVASLLTKLTTFENQLPQGPPTSPGIANQVLTPLAKRLKGVCDQHNLTLSIFADDIFVSGSEHVPQVNNLLKRIVESEGFTFNLRKTEMRWPGEKKIVTGISVTARINIEKGYYRKVRALVHHAANHGYMHLFPGVTPLSAKDKLQGMIRYISRLNASKGHQLQIKSLQIADATK

SEQ ID NO: 3956 - protein, 332 aa, Nitrospira sp.
  source 1..332: note = Related to PHGD01000001.1
MRSNNCFSKSKVFVWPIWARSLDNHVQDGIPLADLTDLSDLARKLSVTETDLQAIAQTHSLYYRRKDKVKPDGRRRTFYIPHGDLKKIQGAIAKKLLAPLPLHRAIHSYRKGKSTLTNARVHLGSPFMVKLDIEDYFPSISRDHVFKLLGRLEFSGPIARMLAVLTTFKNQLPQGAPTSQAIANLVFDEIIKKRIAPLCEAHNLEVTVYGDDLTISGSKRIVGLKRLLETIIKEEGFKVSTKPSKNQLLREHDQKMVTGYVLRGDKLDVPKSRYREVRAIIHNCLKNGGASQFDCDVKTAKLRLRGKIEYIRKVNPLRGGKLMRDFERISWM

SEQ ID NO: 3957 - protein, 303 aa, unidentified
  source 1..303: note = Related to JAGRAM010000124.1; note = Bdellovibrionales bacterium
MSLKVPPSSIPSLGQTLGLPDGALEACIRDLPGLVSRCPKRKPSGSMRRVYAPRDPLHDIQQRILHKLLRPIEHSSELHGSVVGRNPKTNVTPHVGAFVSISMDITDFYPSISKARVNRIWIDLGYSRRVAQALTHLTTFDQHLAQGFPPSSDIANIVLEQDLLPRLRPLCSQHHLTLTMYQDDLTISGGARLRSLGNLIQRILLQSGYPVNVDKTRISNPGQRHMSTGLVYNTKPNIPKERYRALRGELHRCLTNGVITEAVDRPIWQYKHHLASRIEHVRYHNPSRANNLQIVFDRIDWGI

SEQ ID NO: 3958 - protein, 329 aa, unidentified
  source 1..329: note = Related to LJVD01000036.1; note = candidate division Zixibacteria bacterium SM1_73
MKCTKIIINQTNKEEGILRINTIDELAERLGHSPGELKRIANTKIRYYKVNEKIKPSGKLRTLYEPMGPLSKILKLIKERLLDGIELPECMHGYRTGRDYISNACVHVGKNIICKLDIKNFFPSIHHGRVFNILMDLGCSKQVAKLLTRLVTCDNHTPQGFNTSPTLSNIVVSNLARRLQGLCNHYRLTLTIYSDDITISGNIEQKKFEGLFYKELLPIIEEIIKQEGFSLNFGKIKLVKRRDSQKVTGIIVNKKPNIPKQKRRELLSTIKEYQMNGVSISHDSDLLKVKQSLRGKIANAQRVNRSFGQLLLREFEKIDWSRRVSFSSN

SEQ ID NO: 3959 - protein, 511 aa, unidentified
  source 1..511: note = Related to JACNLI010000952.1; note = unidentified bacterium
MLKNTLNIQSIEELAEKLDESPEYFKSISKRIPKLYYSPTKRKKPKGGVRKTNEPINKLKSLQSKILRNILESVPLNSCIHGYRKNHSPLTNAKPHVGKKFLLKLDIKDFFPSIHYKRVEKLFSDLGCSLEVSRMLTQLTTFQHYLPQGAPTSPYISNLIPANVDKQLQKICRRNNLPPHKRYGDDITISGNKNFSKLIPEIENTIKQNGFKISKKEFLTPKDRKVVTGLIVNTKVNVPKEKVRKVCAIIHNCIKYGPDSQNREGKPNFKDSLRGHVEYIRSINPPLGDKLMQEFNKIEWNSPEKITISSVSIENNEVVEIFVDGATSPNPGPSAIGWIAFRKENKLEEYFEYIGCTTNNIAEYTAVIRALEAAQSKWPQEKIIIRSDSELVVNQVNGSWNINQQYLADLCKQVKKSGKDTEWQLLWVSRKENLAHKLSMRGLYEEKIKARASGLAVRKSSPGIYKVESASGHGMYDVTLAPDSCTCLFFQKRKCVCKHIFAARIAGKADN

SEQ ID NO: 3960 - protein, 327 aa, unidentified
  source 1..327: note = Related to JAKLQW010000066.1; note = Candidatus Omnitrophica bacterium
MDGKISEFAGSALYSLTYKIGYNEEKLRYILSHFREQYYKRKELDKKGKKRIISSPSKNLLKLQRLILAYISKKTLFPETFHGYKKKRSNLTNARCHLNKRVITKLDIKDFFPSVHFKKVLALFGSLGFNEQESKILSRLTTADYCLPHGFSTSPTLAALMLINLDKRLKTLFMKIGLDYTYTFFSDDITISGNKGIKTLKKLICKIFRQEGFIVNESKIKEQNFWEKQEVTGISVNEKLNVPYDYRHNLRAIVHNCITLGPRTQIDRFNSEFCLDRKLDLSLSKFRERIFGKINYIKPINRELYNQLLAYFNKINWRTNNPVSVLV

SEQ ID NO: 3961 - protein, 319 aa, unidentified
  source 1..319: note = Related to MHGQ01000042.1; note = Omnitrophica WOR_2 bacterium RIFCSPHIGHO2_02_FULL_50_17
MCAVNERNYFDTPSIQSVAEKLRLSANALHEVLDKFHTHYRKKSETKSGKTRTYHCPFPVLRDIQKRINKYILKAIPLPSSMHGYVAKRSILTNATVHLGKKNIANVDIKSFFPSIHYQRVQRIFRQIGFNEGETLVLTRLTTADCCVPHGFPTSPRLANLVLINADKRLRDLFGQQKINHTFYSDDITISGNKNLRQLLQPIRTIFRQEGFRIHRKESSPQKPYFKRQKITGLLVNNKRLNLPREDIRSLEAIIHNCLVKGPSSQIAEFEAHFGPPKRELSTVQKFKERVLGKLNNVRRVNCDQYKKLKKDFDRIDWN

SEQ ID NO: 3962 - protein, 300 aa, unidentified
  source 1..300: note = Related to DPTL01000176.1; note = Elusimicrobia bacterium
MCEQSIITNLKTVEDIAFTIGVDEFQLREISQNIPLHYKQIYIRTSPTKIRKISKPNEKLKAIQKLVNKRILQRIPLPDSVHSRKKRSILTNAEQHVGKEVIVSLDIKDFFPSISSLRVNQLFKKIGYNSEASAVLTRLTTLDGCLPQGAPTSPSIANLIITDMDKRFETLCAEQEFTYTRYTDDITISGDQYVRKFLPLFCKIVRQSGFLVNEKIKVEPRSRRQETTGIVVNVRPNIPKEKHRKISAIIHRCKTFGPSSVTNEDLSKFRERLLGHISYMSHINPTLGRRLLNDFNHIAW

SEQ ID NO: 3963 - protein, 303 aa, unidentified
  source 1..303: note = Related to JAFNKF010000236.1; note = Candidatus Brocadiales bacterium
MSLVVIGSDFHSPEELVEFLGLDYSEIQHILQTLSYQYRPLLIPKAEDEWRKLLAPKRELKHTQRVVLDMLLDDVPFPDSIHGYRKGRSILTNAEPHIQQELVINIDIENFFPSVHPERVKRNFLMLGYRDPVAKFLVRLCTFNHQLPQGAPTSPALANLAISRTMLALEKFCKKRGINFTGYSDDLTFSGPQAIEKHIETLMSIIRENGFRVNKNEIKIQPSSQLQEVTGLVVNDKVNLNKSLKKKVRAMLHTARTNGPESLHRDNKPYRKDQLLGLILHTKNVDQKLGEKHLKEFYEIDWE

SEQ ID NO: 3964 - protein, 305 aa, unidentified
  source 1..305: note = Related to JAENIR010000027.1; note = Parcubacteria group bacterium
MKKIITHKNLCKDIKTTDDFCRILSLEKSFVQKHIRLCPLLYVEIPLKKKDGTPRPIRAPKDKLKIIQRAILKNILSDIKLPPCCYGFSKNKSIIENAKVHSKNDFLLNLDIQDFFPSVHYKKVQQIFLDVGLNDQIAGILCSLTTYEYRLPQGAPTSPFLASFALSNLDYRLMQLAKSNYLTYTRYFDDISFSGNKRVVVLEKDIMRIIKEGGYVVKIKKRKLFTKKEVKEVNGILITDKKLSLKNTDELFNYVSDINKYGLSKLQTDNPEKERQSIKGKIAFLKQIDETVTHSIETIFNKINW

SEQ ID NO: 3965 - protein, 304 aa, unidentified
  source 1..304: note = Related to MHWC01000010.1; note = Candidatus Zambryskibacteria bacterium RIFCSPLOWO2_01_FULL_42_41
MIIRNLSKRVETIDDFCHLILLDKLYLQKLVRLCPLHYIEIPFKKKDGTPRPIRAPKEKLKIIQRVILDNLLSCIKLPPCCYGFSKGKSIIENAKAHLRGDYLLNLDIKDFFPSVHYTKVEKIFLGMGLDRDFTNILCNLTTHEYKLPQGAPTSPKLASVVLHNLDYRLLKLAQSNHLTYTRYFDDISFSGNKRIITLEKDILRIIREEGYSVHTSKDKKKLFAKNETKEINGILLKDKKLSLKNIDELFSYVENINRHGLSRLITDNPEKERQSIAGKISFLRQIDPERSHKLKVLYDFIEWL

SEQ ID NO: 3966 - protein, 336 aa, unidentified
  source 1..336: note = Related to LBPL01000006.1; note = Parcubacteria group bacterium GW2011_GWC1_34_10
MDQEIDFDSHEDLPVLPPHSSPFCWRCFVFMKKILQIQKSKSSIDTREKLISFLGLKKEKFEECFKVIPLLYELTPILKKNNAGYRKLSIPKQELRDIQRCVLDKIFTDIKLPSCVYGFSSGKSIVENAKYHSKNDYLLNLDIKDFFPSVHFERVRQIFKDLGFNDSVSEILCILTTYNHELPQGAPTSPLLASLALNNLDKRLMKLASLNHILYSRYFDDISFSGSKRILDIEETIKQIIRSENYRINSKRYLYGKGEAKEINGISISSGKLFLKNTDDLMGYLEDLKNFGVSKLRSDNPEKERKSLIGKISFLKEVDIEKGVEAKNLLETIKWL

SEQ ID NO: 3967 - protein, 307 aa, unidentified
  source 1..307: note = Related to MHNL01000005.1; note = Candidatus Ryanbacteria bacterium RIFCSPHIGHO2_01_FULL_48_27
MKKIYPQTFSRFKDLRIELLPNLFGVRDMEFYRVSSNAHFLYRPIEIKKKSGGVRQIYAPSGRLKFLQRRILSKLLEKVRLPPFVFGGVKGKSIINNASCHLGSKYLLNLDIENFFPSVNWQLVRKLFIDLGCDSSVADVLTRFTTLDYRLPQGAPTSPYILNLVLSNLDRRFFLLACSNRLTYSRYFDDITISGGKRLIGLEESFLEILRQEGFTINLKKKYLYGPSEDKKVTGLVLKSGGRMELVSMSGLLKYLNELITEGLSNLDGINLEKEKQTLLGKIEFVKSIDKVDGQNLNTLFNKIKWV

SEQ ID NO: 3968 - protein, 379 aa, unidentified
  source 1..379: note = Related to QMZE01000001.1; note = Archaeoglobales archaeon
MTHGFSNTEVVMIKTPDIPEDMPFLIDDCTLAFFLGFNTRILWYAITRKDELYTRLTIPKKSGGSRVIHAPDKVMKLFGKRILERLLNPLQKQLGDHVTAYREGRSTQMAVEQHVPECPICDTAPPGTEHDCPHRGTYFNLDLKNFFPSTRRVWIRQYFKQVIGYSHYVSDLLASLVTVYAFTDSSGYQFSGVPQGNPASGAICNLVADWMLDTPMLALIDDLNKEQGLEGEYAWKYTRYADDLAFTCGKRFSYYKRMAILNKLMNVCTRSGYAVNHTKTRIWDGRHRKALLGAVFNTHTNIPRDQYISVRSLTYNCWKHGFESQCSRAGKDSEEELRWWLLGRINYMEQIHSGKGQQLKSVYNAAVQKYDKNKTHPTA

SEQ ID NO: 3969 - protein, 385 aa, unidentified
  source 1..385: note = Related to QNCB01000002.1; note = Planctomycetes bacterium
MTYGFTESTFETITVPDTEFLLLDDCTLAFFIGFRNKTMWHLLQNKSDQYKVFHIPKSNGKKRIIHAPSPLMKVFLHRLHARLLLPLQEQLGDHVTAYRPSRSIVDAVSRHIPACDICDTAPKGQTPQQHTCPKQGVYIKMDLKNFFPSTRRAWIRHYFQSIGYSFHVSGLLANLMTVPIKNSKGIDDDKYRGTPRQQFFHGTPQGAPTSGAICNLVANHRFDQRILEYFNDRNKREGLESPWDWRYSRYADDLTITCGQDIPAAEKKEIAKDVTQIVESSGYKINRAKTRIASAFYRRKMLGIVMNQKPNIEYNEYLRIRAIVHNCMVSGIETQHERAGMTTPEELLQYLRGKVSFIRQVHSDKGDKLKAELDVAIDNWKAHDK

SEQ ID NO: 3970 - protein, 346 aa, unidentified
  source 1..346: note = Related to PFIR01000325.1; note = Armatimonadetes bacterium CG_4_8_14_3_um_filter_58_9
MPSYRETRVDIVEFPLEVPYELPHAIDDMSLAFHLGIRNSTMWWMIHDKKKMYKVFKLPKRGRPGRYRNIQNPIDVLKNVQKNILSRFLSAVPVMAHIGAYVPGRSCRDTAAQHVGKGVIVSLDIQDFFPSMRRSMVKQCLHRKIGYGYRVASLLAELMTYTNFVPQGAPTSGLIANLVAHDRFDRQILRDLKELDPQWTYTRYSDDIDLSHPEVQEPDRLTAIIALVRDAVESAGFKLNQRKTKVEPHWKRQKVLGMVVNERVNIPRYEYMRTRSIIHNCLVDGFDNQFERAGMNSASGLKSHLRGKLAFFRQVDPIKAQRLKDQFDLACQMHADVQDNEVRFDS

SEQ ID NO: 3971 - protein, 345 aa, unidentified
  source 1..345: note = Related to NZCM01000006.1; note = Pseudomonadales bacterium
MSSYKETELSYIDLPSDSCLQTTWPWLLDDFALALQLGIRCKTLWFCITTKDKQYKRFTIPKRTGGRRPIHAPEPVIKWIQQQIHERILKPFPILDCVGAYVEGKRCADSAQVHVGAGVRIGMDLKDFFPSHGRARIRNFFKRHYGYNHQVASLLADLCTVREGAHHYAPQGSPASPMLCNMMAQETLDREIMRVLGPHGWAYTRYSDDLSLSHKDDLPSKEVNQAIKQVTKISKESGYRINLKKTKVQRRWRRQQMLGIVTNEKLNISRPLYRQYRAILHNCLHQGVEVNALRFGWDPPESFISHLEGKISYFASISETRGGKLKTMLHEVKRALEEENAQTHP

SEQ ID NO: 3972 - protein, 372 aa, unidentified
  source 1..372: note = Related to PCRT01000055.1; note = Candidatus Moranbacteria bacterium CG23_combo_of_CG06-09_8_20_14_all_41_28
MELNQLQQQLSSQNPVYPQLSLYPVASPLFTIQTNRQLALKLKMKFANRLTYVGMNKLNHYSTLSIRKRGAAGKYRTLYNPDQPMRLIQFKILKEILEQVQVPDYLYAFEKGRSIPAMAQKHVGKKVIVSVDLKDYFQSIKQYHLNQVFKHLGFGEKPALLLSELCTYKSFVPQGALTSPKLSNIITTYTFGPLIKEYCEERGYTLTIYADDITISSDSLIDDMGSDTVHSLISYLKETVGRFGFRVNSEKTKVMKYYQRQYVCGAVVNSKVNLQKSERNTLRAIIHNCEINGIEAEASKTQITEDEFISAMNGRLNWFNQLNPQAGSHFINQFKEIYGRSTANVRNSQDVRVEELVSQGVNNVEVQQAQTA

SEQ ID NO: 3973 - protein, 421 aa, unidentified
  source 1..421: note = Related to nan
MIKKIIERFLSIFKREGTTSEKELPETEHKPELHTNLPSINPIKTSHKSSVTQNLLKERLKEDNILLLGHLVSKDEGKSNLKIPGIPNFNTISDVLEYFEKEYKIKKSKLANFASFSSKTNQFYIERKILQKSSKIGNKARYIYIPKPFVKFVQKVILKDILEKVETPPQLVGFTKNKSIKDAVVSHVKKDVVLILDIEKFFQNTTAKKVFNIFKNIGYSREVSLFLTALTTTKVKVENKKGFKGKRALPTGSPTSPYLSKLALIDFVAELNELIKKWQNMPIKDVDFSVYADNIIISFNTENKEKRKEISKGIIENLQELLKKHGYKLNKEKTKILTKKKKVLGLVINEKINIDRNYYRKLRAEIHNLWKNKQRFGESSFQIDEKLIQKIRGKLNYLKLINPSKYNSLFIKYSTHLEELF

SEQ ID NO: 3974 - protein, 389 aa, unidentified
  source 1..389: note = Related to nan
MLKNIFNYIKKILKLENKNKTKSVYLSGLKIKTTDNLKTNPLEYFKSEERKLLEVNSSINPDIPYFPSIKEILKYFNDNYKVLPKMLINFALFNTKTSDFYIEKRIITKNKERYIYIPKNFTKKIQKIIKKDILDKLTFPEEICGYIKNKNIKLAVEKHVKKDILILIDIKNFFPGIGRIKVRKAFENLGYPSDVAAFLTALTTTKIKYQEDNKIKTKCALPIGSPTSPTIANLIITNINNQIKNYFKTLQNDNNISSIDHTIYADNIIISFNTSLKGQDLKNITNKIIIELKKIIAKNKLKINDSKIRVLKKRKIVLGLSINQKININKKYYKNLRAEIHNLSFNKNKLTKEKIETLKGKLSYLNFINPNKYNNLYKKYHTRLSEIFQ

SEQ ID NO: 3975 - protein, 1018 aa, unidentified
  source 1..1018: note = Related to WJKO01000099.1; note = Candidatus Lokiarchaeota archaeon
MNSINYSTKYKFVDDNLFLIAKINPKTKKQCLVFQQIDKESRNVIFSRQLTCIHTAVTRISIADYESMINDDSERKKFNNNLLNIISTENLEPIDLELDEKYFAFKSWVQGIAESGLSAILIQDEIERMALINNPISIFLSSCLIKAEPDFIDDYLALIKQSCKNKDIWNKGNENRDNWHRSSLIASVDRIITIIKELDETELLVETVYKLIKFYITESLPTCVINFILEKFDFNILGDLLAELEYDWIVKIYNDSQLEERNRDLIFSFRIETDSEFVNDYLEVIKKEANIKIKRDNSGKEDDRGENPSLKKKVKKIIYVINHIKKEQSRRELSYKFFKLYFTESLPLQVMILIFENINSYTLSNILDNLENDWIKKILNDYIQSIKIKCKNNYEQRESDKIYESWNKQSLRYSISIILTFIERMENPKKRSEVLYSVFKFYFTECLPVYVLNYIFKTVKKKFLREVLSDLERNWVITAYNTPDLKKEHKFLIFSFLIATDSEFLNDYLKVIKLCNSGKDHNRENVSSLKKSVKKFIRVINDIENYRIKKKLLYKLLDLYFTESLPSYILRLIFDTMNKKNHSNILDLMQNMPNNWIVAIHNIEDFYNKKCLFNQFCRKHDLSDLLFIQDYSIWNSTMSHRWRVFDVLKHIDREEINKKARKNNIDSFFIRNCITKVKSKKNTIEELVKHKTKVPKIGSIYEFCVLANYNPKKLKRWLAPQISLHKSYIEKKIPKRKGGYRTLHIPYPKLKRIQVWIKEEILDKLPALQCATGFIKNKSTKNNAKPHCQKKLIIKMDLMDFFPSIKFWQIYRIFRSLRYIHEISIVLTYLCTVPLAKHITHKGNQKEYFLETSFRFLPQGAPTSPGLSNLVLIEADKELQNLTKSLNMSYTRYADDLTFSVNDSEFKIRPFIQKVFNIVRKHHFWVNKKKIKILRPYMQQRVTGLVVNKEVHIPRSYYMRIRGILHKLENYGSEMPLEERKTLKNMVSGMIAYMHSIQPRKAEKMINWYNRIKINVSK

SEQ ID NO: 3976 - protein, 452 aa, unidentified
  source 1..452: note = Related to JAAFKL010000269.1; note = Candidatus Heimdallarchaeota archaeon
MIAKKKVKKSKIEKLPVRVKKMLNIGLWSYEVQVPDDQTLERLHLLDRDIIKRKKDIHIPETGKKQIYRQAEKQYDKHSSKKRSERKKLAPIRQIKKKEDWEEFKKVNFVHLGTSVSNWLNLRVENTDKLNKVGLPSISDSHQLAKLLGISIAQIKYFAYHRKSSQVNHYVDFYIPKGKRGRRLISRPKKELENIQSIIKKEILDKISFSDAVFGFIPGKSHINNAQEHVKRDFIINIDIQDFFPSTNFYKVRSIFRNLGYSGEISSVLALLTTKQDTRSITIGEDQYHTFTENRYLPQGACTSPTLSNLALVKVDNQLIKRSIELGYKYSRYVDDLTFSINKPISKIKTLLYMVRKTLEYHGYEANPHKTKILGKNNSQNITGLVINSGESNVPRYWRRRLRAAVHQFQYIKDDEIKSIELVRLLGCINYLKISHSRLAQNYFELVTKYYQ

SEQ ID NO: 3977 - protein, 334 aa, unidentified
  source 1..334: note = Related to JAAYWD010000064.1; note = Thermotogaceae bacterium
MKLNDFNDVSCVLGEELKMLTYLKKLKNRLYTSYYIKKRNGKREINTYLYKRRLSDLEDDIPQLHGYELAKLSRASEKLEEIHRKIDSRILDEIELPECVNGFKKGESIKKAVQPHVGNDYVACLDIHNFFPSVKSDYVLEGLQSCGIGADAAWLIARLVSYKGHLPQGAVTSPKASNIAFMKVDKQILELSRSKGITYTRYADDLVFSANFELKDFVEEAIQLVTNAGYTINSQKIKFYGPKEPHYILGIIANSKLNMPRDKRRNLEAAIHNYVDKHLVPAGVNEIRYKKTLLGKAAYMLSINPNLGRLQKLVMKLREFDPNGIEFERIYLGD

SEQ ID NO: 3978 - protein, 343 aa, Thermotoga caldifontis
  source 1..343: note = Related to NZ_AP014509.1
MNAEAVALEIQEPLKKLTYLEKIRNRLYVEYYISKRSGGKREICVYLCDSKEAQARLKNKLRTLKKNDAELEKLVRAAQELKTVHRKLKELLDRIPLPDCVFGFRKNESIVTCARKHVGKKYVISLDIKDFFPSVTSDMVLRQLKREGFEDTGAWLIARLVAFKGVLPQGAITSPAASNVAFKPYDEKLQKYFEERGFVYTRYADDVTVSTDQEVTDEMIQQIVEETSQIIAPFKWNAKKIKIYGPNEPHYVLGLIVNAKPNVPKQKRRLIRAMVHNFVRKHALPQGEDPIRYKRKLMGKLAYCLFVNPHIESLLELYEELRKFDPNRVSEWKSLYVSEEEGE

SEQ ID NO: 3979 - protein, 320 aa, unidentified
  source 1..320: note = Related to nan
MQKIGYANRLNLPRKLLTYLEKIRSRLYADYYLRKKDGSKREIAVYVCDSRIASQLDEKLVEYSKVLKLVHRRIKNLLDETIDLPDCVFGFKKNCSTKIAASKHVGKKYIFSVDIKDFFPSITSDMVQQALMNEGVEQNDAWLIARLVAYKGRLPQGAITSPTVSNVVFKPKDLQILKLCERYGLTYTRYADDLTFSTNDEINWVEFTDELEKILQPEYRINTKKLKIYGPKQAHYVLGLIVNRKVNTPKSYRRTLRAAVYNYLNGKVPYGVDPVKYKATLKAKLGYALYINEIPSLRRLYEQLKRFDPNEVKNWEHIVV

SEQ ID NO: 3980 - protein, 307 aa, Vibrio parahaemolyticus
  source 1..307: note = Related to KK081893.1
MRLIKQLAQELNKSEIEVSHFLLNAPKKYKVYTIPKRTSGHRTIAQPSRELKEYQRKYLELQQLPIHDVAMAYRQGVSIKQNAIAHKNNPYLLKMDLENFFNSISNILFWEVWESIQPLPSKQDKKVLEQLLFWCPSKITGGALILSIGAPSSPLVSNFFMYLFDCALSEKCGEKNITYTRYADDLTFSTKSEGVLFDIPKLVEELLHEKFGNHIKINRKKTKFSSKAHNRHVTGITLSNDGKLSLGRSRKRYIKHLVHQIQVGCLSDEDILHLKGLLAFAEHIEPTFLQALKKKYSVELITQIIKG

SEQ ID NO: 3981 - protein, 307 aa, Aeromonas caviae
  source 1..307: note = Related to NZ_JTBG02000005.1
MGLIKQLAQNLCKSEAEVAHFLLNAPKMYKVYTIPKRTSGHRTIAQPSKELKEYQRKYLELQQLPIHEAAMAYREGIGIKQNAIAHKNNPYLLKLDLENFFNSISNLLFWEVWKSIQPLPSSKDQKALEQLLFWCPSKITGGRLVLSIGAPSSPLVSNFFMYQFDCTISEICRHKNIVYTRYADDLTFSTKIKGILFDMPNIVKDHLSLHFGDAININKKKTKFSSKAHNRHVTGITLNNDGKLSLGRERKRYIKHLVHQVKLGCLENEDKQHLVGLLAFVKHIEPMFLESLKNKYSVELITKIIEG

SEQ ID NO: 3982 - protein, 310 aa, Vibrio vulnificus
  source 1..310: note = Related to AAXMWT010000001.1
MSLIKQLAQKLNKSEIEVSHFLLNAPKKYKVYTIPKRTSGHRTIAQPSKELKKYQRKYLELQQLPIHEAAMAYREGISIKQNAIAHKNNPYLLKLDLENFFNSISNSLFWKVWKSIKPLPPRQDQRALEQLLFWCPSKTTGGSLVLSIGAPSSPLVSNFFMYHFDFDISEICRKKGITYTRYADDLTFSTKNKEILFELPQIVKEHLEEHFENSIKINKKKTRFSSKAHNRHVTGITLNNDGKLSLGRKRKRYIKHLVHQVQIGCLSDEDRLHLKGLLAFAKHIEPMFLQSLKKKYSVDLITQIIEDSNG

SEQ ID NO: 3983 - protein, 307 aa, Photobacterium damselae
  source 1..307: note = Related to PZOH01000095.1
MSLIKQLAQKLNKSEVEVSRFLSNAPKKYKVYTIPKRTSGHRTIAQPSKELKEYQRIYLEVQQFPLHKAAMAYREGISIKQNAMAHKSNPYLLKMDLENFFNSISNNLFWNVWEKIKPLPLPQEQLIIEKLLFWCPSKTTGGSLILSIGAPSSPLISNFIMYQFDTVINQMCVNKNITYTRYADDLTFSTKGKGELFDIPKVVEEYLFEIFGNAIKINKKKTAFSSKAHNRHVTGITLNNNGNVSLGRQRKRYIKHLVHQFKLGCLSEEDRLHLRGLLSFSKHIEPMFLQSLKKKYSVELIDQIIRG

SEQ ID NO: 3984 - protein, 310 aa, Vibrio pectenicida
  source 1..310: note = Related to NZ_RSFA01000069.1
MTLIEQLALELKKSEDEVARFLLSAPKRYKVYTIPKRTSGHRVIAQPSKELKEYQRKYLELQQLPIHDSAMAYRKGMSIKQNAIAHKNNPYLLKLDLENFFNSISDKLFWKVWESILPLPSDQDKQTLENLLFWCPSKTTGGALVLSIGAPSSPLVSNFFMYQFDCTLSKLCVEKEIMYTRYADDLTFSTKHKDSLFTLPELIKEKLAVLFGSAIRINRKKTRFSSRAHNRHVTGITISNDGSLSLGRERKRYIKHLVYQVKLNKLDAEDRQHLRGLIAFAKHVEPVFVQSLKRKYSAELITQIVEESNG

SEQ ID NO: 3985 - protein, 310 aa, Photobacterium phosphoreum
  source 1..310: note = Related to WMCU01000006.1
MTLIEQLALELKKSEEEVNRFLLSAPKKYKVYTIPKRTSGHRVIAQPSKELKMYQRKFLELQNLPIHSSAMAYREGLSIKQNAIAHKNNPYLLKLDLENFFNSISNKLFWNVWESIQPLPSEQDMRTLEKLLFWCPSKTTGGTLILSIGAPSSPLISNFFMYQFDCILSGLCFEKGIVYTRYADDLTFSTKYKNILFDLPILIKEKLSDLFGSSIRINRKKTKFSSKAHNRHVTGITINNEGCISIGRERKRYIKHLIHQSQLNRLDADDRQHLRGLIAFAKHIEPMFFQSLKRKYSAEIITQIVEESNG

SEQ ID NO: 3986 - protein, 307 aa, Aliivibrio fischeri
  source 1..307: note = Related to WOBA01000001.1
MSLIKQLAFSLKKNEDEVIRFLLNAPKKYKVYTIPKRTSGHRVIAQPSKELKIYQREYLELQQLPIHDTAIAYREGISIKENAIAHKDNQYLLKLDLENFFNSISNHLFWEIWESIIPLPLKSDKQILDNLLFWCPSKKTGGNLVLSIGAPTSPLISNFFMYKFDSIVSKACLEKNITYTRYADDLTFSTNYKDTLFEVPLFIKKQLTALFGNSIRINRKKTKFSSKAHNRHITGITINNDGKLSLGRKRKRYIKHLIHQFQLNTLGKEDKLHLKGLMSFAKHIEPIFIQSLVKKYSFELITKIMEE

SEQ ID NO: 3987 - protein, 310 aa, Vibrio fluvialis
  source 1..310: note = Related to NZ_CP051108.1
MTLVERLALELKKSEGEITHFLQSAPKRYKVYTIPKRTSGHRVIAQPSKELKEYQRKFLEIQQLPIHGSAMAYRKGISIKQNAIAHKNNPYLLKLDLENFFNSISDKLFWEVWGAILPLPSNQDKQTLENLLFWCPSKITGGALVLSIGAPSSPLISNFFMYQFDCALSEFCAEKKITYTRYADDLTFSTKNKDTLFVLPEFVKEKLSELFGSSIRINRKKTKFSSRAHNRHVTGITISNNGNLSLGRERKRYIKHLVHQVKLSKLNSEDRQHLRGLIAFAKYIEPVFIESLKRKYSEDLITQIIEEPND

SEQ ID NO: 3988 - protein, 310 aa, Salinivibrio costicola
  source 1..310: note = Related to NZ_MUFR01000019.1
MTLIERLALELKKSEDEITHFLQSAPKRYKVYTIPKRTSGHRVIAQPSKELKEYQRKFLEIQNLPIHESAMAYRKGVSIKHNAIAHKNNPYLLKMDLENFFNSISDKIFWKTWESILPLPSSQDKKTLENLLFWCPSKKTEGALVLSIGAPSSPLVSNFFMYQFDCAVSNFCSEKEIVYTRYADDLTFSTKHKDSLFFAPSMVKENLRELFGGTIRINRKKTRFSSRAHNRHVTGITIANNGSLSLGRERKRYIKHLVHQAQLNKLDIESRQHLRGLIAFAKHVEPVFLKSLKRKYTSELITQIIEESNG

SEQ ID NO: 3989 - protein, 314 aa, Pseudoalteromonas sp.
  source 1..314: note = Related to JAKRFY010000043.1
MELEMTLIEQLALKLKKSEDQVAHFLLSAPKRYKVYTIPKRTSGHRVIAQPSKELKEYQRKYLELQKLPIHDSATAYRKGTGIKQNAFAHKNNPYLLKLDLENFFNSISNKLFWEVWESILPLPPEHDKQALERLLFWCPSKTTGGALVLSIGAPSSPLISNFFMYQFDCALSKLCVEKEIMYTRYADDLTFSTKHKDSLFALPELVKEKLVEHFGSAIRINRKKTRFSSKAHNRHVTGITISNNGNLSLGRERKRYIKHLVHQVQLNKLDAEDRQHLRGLIAFSKHVEPLFVQSLKRKYSAELITQIVEESND

SEQ ID NO: 3990 - protein, 310 aa, Marinomonas gallaica
  source 1..310: note = Related to NZ_FLRB01000014.1
MTLIRKLALELEKSEDEVANFLLNAPKRYKVYTIPKRTSGHRVIAQPSKELKEYQRKYLGFQKLPIHDSALAYRKGISIKQNALAHKNNPYLLKLDLENFFNSISDKLFWKVWASLLPLPSSQDRQTLKNLLFWCPSKKTGGPLVLSIGAPSSPLISNFFMYKFDSIMSKFCSEREIVYTRYADDLTFSTKHKGSLFQLPEVVKEMLSELFGGAIRINRKKTRFSSKAHNRHVTGITINNNGDISIGRKQKRYIKYLVHQVELNRAGREDIEHLRGLIAFASHIEPMFIQSLKKKYTTEIISKIIEGQNG

SEQ ID NO: 3991 - protein, 310 aa, unidentified
  source 1..310: note = Related to JABSRB010000040.1; note = Oceanospirillaceae bacterium
MSLVKQLSLGLNRSEEEVSRFLLNAPKKYKVYTIPKRTSGHRVIAQPSKELKRYQRQYLEIQKLPIHHSAMAYRQGISIKENAAAHQKSRYLLKLDFENFFNSISSHVFWKVWESIHPLPSELDRQTLEKLLFWCPSKKSGGPLVLSIGAPSSPLVSNFFMYHFDCHLSQICLEKEIVYTRYADDLTFSTNHKDILFDLPLLVKEQLVTLFGGTIRINRKKTRFSSKAHNRHVTGITINNNGKLSLGRERKRYIKHLVHQVKLKKSDKEDRLHLRGLLAFAKHIEPLFMQSLIKKYSAELILKIVEEPND

SEQ ID NO: 3992 - protein, 310 aa, Pseudomonas anguilliseptica
  source 1..310: note = Related to NZ_JAEIOI010000003.1
MTVVEQLALVLKKSPTDVTLFLNNAPKKYKVYTIPKRTSGHRVIAQPSKELKIYQRKFLELQDLPIHESAMAYRKGLSIKNNANAHKNNRYLLKLDLENFFNSISSELFWKVWGSILPRPPETDKRTLENLLFWCPSKTTGGRLILSIGAPSSPLVSNFFMYKFDGAVQVLCAEREIKYTRYADDLTFSTNQKNTLFELPRLIEIQLMTLFGSEIRVNRKKTKFSSTAHNRHVTGITISNDQKLSLGRSRKRYIKHLVHQYILNKLDPEHTQHLRGLLSFAKHVEPSFLHSLAKKYSTELIVKIVESRDE

SEQ ID NO: 3993 - protein, 310 aa, Pseudomonas punonensis
  source 1..310: note = Related to NZ_FRBQ01000002.1
MSLIEKLASALKKSEAEVLIFLKNAPKKYKVYTIPKRTSGHRVIAQPSKELKEYQRKYLELQDFPIHNSAIAYRKNFSIKDNANAHKKNRYLLKLDLENFFNSISNHLFWRVWESILPMPPEADKRILENLLFWCPSKTIGGRLILSIGAPSSPLISNFFMYKFDDAIYEICMEREIKYTRYADDLTFSTNRKNILFELPHLVETLLFSLFGSAIRINKKKTKFSSTGHNRHVTGITISNNQKLSLGRDRKRYIKHLVHHYMLEKLSNEDTQHLRGLLSFAKHVEPLFLHSLENKYSTGLIHKIVEGRDD

SEQ ID NO: 3994 - protein, 307 aa, Pseudomonas sp.
  source 1..307: note = Related to NZ_JACKQK010000005.1
MSVIEKLALALEKSEAKVIAFLRNAPNKYKIYTIPKRTSGHRIIAQPSKELKLYQRKFLMLQKLPVHKSAMAYRNGLSIKDNAELHKRNRYLLKMDFENFFNSISSELFWSVWKNTIGTPTDLDKYTLERLLFWRPSKNTAGRLILSVGAPSSPMVSNFLMYKFDCLVHEICASKEITYTRYADDLTFSTCHKDVLFEVPALIEANLEHLYDGALRINKRKTKFSSMAHNRHVTGVTINNKASLSLGRSRKRYIKHLTHQFVLDKLSSDDRLHLRGLIAFAKHIEPTFFQSLVKKYTAESISKIIED

SEQ ID NO: 3995 - protein, 310 aa, Moritella viscosa
  source 1..310: note = Related to NZ_FRDS01000164.1
MSFIKQLAQKLNKSESEIEHFLVSAPKRYKVYTIPKRTSGHRVIAQPSKELKTYQRAFLDIQSLPIHNAATAYRTGLSIKENALAHKNNQYLLKLDLENFFNSISSRLFWKVWQSILPKLASEDKTLMENLLFWCPSKATGGPLVLSIGAPSSPLISNFFMYHFDIAISQFCSENKISYTRYADDLTFSTNQKDLLFSVPTFVGEQLKNLFGNGIKINRKKTSFSSKAHNRHVTGITINNEGKLSLGRERKRYIKHLVHQYQLNKLNQEDIFHLKGLLAFAKHIEPKFINTLKSKHSDELITRIFEEQND

SEQ ID NO: 3996 - protein, 310 aa, Pseudoalteromonas maricaloris
  source 1..310: note = Related to NZ_WEIA01000002.1
MELIKKLATKLNKSESEVIRFLASAPLKYKVYTIPKRTSGHRVIAQPSRELKEYQRAFISLYRLNIHDAAMAYREGLSIKDNAKLHCKNRYLLKIDLESFFNSITSELFWTIWQQHYEMPNNDEKVLMERLLFWSPSKSSTGKLVLSIGAPSSPLLSNFFMYQFDELVTQHCESLEIKYTRYADDLTFSTKAKNVLFDMPRYISDTLTNLFGSALIINRRKTAFSSKAHNRHVTGITIDNESDLSLGREKKRYIKHLVHQYRLNKLDKENVFHLKGLLAFAKHIEPKFITSLEIKYSAEVITQIFEERNG

SEQ ID NO: 3997 - protein, 310 aa, Rheinheimera sp.
  source 1..310: note = Related to JAERPS020000004.1
MEFIATLAAKLSKSEPEVVSFLASAPLKYKVYTIPKRTSGHRVIAQPSRELKEYQRTFLSIYKLKIHSAAMAYREGLSIKDNAQAHCKNRYLLKIDLKNFFNSISNELFWNVWQQHYTLPAKREKVLMERLLFWSPSKSSKGKLILSIGAPSSPLISNFFMYQFDELVTQQCETLNITYTRYADDLTFSTNEKDILFDIPKAVTEFLTLLFGNSMIINRRKTVFSSMAHNRHITGITINNKSELSLGRERKRYIKHLVHHYQTKQIDQETILQLKGLLAFSSHIEPDFIKRLEAKYSSAVISQIFEEQNG

SEQ ID NO: 3998 - protein, 310 aa, Marinomonas agarivorans
  source 1..310: note = Related to NHNK02000003.1
MSLIKKLAKKLEKSEAEVATFLANAPLKYKVYKIPKRTSGHRVIAQPSKELKKYQRAFISLFKLTIHNSAMAYREKRSIKDNANKHKHNPYLLKLDLENFFNSISSELFWKVWQAHYPIPQTEDKVFMEKLLFWSPSKSVYGKLILSIGAPTSPLLSNFFMYQFDHIIHDLCVHREIIYTRYADDLTFSTKHKGALFNMPDLVTEQLRKCFGEAININRRKTAFSSKGHNRHITGITIDNNDNLSLGRERKRYIKHLINEYKFNKLGKEDINHLKGLLAYAKHIEPSLMTRLEHKYSTELMTQLFEENYE

SEQ ID NO: 3999 - protein, 310 aa, Oleispira sp.
  source 1..310: note = Related to JAESQF010000097.1
MSFLEELASVLQKSEAEVEGFLEGAPKKYRTYKIPKRTSGFRTIAQPSKELKEYQRAFLKIQSLPIHNAAKAYRKNLSIKDNATVHKSSRYFLSMDLENFFNSISSDLFWRVYSRHFDSFSGQDKRVMESLLFWSPGKSNKQGLVLSVGAPSSPLLSNFFMYTFDLIMSNYCDETNILYTRYADDFTFSTNDKNILFSVPEVVKGFLEKCFGRGINVNKRKTVFSSKAHNRHVTGITINNNGDLSLGRERKRYIKHLIFQYSINKLEEGMLQHLQGLLAFSNHIEPMFIFTLNEKYTKELMLRISEERHV

SEQ ID NO: 4000 - protein, 310 aa, Marinospirillum minutulum
  source 1..310: note = Related to NZ_AULO01000011.1
MSFLRVLASKVNKTETEVIQYLANAPLKYKVYTIPKRTSGNRVIAQPTKELKEYQRAFLQIKSFPVHQVATAYCLGLSIKDNALSHKANSYLLKMDLKNFFNSINNNLFWKIWAVNKKLPEAKDKELIEKLLFWSPSKSLQGKLILSVGAPSSPLLSNFIMYSFDEHLFKACNKLNVTYTRYADDLTFSTNKKDILFKVPNLVAEQLRFEFGSSIIVNRKKTKFSSKAHNRHVTGITLNNNQAISLGRKRKRYIKHLVHQLLLNKLTVDDINHLKGLLAFAKHIEPTFILSLEKKYSLAKITHIFEAENE

SEQ ID NO: 4001 - protein, 310 aa, unidentified
  source 1..310: note = Related to NZ_RPGH01000128.1; note = Candidatus Enterovibrio escacola
MEIVRSLAQKLNITEQEVSSFLASAPLKYKVYKIPKRTSGFRIIAQPSKKLKEYQRAFIELFPLACHQAAYAYREGISIKDNALIHKKSKYLLKIDLENFFNSITNELFWDIWQKNSVLPDLNEKVLLERLLFWSPDKKISSRLILSVGAPSSPSLSNFFMYDFDESLSRYCLEKKIRYTRYADDLTFSTYEKGILFEIPDFVSHILRQLFGDKLSINRRKTIFSSKAHNRHVTGVTLSNEESLSIGRQRKRYIKHLVHQYLLNKLDQDDVSHLKGLLAFAKHIEPDFLDRLKAKYSDKTISQILGERNG

SEQ ID NO: 4002 - protein, 310 aa, Chromobacterium subtsugae
  source 1..310: note = Related to JAHDTB010000015.1
MGIIESLAGKLDKSPSAVKKFLASASLKYRVYTIPKRTHGYRLIAHPSKELKKYQRAFLELMPLAIHPCAMAYRKGLSIKDNALAHVDKKYLLKLDLENFFNSIDPNIFWKVYHLHEEVCEPSSLGERLLIDQLLFWCPSKRKGGKLVLSVGAPSSPMVSNFCMLFFDVVISKYCKINHISYTRYADDLTFSTNEKGALFKIPELVRDTLFSEFGNRVVLNNAKTKFSSRAHNRHVTGVTLSNSDTISVGRERKRYIKHLVHEYQLGRMNYEEILHLKGLLSHVSHIEPVFINSLAKKYGPDVLKRIHKE

SEQ ID NO: 4003 - protein, 313 aa, Paenalcaligenes hominis
  source 1..313: note = Related to NZ_CP019697.1
MGIVKQLASELDKSEAEIMAFLSRAPLYYKVYKIPKRTHGERTIAQPTPELKNLQRTFLLLNPLPMHSAAMAYRSGLSIKDNANAHKRNSYLLKLDLNSFFNSITPAIFWAEWDKFFDPLDSNEKTLIERLLFWSPSKSLSGSLMLSVGAPSSPAVSNFVMHGFDTKLDQLSRNKGVVYTRYADDLTFSTRNQGVLMGMPELVTDLLVECFGAALTVNRSKTIFSSKAHNRHVTGITLTNEAKLSLGRKRKRYIKHLVHQFTLQQLGLEDVNYLRGLLSFAKHIEPDFIYALEKKYGAAALIAIYEVNDGGSK

SEQ ID NO: 4004 - protein, 310 aa, Oligella ureolytica
  source 1..310: note = Related to CP065725.1
MAIVSFLATHLDIPEDQVESIVQRAPLLYKVYKIPKRSFGTRTIAQPTPELKKLQRAFLLTKPLPVHSAAMAYQPGLSIKKNALHHLHNKYLLKLDLLNFFNSITPDILWQEWKQHFEIPPPKEKKHIENLLFWAPQRKPNTHLMLSVGAPSSPNLSNFILYRFDERLQNLCKKLNITYTRYADDLTFSTNTRYALFSIPEQVAMLLNELFTGRININKRKTIFTSKAHNRHVTGVGLSSENKLSLGRAKKRYLKHLVHQFTLSLLADEEISHLQGWLAHAKHIEPTFIESLTNKYGQDIIHKIFETNHD

SEQ ID NO: 4005 - protein, 349 aa, Aeromonas enteropelogenes
  source 1..349: note = Related to NZ_CP083625.1
MVAIVSPPNLVPRLGGETIASSSKELSPRAKSWAFLWTVLMGVIEQLASALGKKDEDVIDFLVTAPRKYKVYTIPKRSVGHRLIAQPSQELKIYQKKYIELNPLPVHDTAMAYRQGLSIKENAKAHQKNSYLLKMDLENFFNSITTDVFWQEWLAFYPQPSDVDSIILERLLFWAPNKKLDGKLILSIGAPSSPALSNFIMHRFDEAVVNNCVAIGVKYTRYADDLTFSSNTKDILFTLPGLIENILMMLFNGAIRVNKRKTIFSSKAHNRHVTGVTISNDNNISLGRERKRYIKHLVYQYMNGKLEKDQVNHLQGLLSFAKHIEPNFITSLNIKYTHKIIHSIMSDKQ

SEQ ID NO: 4006 - protein, 310 aa, Xenorhabdus bovienii
  source 1..310: note = Related to FO818637.1
MTVLFGLVKTLGISEREAITFLSDAPKKYKVYSIPKRSSGHRIIAQPSKRLKEYQTAFLKCCLLPVHPSAMAYRQGLSIKDNANYHKDNQYLLKMDLENFFNSITPNILWESWNKKELFIDDNDRKILQRLLFWCPSKKNSGKLVLSIGAPTSPAVSNSFLYNFDEELYNFCLKYQIAYTRYADDLTFSTNQTGVLFTVHEMVKKLLIKHFDRQITLNHGKTIFSSKAHNRHITGVTITNDGKLSIGRQKKRYIKHLVYQFELGVLSIEDICYLQGLLAFAKHIEPLFIPRLVQKYSKETLKNIFDIGSS

SEQ ID NO: 4007 - protein, 356 aa, unidentified
  source 1..356: note = Related to CACVAY010000001.1; note = Thiotrichaceae bacterium
MFSHSKLVSLLLPPLECKNIAVFSKEPMSKLVTSLGFLSRALKMKTILEFASRTEQSPDQVMRYLKSASKKYKVYSILKRTHGRRIIAQPAKELKQYQNIFLDTHSLPVHSCAYAYKKGVSIKENAQQHVENNYLLKMDLENFFNSITPDILWNQWEDHFGWKFQSIEKVLLEQTLFWSTSKKLNRGKLVLSVGAPSSPALSNLCMYSFDRELQEICQTYGVSYTRYADDLTFSTQLKGRLIKFPDYVENLLNKHFSKKILINNRKTVFTSKAHNRHVTGITLANNGVISLGRKRKRYIKHLMHQFILGNIDDEERMHLRGLLAFSNHIEPSFISTLRNKYGNDVVQRVSEVINEK

SEQ ID NO: 4008 - protein, 307 aa, Vibrio alginolyticus
  source 1..307: note = Related to AAXMUQ010000002.1
MKIISQLAKYLNKPEDSIEDILLIGPERYKLYYIPKRTHGVRLIAQPSRELKEYQRAFLSFYKFPIHDCAMAYREGISIKDNAIAHKNNSYLLKLDLENFFNSINPIIFWDVWQKLELSNLSANEKKWIENLLFWNLHGDLVLSVGAPSSPTISNFCMYIFDSILTYHCNNIGITYTRYADDLTFSTNEERVLFKIPSVVETMLYDCFEGKLCLNKGKTAFSSKAHNRHVTGITLTNEGKISLGRSRKRYIKHKIHQFSLGKLDNYDIMHLKGLLSFARHIEPKFYDSLLNKYSKELVLSIFEANYE

SEQ ID NO: 4009 - protein, 307 aa, Vibrio sp.
  source 1..307: note = Related to NZ_CP022741.1
MSIISLLAQTLKKPEYVIEDILFIAPIRYKIYYIPKRTHGFRQIAQPSKELKECQRAFLRFCNLPTHNCAMAYREGLSIKNNAIAHKNQAYLLKLDLENFFNSITPNIFWHTWELTGAELPTKDNQQWIEKLLFWNLEDKLVLSVGAPSSPSVSNFCMLIFDQILQDQCQNLGIKYTRYADDLTFSTNEKDILFKIPESVENILSKCFNGNLRLNKGKTIFSSKAHNRHVTGITITNSGEISLGRSKKRYIKHKIHQFSLDLLNNHEVMHLKGLMAYARHIEPSFHESLIIKYSKEIIERIFEVPNE

SEQ ID NO: 4010 - protein, 320 aa, Chromobacterium haemolyticum
  source 1..320: note = Related to NZ_MUKV01000069.1
MAQDSHLGPFPLGKLMGIIYQLAEKLEMSELTVKKYLANAPNKYKVYKIPKRTYGFRIIAQPAKELKKFQRAFLDVFDLPVHNSALAYRKSISIKDNAILHCKNAYLLKMDLENFFNSITPDLFWKEWNKTLKILPRTEAQWLELLLFWRPSKKRNGKLILSIGAPSSPHISNFCLFNFDIIMSTKCEALGITYSRYADDLTFSTNKKNILFTIPKFVDSILTASFDGKLTINKNKTVFSSKAHNRHVTGITITNDGNISIGREKKRIIKHLVHNYKIGTLPPEEIDYLKGLLAFSGHIDPTFIDSLKKNIQQRLSKKYI

SEQ ID NO: 4011 - protein, 313 aa, unidentified
  source 1..313: note = Related to PBYJ01000041.1; note = Oceanospirillaceae bacterium
MSVIEKLALTLDKEQREVERFLVNAPNKYKVYSIPKRTHGSRVIAQPSKELKTYQRAFIDLYEKYLPIHDNSFSYRKGVGIKQNADVHKKNPYLLKMDLESFFNSIVPSMLWEEWERSIGNTPNAREKMWIERLLFWNPSKRSGGKLILSIGAPSSPMISNFVMHSLDKVLSVECSEKGVSYTRYADDMTFSTRNKDTLFIFPELVSNIIKSLFGNRISINRSKTVYSSKAHNRHVTGVTLTNEGRLSLGRDRKRYIKHLVFEFREKRLDIDTFNHLKGLIAFAKYIEPDFIIRLEKKYSTRLIKKVMDGDYD

SEQ ID NO: 4012 - protein, 313 aa, Marinobacterium stanieri
  source 1..313: note = Related to NZ_FTMN01000018.1
MSVLEKLAITLGKEQAEVESFLLNAPNKYKVYSIPKRTHGNRIIAQPSRELKKYQRAFIDLYEVYFPVHKNAFSYKKGIGIKQNAEVHKNNPYLLKMDLENFFNSIVPNMFWEEWERSIGDTPNKNEIKWIERILFWSPSKKSNGKMVLSIGAPSSPLISNFVMHSFDKILTSECEKKGVSYTRYADDMTFSTKNKNTLFSLPETVSNVIRGVFGNRVSINRSKTVYSSKAHNRHVTGVTLTNEGKVSLGRDRKRYIKHLIFEYQKNNLDAEKFNHLRGLIAFARYIEPCFIDRLENKYSARLVKKVMDGDYE

SEQ ID NO: 4013 - protein, 310 aa, Photorhabdus khanii
  source 1..310: note = Related to NZ_WHZZ01000002.1
MSVINRLATSLHQNELEVRAYLENASGKYKVYRIPKRTTGFRIIAQPAKMLKEYQRAFLQLYRFPIHDCAMAYQKGKSIRDNALMHAHNPYLLKTDLEDFFNSITPDIFWQCVEQTSVNVSLFLPEDRRYVDQILFWKPTKRSTRLMLSVGAPSSPIISNFCLHEFDQLIHEICRNLDIVYTRYADDLTFSCNVRDVLGSLPSMIETLLNKLFKKKLRLNRGKTIFSSMAHNRHVTGVTLNNKGKLSLGRERKRFIKHLINQYRYGLIDESDKAYLVGLLAFASHIEPEFIIRMNNKYSTELMDRLRRQQ

SEQ ID NO: 4014 - protein, 310 aa, Pantoea coffeiphila
  source 1..310: note = Related to NZ_JAFBFW010000005.1
MSLINRLATSLQQSELKVNAYLEGASGKYKVYRIPKRTTGFRIIAQPAKALKDYQRAFLQLYRFPIHECAMAYQKGKSIRDNALAHARNPYLLKTDLEDFFNSITPDIFWQCVERSSSSELQFQLADRRYVDQVLFWKPTKRSTRLMLSVGAPSSPVISNFCLYEFDTLINEYCRELDIIYTRYADDLTFSCNTREVLKSVPAIIETLLNKIFSKKLRLNRGKTIFSSMAHNRHVTGVTLNNEGRLSLGRERKRFIKHLINQYRYGMIDESDKAYLVGLLAFASHIEPDFILRMNDKYSYELMDRLRRQQ

SEQ ID NO: 4015 - protein, 310 aa, Erwinia sp.
  source 1..310: note = Related to NZ_LMLK01000022.1
MSVINGLAGLLNQSELDVVLYLQSASRKYKVYKIPKRTTGFRIIAQPAKALKDYQRAFLQLYRLPVHKCAMAYQKGKSVRDNALVHAQNSFLLKTDLEDFFNSITPDIFWESIERSPSDTPQISAEDKGYVEHLLFWQPAKRSKRLILSVGAPSSPVVSNFCLYEFDNLISEFCLPLNIAYTRYADDLTFSCNTRDVLGVLPLIIEKLLNKLYRRKLRLNRAKTVFSSMAHNRHVTGVTINNEGELSLGRERKRFIKHLINQYRYDMIDEADKAYLVGLLAFAKHIEPEFILRMNRKYTTELMERIRRQQ

SEQ ID NO: 4016 - protein, 310 aa, Pectobacterium brasiliense
  source 1..310: note = Related to CP063241.1
MSFINKLGVNFNQSPLELKVFLENAPSKYKVYKIAKRTGGFRIIAQPVKALKVYQRAFLQLYNFPVHGSAMAYQEGKSIRDNALMHARNPYLLKTDLEDFFNSITPDIFWKCVELSSADAPQFSVEDRRYVEKILFWQPAKRSKRLMLSVGAPSSPVISNFCLLEFDKLISHECRELGIVYTRYADDLTFSSRIPGVLSPLPAMIEQLLKKLYKSKLRLNRSKTIFSSMAHNRHVTGVTLNNEGGLSLGRERKRYIKHLINQYKYDAIDESDKAYLIGLLAFASHIEPAFILRMNDKYSTELMDRLRSQQ

SEQ ID NO: 4017 - protein, 308 aa, Klebsiella variicola
  source 1..308: note = Related to DAFWUX010000006.1
MSVINDLGRCLNQSDLVVKAFLENAPSKYKVYRIPKRTTGFRIIAQPAKELKRYQRAFMGTYRFPVHECAMAYQEGKSIRDNALAHAHNPYLLKTDLEDFFNSITPAIFWQCIESCPVDAPQFQDEDRRYVERLLFWQPAKRNKRLMLSVGAPSSPIISNFCLLELDRFLCEECERLGVSYTRYADDLTFSTSLPGVLSAIPALIESLLKRLFNSKLRLNRNKTLFSSRAHNRHVTGVTLNNEGELSLGRARKRFIKHLIHRYDKLDEADKAYLVGLLAFASHIEPEFIIRMNAKYSTEVIDRIRRQQ

SEQ ID NO: 4018 - protein, 310 aa, Citrobacter koseri
  source 1..310: note = Related to UFVV01000001.1
MSVISELAMLLNQNEQDLRAFLKNASSKYKVYKIPKRTLGFRIIAQPAKALKECQRAFIQRYPLPVHACALAYREGKSIRDNAFIHAQNSYLLKTDLEDFFNSITPEIFWQCVDASHDGAPVFDGSDRVDIERILFWQPAKRSQRLILSVGAPSSPAISNFCLYDFDRLLSESCQTMGVAYSRYADDLTFSCSMPNVLRTLPAIIEALLNRLFNRRLRLNRGKTVFSSKAHNRHVTGVTLSNEGLLSLGRERKRYIKHLINQYRYDLLDEEDKAYLVGLLAFASHIEPEFILRMNAKYSSELMDRIRRHK

SEQ ID NO: 4019 - protein, 311 aa, Photorhabdus bodei
  source 1..311: note = Related to NSCM01000023.1
MSVISGLATLLHQSESDVRLFLENAPRKYKVYRIPKRTTGFRIIAQPAKRLKEFQRAFMQLYLFPVHESSMAYRKGKSIRDNASAHANNQYLLKTDLEDFFNSITPAIFWRCIEMSSEQAPQFLTQDKPYVERILFWQPVKRSKSRLMLSVGAPSSPAISNFCLYEFDRQMNEECQNLGITYTRYADDLTFSCNIQDLLRTVPAIIEALLNKLFKNALRMNHGKTVFSSKAHNRHVTGITLNNEGKLSLGRERKRFIKHLINQYKYGLLDDADKAYLIGLLAFASHIEPEFITRMNEKYSNELIERIRRQR

SEQ ID NO: 4020 - protein, 310 aa, Photorhabdus luminescens
  source 1..310: note = Related to NZ_JXSK01000003.1
MSIINGLATVLHRSEADVRSFLENAPRKYKVYRIPKRTTGFRIIAQPAKELKALQRAFLQLYSFPVHETSMAYRKGKSIRDNALAHVNNPYLLKTDLEDFFNSITPDIFWRCIDTSSIETPKFSVQDRPYVERILFWQPVKKSKKRLMLSVGAPSSPDISNFCLYEFDRKLSEDCQNLGITYTRYADDLTFSCDMRDVLRTVPVMIEALLKKIFNKALKINHGKTVSSSKAHNRHVTGVTLSNEGNLSLGRERKRFIKHLINQYKYGLLDEADIAYLRGLLAFANHIEPDFIGRVNNKYSIELMERLRRP

SEQ ID NO: 4021 - protein, 311 aa, Citrobacter freundii
  source 1..311: note = Related to CP047307.1
MSVIRGLASVLRQSDSDISTFLATAPRKYKVYKIPKRTTGFRVIAQPTKGLKDIQRAFVQLYSFPVHDASMAYMKGKGIRDNAAAHAGNQYLLKADLEDFFNSITPAIFWRCIEMSSVQTPQFEPLDKIFIEKILFWQPIKRRKTKLILSVGAPSSPVISNFCMYEFDNRIHTACKKVEITYTRYADDLTFSSNIPDVLKAVPSTLEALLKNLFGSALRLNHSKTVFSSKAHNRHVTGVTINNEETLSLGRDRKRFIKHLINQYKYGLLDNEDKAYLTGLLAFANHIEPGFITRMNEKYSLELMERLRGQR

SEQ ID NO: 4022 - protein, 312 aa, Dickeya dadantii
  source 1..312: note = Related to NZ_CP023467.1
MQIIKALAAILRQSESDVRLYLQNAPLKYKVYRIPKRTNGFRIIAQPAKALKEYQRALIQLYSFPVHDVAMAYRKGKSIRDNAIAHANNRYLLKTDLEDFFNSITPTVFWHCFEQCSVDTPQFSTQDKNYVEKILFWQPVKRSKHTLMLSVGAPSSPTVSNFCLYEFDRLLSDECLRLDIVYTRYADDLTFSTNTPNLLRLLPSFIQVLLTKLYKNALRLNHGKTVFSSKAYNRHVTGITLNNEGQLSLGRERKRFIKHLINQYKYGLLDEADIGYLCGLLAFVNHIEPEFIIKMNEKYTVSLISSIHRSNQ

SEQ ID NO: 4023 - protein, 312 aa, Serratia liquefaciens
  source 1..312: note = Related to NZ_DF820431.1
MQVIKELAAILHQDESDIRLYLKHAPHKYKVYRIPKRTHGFRIIAQPAKVLKAYQRTLIQLYPFPVHDAAMAYRKGKSIRDNALAHADNRFLLKTDLEDFFNSITPEIFWRCIERCSVDAPQFSAQDKSYVEKILFWQPVKRSRHTLMLSVGAPSSPMVSNFCLYEFDRLLSDECQSTGIVYTRYADDLTFSTNTPNLLKLLPAFIQALLAKLYKNALRLNHGKTVFSSKAHNRHVTGITLNNEGQLSLGRERKRFIKHLINQYKYGLLDDVDTSYLRGLLAFANHIEPEFITRMNEKYTAALVGSIYRSKQ

SEQ ID NO: 4024 - protein, 314 aa, Aeromonas australiensis
  source 1..314: note = Related to NZ_CDDH01000001.1
MSVIKELATFLHQSEFDVSLFLQNAPRKYKVYRIPKRTSGFRIIAQPAKALKVYQRALMQLYTLPVHDAAMAYRKGKSIRDNALAHAQNQYLLKIDLENFFNSITPTLFWNCIDECLVNDPKFSSTQDRIYVEKILFWQPVRRSKKTLFLSVGAPSSPAVSNFCLYKFDHLLTEECQTLGIVYTRYADDLTFSTNIKDILKLLPALIQTLLKKLYNSALRLNNGKTVFSSKAHNRHVTGVTINNQGNLSLGRERKRFLKHLINQHKYGLLDDTELGYLRGLLAFANHIEPQFIMRMREKYTVDLISSITGAIND

SEQ ID NO: 4025 - protein, 311 aa, unidentified
  source 1..311: note = Related to JAGTSE010000026.1; note = Proteobacteria bacterium
MGIIKELSIFLHQDESDVSLYLQSAPRKYKVYRIPKRTNGFRVIAQPTKTLKEYQRAFVHAYPLPVHEAAMAYRVGRSIRDNAEAHTANQYLLKTDLEDFFNSITPAIFWRCIEQCSAEVPTFLHQDKIYIDRLLFWQPTKRSARTLMLSVGAPSSPAVSNFCLYEFDRLLSDECKRLDIVYTRYADDLTFSTNTKDLLKILPAFIQSLLKELYKNALRLNHGKTVFSSKAHNRHVTGVTINNEGKLSLGRERKRFMKHLINQYKYGLLDDADTNYLRGLLAFASHIEPEFITKMSKKYTDALIRRLYRSN

SEQ ID NO: 4026 - protein, 312 aa, Proteus penneri
  source 1..312: note = Related to CVRY01000004.1
MQMIKQLADSLQQDESDIKKFLQNGPRKYKVYRIPKRTTGFRIIAQPSKKLKEYQRYFIEFYPLPTHKAALAYRKGKSIRDNALAHVNQSYLLKMDFENFFNSITPAFFWHSLTSCTSSIPQFTDVEKSYVEKILFWQPIKRSKNTLMLSVGAPSSPVISNFCLYEFDRRLSQICEEYGVIYTRYADDLTFSTNIKNLLPKFPSIIHSLLQELFNGILKINHAKTVYSSKAHNRHVTGITLNNEGQLSLGREKKRFIKHMINQYKYNVLDDEDKNYLCGLLAFSLHIEPEFIVRLEKKYTSELIKKLTGKTL

SEQ ID NO: 4027 - protein, 341 aa, Aliivibrio fischeri
  source 1..341: note = Related to NZ_WOBT01000016.1
KKYVHFAVSSKELSPRVLKLLGFFVERFMNLVQQLAKHLKKNESDVIRFLVDAPNKYRVYKIPKRSHGHRVIAQPTKELKEYQRAFISIFKFPVHHSAMAYCEGKSIKENALAHVENSYLLKTDFENFFNSITPAIFWQSIEHCRVDAPIFTAQERKLVEKLIFWCPSKEKNGKLVLSVGAPTSPTISNFCLYEFDNLISNACNAQQITYTRYADDLTFSTNKRDILCTIVSSIQQLLLTIFSHHIKLNYSKTAFSSRAHNRHVTGITISNESKLSLGRERKRYIKHLINQFKYNLLDDSDIRHLQGLLAFAQHIEPVFISRLKTKYTNELIQRIYEASHD

SEQ ID NO: 4028 - protein, 313 aa, Vibrio tapetis
  source 1..313: note = Related to NZ_LT960611.1
MNLVKQLARHLRKSESEVIRFLVDAPSKYRVYKIPKRSHGHRVIAQPSKELKEYQRAFLAIYTFPVHPTAMAYCEGKSIRENALAHVQNNYLLKTDFENFFNSITPAIFWQSVGSCTVDTPMFTTQEKRLVEKLIFWCPSKTELGKLVLSVGAPTSPSISNFCLYEFDRFMTNVCSDQKITYTRYADDLTFSTNEKNTLNTIVPVIQQLLVEFFSYSLKLNHSKTAFSSRAHNRHVTGITLSNESRLSLGRERKRYIKHLINQFKYNLLDGSDIRHLQGLLAFAQHIEPVFISRLKTKYTSELIQRIYEASHD

SEQ ID NO: 4029 - protein, 312 aa, Vibrio harveyi
  source 1..312: note = Related to BGNF01000084.1
MNLVHQLAKQLRKSELEVIRFLENAPNKYRVYKIPKRSHGHRIIAQPTKELKEYQRAFLSICNFPVHHSAMAYCEGKGIKENALAHVNHNYLLKIDFENFFNSITPTLFWQAIENAKCDIPAFTTQEKEIVEKIVFWCPSKLKHGKLVLSVGAPTSPIISNFCLNEFDRFISDICNDQKITYTRYADDLTFSTNTRDLLYTIIPSIQDLLALMFSHDLKLNHSKTVFSSRGHNRHVTGVTLSNDGTISLGRERKRYIKHLINQFKYNLLDEGDTRHLQGLLAFAQHIEPDFIRRLNAKYTIELMRSIKEANS

SEQ ID NO: 4030 - protein, 313 aa, Vibrio harveyi
  source 1..313: note = Related to NZ_CP045070.1
MNLVKQLAQHLGKSEYEVSLFLVDAPNKYRVYKIPKRTYGHRVIAQPSKELKKYQRAFLDIYPFPVHSAAMAYCEGKSIKDNAQAHVQNDYLLKTDLENFFNSITPTIFWSCIESCSLDTPSFTTHEKKLVESLLFWCPSKTKNGKLVLSVGAPSSPTISNFCLYEFDRYLSTICNFQNITYTRYADDLTFSTKKKDILYTVIPSLQDLLVKLFSQSIRLNHSKTVFSSRAHNRHVTGVTLNNDRRLSLGRQRKRYIKHLVNQFKYDQLDEVDTRHLRGLLAFAKHIEPTFIKRLKDKYSSELIKRIYEARNE

SEQ ID NO: 4031 - protein, 319 aa, Vibrio coralliilyticus
  source 1..319: note = Related to NZ_CP009264.1
MNLVSKLALYLEKSESEVIRFLSDAPNKYRVYKIPKRSHGHRIIAQPSKELKEYQRAFLELYEFPVHDSAMAYCKGKGIKENALAHSKNSYLLKTDLENFFNSITPPIFWQCMEKCASTVPQFTKQEKVLVEKLIFWCPSKDRNGKLVLSIGAPSSPAISNFCLYQFDDFMSDVCYDHKITYTRYADDLTFSTNEKDLLHTIINSIQYSLNYFFSNSLKLNHSKTVFSSRAHNRHVTGITINNHGRLSLGRERKRYIKHLVNQFKYNQLSESDIFHLQGLLSFARHIEPKFIFRLKDKYTNELVQRIYEAGNEQQNKKQ

SEQ ID NO: 4032 - protein, 340 aa, Vibrio vulnificus
  source 1..340: note = Related to NZ_CP027030.1
MYEHFAVSSKELSPRAPLLLGFFVERKMNLVKRLAHHLGKSEPEVIHFLADAPNKYKVYKIPKRSYGHRVIAQPTRELKLYQKAFLELYSFPVHSSATAYCKGKSIKDNALSHVKNHYLLKTDLENFFNSITPNIFWKSIENDSIATPKFSTSEIALVERLIFWRPSKLQGGKLVLSVGAPSSPTISNFCLYQFDEYLSIICKEQNISYTRYADDLTFSTCDKDVLHTVIPLIQSLLDYFFASELKLNHSKTVFSSKAHNRHVTGITLNNEGKLSLGRERKRYIKHLVHSFKYGKLDNTEIRHLQGMLSFAKHIEPIFIDRLKEKYTDELIKIIYEAGHE

SEQ ID NO: 4033 - protein, 312 aa, Shewanella sp.
  source 1..312: note = Related to NZ_CP080413.1
MDLVKNLANNLGKRESEVRRFLADAPNKYRVYKIPKRSYGHRVIAQPSKELKDYQRAFLQLYTFPVHRAAMAYCKGKSIKENAQAHASKKYLLKTDLENFFNSITPRIFWEVVRKNTDLMKVFTSQEVKLVEKLLFWCPSKTKSGKLILSVGAPTSPTISNFCMSEFDKQLSQLCKVKDIVYTRYADDLTFSTNEENLLFKIIPEIQSLLTKNFSFNIKLNHSKTVFSSKAHNRHVTGVTLSNNGKISLGRDRKRYIKHLIHQFKHNQLDTSEIHHLRGMLSFAKHIEPIFIKRLSIKYTDELIRNIYEAQL

SEQ ID NO: 4034 - protein, 313 aa, Moritella yayanosii
  source 1..313: note = Related to NZ_LS483250.1
MSVIELLAKKLNKSESEVMSFLSDAPKKYRVYKITKRSHGYRVIAQPTKELKDYQRAFLTLYTFPLHESAIAYREGLSIKDNALVHVENQYLLKTDLENFFNSIPPSVFWDSLGSCSGVTPHFSVQDQQWVEKLLFWSPSKKSNGKLVLSVGAPSSPMISNFCLFEFDLSLSSLCKKQAISYTRYADDLTFSTDEKDVLYTMIPSVKNVLFNNFKDHLKVNNSKTVFSSRAHNRHITGVTLNNEGQLSIGRERKRYIKHLVHQFKYNELDSSDISYLQGLLSFAKHIEPVFIERLKIKYSNALIQCIYEANHE

SEQ ID NO: 4035 - protein, 309 aa, Vibrio vulnificus
  source 1..309: note = Related to DACQYM010000007.1
MSFIERMAKELNKPQIEIEDFLFFAPNKYKVYSIPKRTHGFRTIAQPTKELKDYQRAFTSWVELPVHNCAMAYCQGRSIKDNAYAHKKNAYLLKLDLENFFNSITPDTFWRVWSSRWNLPNKNERQWVERLLFWNNKEKLVLSVGAPSSPLISNFCMVQFDKDLYLYCQSLGVTYTRYADDLTFSTNKRNILFSLPSDINQFLEKHFQSDLKINPSKTAFSSKAHNRHVTGITINNDGKLSLGRERKRYIKHKIHQFKLNVLDAYEIQHLKGLLSFAKHIEPTFIESLEKKYSKSLIEIIFEAKYDERK

SEQ ID NO: 4036 - protein, 306 aa, Vibrio splendidus
  source 1..306: note = Related to PIFQ01000001.1
MTFIQRLAKELNKSRDEVEDFLFFSPEKYKVYRIPKRKHGFRVIAQPTKELKTYQRAFISLIQLPVHECAMAYCKEKSIKDNAAAHKNNKYLLKLDLENFFNSITPEIFWEVWASFTSLPSEEDRKWMEKLLFWDKQGKLVLSVGAPSSPLLSNFCMTNFDKELTSYCKKKDVSYTRYADDLTFSTNKRDALFSFPAVISEFLDKHFSSRLMINHSKTAFSSKAHNRHVTGITITNEGKLSLGRERKRYIKHKVHQFKIEKLDPYEIQHLKGLLAFAKHIEPKFIKSLNNKYSKLLIKKIFETNDD

SEQ ID NO: 4037 - protein, 305 aa, Enterobacter cloacae
  source 1..305: note = Related to JAKMJP010000001.1
MKLVGQLAHILSISEQDTLRLILNAPFKYRVYTIPKRTHGRRVIAQPTKVVKKLQKGFISLYNFPVHSRCMAYRKGLSIKHNAEMHLDNSYLLKMDLSDFFNSLTPKIFWNTWKEFWQLPDGLEQRLIESIIFWNNNSILTLSVGAPSSPAISNFCLYPFDEKLDKYCIEKGIAYTRYADDLTFSTKENNLLFILPSIVSGMLHDIFGGSLTINNKKTVFSSKAHNRHVTGITITNEGSASIGRERKRYIKHLLNKYKFNELNSNDINHLRGLLAFAFHIEPDLLTSLSNKYTHELLEKLKQEGE

SEQ ID NO: 4038 - protein, 305 aa, Enterobacter sp.
  source 1..305: note = Related to JAJCXF010000001.1
MELVAQLAHILSISEQDTLRLILNAPYKYRVYTIPKRTHGRRVIAQPTKAVKKLQKSFLHLYDFPVHSKCMAYRNGISIKDNAEKHLENPYLLKLDLSDFFNSLTPKIFWNTWQKFQQVPDALEQRLIENIVFWNNNSKLTLSVGAPSSPVISNFCLYFFDEKLEAYCLKEDIVFTRYADDLTFSTKKNNVLFNLPNIVSKYLNDIFDGALTLNNNKTVFSSKAHNRHVTGITITNEGNASIGRERKRYIKHLLHKYKLNHLNYNDINHLRGLLAFAFYIEPNFATTLSKKYTRELLEKLNEERG

SEQ ID NO: 4039 - protein, 313 aa, Vibrio brasiliensis
  source 1..313: note = Related to JAKEUX010000006.1
MKIVSVLAGELVVSEQEILSILLGASKKYKVYPIPKRTHGIRLIAQPTKKVKVLQRAYVDMMNFPVHSNSVAYRKGYSIKDNAQFHASNPYLLKMDLSNFFNSITPKIFWGMWEKLWDLPEPLEKHLIENLLFWNIDKGSSISRLVLSVGAPSSPIISNFCLYEFDELMTKHCISRDIYYTRYADDMTFSTKKRNVLFDIPNFVKSLLYDVFGSSISVNYNKTVFSSKAHNRHVTGITLTNDGEISLGRERKRYIKHLVNEYRYNKLSSEDFNYLKGILSFSKHIEPKFVRSLINKYGEDVITSIFSGDLNET

SEQ ID NO: 4040 - protein, 305 aa, Kosakonia cowanii
  source 1..305: note = Related to NZ_CAKODS010000001.1
MKIVMALAQQLKYSEPELLQLVLKAPYKYRVYTIPKRTHGRRTIAQPTKSVKELQREFLKYKVFPFHASSMAYRKGMSIKDNAASHSTNSFLLKMDLANFFNSLTPDVFWSVWADHWEPLSPLEHRLVENILFWDNKGKLMLSVGAPSSPTISNFCLFFFDVAITNYCSGIDVTYTRYADDLTFSCNTPGILSTIPAFISRILKDKYNGKISINHQKTIFSSKAHNRHVTGITITNDTKLSIGRYRKRYIKHLINQYKYKLLDSDSIYHLKGMISFANHIEPDFLISLKNKYSSKLINEIIGVHK

SEQ ID NO: 4041 - protein, 305 aa, Citrobacter koseri
  source 1..305: note = Related to JAASMA010000001.1
MKIVSVLAQQLKCSESDILKLILNAPYKYRVYSIPKRTHGRRIIAQPTKAVKELQRSYLKYKDFPFHINSMAYRKGFSIKDNAESHRLSAYLLKMDLANFFNSLTPDVFWDIWRQHWEPLQSLEHRLVENILFWDNSGKLMLSVGAPSSPAISNFCLYFFDNAVSEYCEKINVIYTRYADDLTFSCNDPNILPTLPEFISRVLKEKFSGKILVNHQKTIFSSKAHNRHVTGITITNDEKLSIGRYRKRYIKHLINQYKYNLLDAETIYHLKGMISFSNHIEPDFLNSLRKKYSSNLIDEIIEVNK

SEQ ID NO: 4042 - protein, 306 aa, Vibrio breoganii
  source 1..306: note = Related to MCZP01000152.1
MELITSLARAIEKSEPDTLNLVLSAPYRYRRYTIPKRTHGRRLIAQPTKEIKAVQKAFVKIRTFPIHPAAMAYRKGVSIKDNAQAHKLNSYLLKMDLTDFFNSITPSVFWRVWEKVWPLPERLEMLLIERIIFWSNEDELMLSVGAPSSPVVSNFCMYFFDDYISTLCDQFDLVYTRYADDLTFSTNKTNLLFEMPSIVGAVLKTEFNDFLAINKSKTIYSSKAHNRHITGITITNNNELSIGREKKRYIKHLVHQHLVCKLSIEDSNHLRGLLSFVSHIEPTFIKSLKNKYSEETIDKLLRGSYE

SEQ ID NO: 4043 - protein, 313 aa, Vibrio parahaemolyticus
  source 1..313: note = Related to NZ_QPQH01000001.1
MNLITKLAKELETSEPNVLSTVASGPLKYKVYSIPKRTRGRRIIAHPSRELKQVQKAFLALYQFPIHSSAMAYKKGVSIKENAECHRLNKYLLKMDFENFFNSITPLLFWKVWSLNYPEPTFLEKRVIENILFWAPSISERDNLMLSVGAPSSPTISNFCLYQFDLIITKYCDDNEITYTRYADDITFSCNTPKGLSKIPKAVRKTLKNLYGTQIEINNQKTVFSSQAHNKHVTGITITPDGKLSIGRERKRYIKHLVHQYTLGALEQEDINHLRGLLSFAKHIEVSFFNSLITKYSADVMLQITRGNNEKNF

SEQ ID NO: 4044 - protein, 312 aa, Vibrio gallaecicus
  source 1..312: note = Related to NZ_SZZR01000017.1
MNLLQRLSIELGVSESHILSITASGPLKYKVYSIPKRTHGRRIIAHPSKDLKKLQKSFIKLHNFPIHTNAMAYKEGVSIKDNASFHKSNKYLLKMDFENFFNSITPVLFWNVWNQHFPKSSYFDKKIIENILFWAPNIHERERLILSVGAPSSPMISNFCLFQFDSILTHYCIERSIFFTRYADDLTFSTDTPDLLKTLPGVISNLLRQLYEGQIEINNQKTVFSSQAHNKHVTGITITPEGKLSIGRSRKRYIKHLVHQYILNKLKSSDFNHLRGLLTFSMHIEPQFITSLENKYSTNIIENIVRGINEQN

SEQ ID NO: 4045 - protein, 321 aa, Vibrio ishigakensis
  source 1..321: note = Related to BBSA01000008.1
MSVVSYLTNSCHCNSDDLFRLAINAPRRYKVYSIAKRTSGYRTIAHPSAELKKVQYQIISAFSEGNRPLAQLSIHSQAMAYKTGVGIKENAKMHSHNSYLLKMDFEQFFNSITPELFWRSYHALNPETTLSRTDKKLIDLFLFWAPNKYDLSRLVLSVGAPSSPLISNFCMYQFDELIHRFCHERKITYTRYADDITFSTNVPNVLFTVPKKVDELLKELFSGLIMINNQKTVFSSRAHNKHVTGVTITPQGGLSLGRNRKRYIRHLVHQFTLGRLATDDLNHLRGLLSFSQYIEPSFVLSLKKKYSIPIVDSISRGRYEC

SEQ ID NO: 4046 - protein, 312 aa, Vibrio lentus
  source 1..312: note = Related to MCXQ01000034.1
MDLVKKLASEVGVTEREIKAFLYLAPRKYKVYTIPKRKSGVRVIAQPTSELKELQRKYVQMMDLPSHECSMAYKKGVGIKENAERHQGNTYLLKMDLENFFNSITPEVFWGTWSNFYAFPTSIEKLYLEKLLFWCPSKKNSNKLILSVGAPSSPAVSNFCMLVFDNVVSQYCISKQIVFTRYADDLTFSTQQKNALFEVPSLIQRVLSEIFGRKLTINHSKTTFSSMAHNRHITGITINNDGELSIGRDKKRYIKHLVNQFNYNKLDEQDLYHLRGLLAFAKYIEPNFINSLNKKYSSDVMNKLLRGGNEKI

SEQ ID NO: 4047 - protein, 312 aa, Vibrio campbellii
  source 1..312: note = Related to NZ_CP025953.1
MDLVKKLASEVGVTEQEIKAFLHLAPRKYKVYTIPKRKSGVRVIAQPTSELKKLQRKFVKIVNFPTHECSMAYKKGVGIKQNAEIHQANTYLLKMDLENFFNSISPDIFWKVWSEFNPLPTSVDKLYIEKLLFWCPSKKNSNKLILSVGAPSSPNISNFCMSKFDDVVSKFCQDRNIIFTRYADDLTFSTKKRDVLFEVPSLVQHALSEEFGRRLTINHSKTTFSSMAHNRHITGITINNEGNLSIGRDKKRYIKHLVHQFKYNNLDEQDIYHLKGLLAFAKYIEPSFLGSLNEKYSFEVMKKIIRGDNEEV

SEQ ID NO: 4048 - protein, 303 aa, Pseudoalteromonas sp.
  source 1..303: note = Related to NZ_LOFH01000001.1
MKLLSEKSNLTEDQISRILVNGSRKYKVYLIPKRSHGNRVIAHPAKKLKLLQKDFLKIVDFPYHECSMAYEKGTGIKKNAFAHSKNEFLLKMDLAEFFNSITPTIFWSAFSKYFNITPNHIDSYFVNNLIFWLKEGDKAVLSVGAPSSPKISNFCMFQFDEIVFQYCNESFITYTRYADDMTFSTNVREILFTIPSFVESLLFQLFGTAIAINYSKTVFSSKAHNRHVTGVTITNEGALSLGRKRKRYIKHLTHQFVTGVIDKENIAHLRGLLAFSNDIEPSFLSTLDRKYGPGITTKIMEIK

SEQ ID NO: 4049 - protein, 302 aa, Aeromonas hydrophila
  source 1..302: note = Related to CP000462.1
MDKKAIYIERFLVYAPRKYRVYKIPKRKHGSRVIAQPTAELKKLQRAFINRSKIPVHECAMAYKDGVSIKDNAQLHSTNTFFLSMDFENFFNSITPDLLWGVFNKFGKVISPNEKLWLSKLLFWCPSKKNSNKLILSVGAPSSPKVSNFCMYFFDEYISTYCQDRNITYSRYADDLSFSTNEKDILFQIPGVVKETLLKLFGRDITINNSKTVFSSKAHNRHVTGITITNEGELSLGREKKRYIKHLIFRFKNGLLDVSDVSYLRGILSFAFYIEPAFKTSMVKKYTKATIDSIFNGVDDGK

SEQ ID NO: 4050 - protein, 305 aa, Citrobacter freundii
  source 1..305: note = Related to DACSXM010000001.1
MFIATLAQKMGKNDREIREFLINAPEKYKVFTIPKRKHGYRIIAQPSRELKVYQRQLEDLISFPVHYRAMAYCKGRSIKINALHHVKNSYLLKLDLENFFNSITPDIFWKVWSKTWDLPCDEDRIYIEKLIFWRFQGTLRLSVGAPSSPLVSNFCMYYFDEKIEEICLNNKVSFTRYADDLTFSSNVKNILFEIPRLVQDTLENQFHTGFSINTSKTIFSSRAHNRHVTGITLDNTGKISLGRDRKRYIKHKVHHYTLNILDEDEINHLRGLIAFAKYIEPVFFHSLEAKYTANMMSKLLEGKDE

SEQ ID NO: 4051 - protein, 304 aa, Klebsiella oxytoca
  source 1..304: note = Related to NZ_CP090245.1
MFTEAFARKMGRDELEITEFLMNAPDKYKVYAIPKRKQGYRIIAQPSRELKHYQRQLQDFIIFPKHKCAMAYRKGLSIKNNALSHVNNSYLLKLDLENFFNSITPDLFWSVWSRTWSLPSKEDQLFLEKLIFWRFQGSLILSVGAPSSPSISNFCMYYFDGEIEAICTKMKITYTRYADDLTFSSNVRNILFEIPVLIENILNEQFKGLLRLNSSKTIFSSKAHNRHVTGITLNNNGKISLGRDRKRYIKHKVHLYTLGMLDATELNHLKGMITFARFIEPAFFKSLETKYNSNVIFRLTQEKI

SEQ ID NO: 4052 - protein, 301 aa, Pantoea ananatis
  source 1..301: note = Related to NZ_JABEBB010000004.1
MLLSALAQKMGISEDVAEQFLINAPEKYKVYSIPKRGIGFRLIAQPSKELKVYQKTLLNLIVLPINDTAKAYRLGESIKSNALIHSGNAYLLKMDLEDFFNSITPDVFWSVWQRFWELPDEYDMSVIESVTFWKKDNSLVLSIGAPSSPMISNFCLFFFDEEINKFCVKNNISYSRYADDLTFSTNIRNVLFSLPKLIAKVLKENFSGALKINRGKTIFSSKAHNRHVTGITLSNDGKISLGRARKRYIKHKIHHYKLGLLDFDEINHLKGLIAFSKFIEPLFFESLEIKYSKITLMKLME

SEQ ID NO: 4053 - protein, 310 aa, Colwellia sp.
  source 1..310: note = Related to JACGVM010000019.1
MGVIDKLANKLNFTKKDVAFFLFDAPKKYKVYNIPKRSFGHRVIAQPSKELKEYQRTFLELYQFPHHANSMAYSSGKSIKDNAEVHRKQRYLLKMDLENFFNSITPEVFWNAWGKFKALPDDNDKEWIERLLFWQPRSTRSNDLKLSVGAPSSPSISNFCMYLFDEVVTEHCQKESVYYTRYADDLTFSTNKKDILSSIPSVIKTKLKECFDHRLVINQRKTKFSSKAHNRHVTGITISNDEKLSLGRERKRYIKHLVHQFQLNKLDQKDIRHLQGLIAFARHIEPMFISSLTKKYSETLIQRIIEAHNE

SEQ ID NO: 4054 - protein, 309 aa, Marinomonas primoryensis
  source 1..309: note = Related to NZ_CP016181.1
MDTADFLSKLTNKSRSSIVDFLRLAPNKYRVYTIPKRSYGYRTIAHPTANLKFLQRTFSENFAFPTHAAAQAYISGKGIKSNATQHKNNCYLLKLDLEDFFNSIKPDLFWGVWDKAFQELPSPASKEMLEQLLFWRPSRRIGHTLVLSVGAPSSPAISNFCMYFFDVAITNICELLEVKYTRYADDLTFSTNQKNILFELPALIESTLKEEFSLQLNINKKKTKFSSKAHNRHVTGVTITNDSTLSLGRSRKRYIKHLVHRATLKQLNTDELNHLIGLLSFAHDIEPDFLTRLDAKYGDGSIQRIRSSI

SEQ ID NO: 4055 - protein, 312 aa, Snodgrassella alvi
  source 1..312: note = Related to MEIT01000084.1
MREIIKYADSLEISVENLQIFLLNAPKMYKVYKILKRTHGYRVIAQPAKQLKEYQRKFIKIFSQYLVVHEYAMAYQKNKNIQQNAEIHKNNSYLLKMDFENFFNSITPALFWNEWENINPDIFDENEKNLFSRLLFWNPNRKRTQRENLILSIGAPSSPLISNFVMYRFDKLITQYCLDKNINYTRYADDLTFSTNIKNILYQIPVEVSKNLNLLFGNKLRINNSKTVFSSKAHNRHITGITITNNNKLSLGRERKRYIRALVHQYKYAQLEKADIQYLKGLLNFCKSIEVSFIHSLAQKYGNETLKNIMKE

SEQ ID NO: 4056 - protein, 312 aa, Snodgrassella alvi
  source 1..312: note = Related to MEIK01000040.1
MQAFLKFAESLKISARELAIFLHNAPKMYKVYKIPKRTHGYRVIAQPTKQLKEYQRKFIEIFSTQMPVHEYAMAYQKNKNIQQNAIFHKDNSYLLKMDFENFFNSITPAILWNEWEKINPGVLNIIEKDFFSRLLFWNPNIKRKKQEKLILSIGAPSSPSVSNFVMYGFDDLITQYCNAREIKYTRYADDLTFSTNSKNILYPIPAEVDKTLKLLFGHNLRVNNGKTVFSSKAHNRHITGITITNNNKLSLGRNRKRYIRALVHQYQCAQLDKNDIQYLKGLLNFCKSVEIAFIKSLMRKYGEEIIENIMKE

SEQ ID NO: 4057 - protein, 312 aa, Snodgrassella alvi
  source 1..312: note = Related to CP091515.1
MKNITKYAKSLDLSVENLQEFLLNAPKMYKVYKILKRTYGYRTIAQPTKQLKEYQRQFTNLFTQYLPVHDCAMAYQKNKNIQKNAEIHRNNSYLLKMDFENFFNSITPDLFWSEWESANSDMLDKDEKLLFSRLLFWDPNIKKTKQENLILSIGAPSSPLISNFVMYRFDELIKEYCVCIEVNYTRYADDLTFSTNKKNILYTIPAEVNKNLKNLFNNKLRVNNSKTIFSSKAHNRHITGITITNDNKLSLGRQRKRYIRALVHQYKYTQLEKDDIQYLKGLLNFCKSVEISFIHSLAHKYGYEVLKNIMKE

SEQ ID NO: 4058 - protein, 310 aa, Enterobacter cloacae
  source 1..310: note = Related to CP010512.1
MNIIHLLARSLNEDDITIKNYLAKAPLKYKVFAIPKRTHGHRIIAQPARELKRYQRAFINYIEFPIHDCASAYIKNRSIKNNAEHHKENSFLLKMDLENFFNSITPQIFWDAWRENFPLPDKEQMYYFERLLFWDVGNNELVLSVGAPSSPMVSNFCMYLFDSTIYSFCKSRSITYTRYADDLTFTTNLKSNLFDIPNEIQVILKNNFSDQIKINRSKTKFSSKAHNRHITGITITNDNKISIGRNRKRYIKHLIHQFSISKMEQSDLYHLKGLISFAMYIEPEFFNALTKKYGSSIINCIMSNNNGKNN

SEQ ID NO: 4059 - protein, 312 aa, Citrobacter freundii
  source 1..312: note = Related to DACSVK010000003.1
MEIIKNLSKHLNRTESHIKSYLIQAPNKYKIYTIPKRSHGVRVIAHPAKELKEIQYAFLSILKFPVHEAAMAYVPQKSIKTNAHAHKNNQFLLKMDFENFFNSITPNIFWYHWNNAFPVIDAEERFWIERIIFWNNKDLKSNLTLSVGAPTSPTISNFCMYSFDEEVTKYCREKDITYTRYADDLTFTSNTKGILFNLPKHIDKTLKKLFFSAININNKKTKFSSKAHNRHITGITITNDEKLSIGRKRKRYIKHLVHMYVLNLLDRNDFEHLKGLLSFVYDIEPTYIYRLEKKYTKFIIDNIKEGKYEQKH

SEQ ID NO: 4060 - protein, 314 aa, Acinetobacter sp.
  source 1..314: note = Related to JALGBR010000010.1
MSNIDVVKQLTKHYSKSPKELFVFFVDAPRKYKVYEIPKRTSGTRIIAQPTPELKDYQRFIISILKDHLPTHECSMAYIQGKDIKQNAQMHSKNSFFLKMDFIDFFTSITPTLFWHACERQELNFDWLDKELLEKVLFWRPSKYSKKLVLSIGAPSSPYISNFLMYSFDQELNNYCKQNGITYTRYADDLTFSTKKSKVLFDIPECVRKFLIKFYGQKIQINHFKTVFSSKKHNRHVTGLTITNDSSISIGRAKKRYIKHLVHRFVKENISVEDLNYLKGYLGFIQYVEPNFLYSLERKYTISIINKIRAGRGV

SEQ ID NO: 4061 - protein, 312 aa, Acinetobacter junii
  source 1..312: note = Related to VYTC01000001.1
MSNIDVVKQLTEHYSESPKELFVFLVDAPRKYKVYEIPKRTSGTRTIAQPIPKLKEYQRFVISILKDYLPTHECSMAYLRGKDIKQNAQIHSKNSFFLKMDFMNFFNSITPTLFWHACERQEINFDWLDKELLEKILFWRPSRYSKKLVLSIGAPSSPYISNFLMYSFDQELSNYCNQNGISYTRYADDLTFSTNKSEILFNIPERVRKLLIILYGQKIQINQFKTAFSSKKHNRHVTGLTITNENSVSIGRAKKRYIKHLVHKSIEEEISVEGLNYLKGYLGFIQHVEPKFLMALERKYTEAVIKKIRLGC

SEQ ID NO: 4062 - protein, 312 aa, Acinetobacter seifertii
  source 1..312: note = Related to KB851203.1
MSRVEILEKLKLKFNKTPLELFQFLDDAPRKYKVYEIPKRTSGTRIIAQPISELKDYQRFVISILQTDLLLHDCCMAYVKGKDIKKNAEAHSQNSFFLKMDFMDFFNSITPSLFWHACERQNIDFDWFDKELLEKILFWRPSKYSKKLVLSIGAPSSPFISNFLMYSFDNEISDFCRKNNITYTRYADDLTFSTSNALVLFSVPNFVKKVLLKIYGQKIQINQFKTVFSSRKHNRHVTGLTITNENSVSIGRAKKRYIKHLVHAFIEQKVDPQDLNYLKGYLAFIQYVEPKFLNSLEQKYTAAVIQEIRIGN

SEQ ID NO: 4063 - protein, 315 aa, Acinetobacter sichuanensis
  source 1..315: note = Related to NZ_PYIX02000002.1
MSNIDVTQYLIEHHMEIHKSKEGFESFIKGASRKYRSYEIPKRTSGTRKIAQPMRQLKDYQRTIVTIFETTFLIHDCCMAYMKGRDIKTNALIHSGNSFFLKMDFTDFFNSITPKLFFEGCERQKIDLNWADKETLEKILFWCENKYSKELVLSIGAPSSPFISNFVMYSFDEVLNEYCKKNGITYTRYADDLTFSTSTSGILFSVPDIVRGTLLQFYGTKIQINQFKTAFSSKKHNRHVTGLTITNDNNISIGREKKRYIKHLVHNFIEEKITLEDLNYLRGYLGFIKYVEPSFLISLEQKYTQSVIQKIRLGN

SEQ ID NO: 4064 - protein, 312 aa, Acinetobacter sp.
  source 1..312: note = Related to LSZI01000016.1
MSRMDIAGHLTTHYSKTPQELFVYLVDAPKKYKVYEIPKRTSGTRTIAQPTPELKKYQSFVVSILKEYLPIHNCCMAYTDGRNIKQNAQIHSRNSFFLKMDLMDFFNSIIPKLLWEAFEREGVQLDWLDKEFLEKILFWKRSKYSKKLILSIGAPSSPFISNFLMYSFDKVLDEYCENNGITYTRYADDLTFSTKEKDVLFLIPDVVRETLVKFYGQKIKINHFKTAFSSKKYNRHVTGITITNSDEISIGRAKKRYIKHLVHKFVEERISLDDLNYLRGYLGFIKYVEPKFLISLEKKYTQNVIEKIRIGN

SEQ ID NO: 4065 - protein, 315 aa, Acinetobacter haemolyticus
  source 1..315: note = Related to CP031984.1
MSKVDIIEYLMSKQVHNFDSKMDFFKFFGEAPKKYKRYEIPKRTSGTRTIAQPIRELKDYQRALIDLFQGYFPVHDSSMAYVKGKDIKRNAEIHSQNIYFLKMDFTDFFGSITPKIFWKACERAGIEFDWLEKEIIEKTFFWKPSKYSNKLVLSIGAPSSPFISNFIMFSFDCEIAQYCEEQGITYTRYADDMTFSTNTPNLLFSMSDTVRNVLIEFYGNTIKINHLKTVFSSKKHNRHVTGITITNDDELSIGRAKKRYIKHLVHKFIEEKISLEDLSYLRGYLGFIKYVEPNFLITLEKKYTQNVIQRIRVGN

SEQ ID NO: 4066 - protein, 315 aa, Acinetobacter sp.
  source 1..315: note = Related to NZ_VPEY01000001.1
MSKVDVIEYLMSQQIHNFDSKMDFFKFFDEAPKKYKRYEIPKRTSGTRTIAQPIRELKDYQRALIDLFQENFPIHASSMAYVKGKDIKKNAEVHSQNIYFLRMDFTDFFNSITPKIFWNACERAGIEFDWLEKEIIEKTIFWKPSKYSNNLVLSIGAPSSPFISNFIMYSFDNEIAKYCQERKISYTRYADDLTFSTKLPNVLLDLTRVIGNTLIGFFGNAIKINHLKTAFSSKKHNRHVTGITITNKDELSIGRAKKRYIKHLVHNFIEEKISPDDLNYLRGYLGFIKYVEPKFLASLEKKYTQNVIQKILLGS

SEQ ID NO: 4067 - protein, 315 aa, Acinetobacter baumannii
  source 1..315: note = Related to CP018254.1
MKNLNILKSLEEKFSIPQHELQEFIKSSPRKYKVYQIPKRSSGTRTIAQPTAELKEYQRHLVSIFSPILPVHETSLAYIKGKSIKDNALIHCKNRYFLKMDFANFFNSITPNIFWNCWEESKNQNKINDLDKEILTNLIFWKPSKYQKNLVLSIGAPSSPLISNFCMYKFDIALSEICHKKNISYTRYADDLTFSTEYANILFDLPLIVSKILMDLYGGSLEINHLKTAFSSKKHNRHVTGITITNEGKISLSRKKKRYIKHLIHKFIFGSIEINELTYLKGYFSFIQHIEPDFLSRLKSKYSDETINLIRSMEL

SEQ ID NO: 4068 - protein, 313 aa, Acinetobacter baumannii
  source 1..313: note = Related to DADATW010000032.1
MNNLNILKILEEKFDVPQHELLEFIKSSPRKYKVYQIPKRTSGTRTIAQPTAELKKYQRYLVSIFTPILPIHKNAFAYIQGKSIKDNALVHSSNSYFLKMDFSNFFNSITPNIFWNFFEETNVKFSGLDRILLSHLLFWKPSKYQQNLVLSIGAPSSPLISNFCMYKFDVVISEFCKNNNINYSRYADDLTFSTNIANSLYNLPLIVSKSLKELYGNSIEINPLKTSFSSKKHNRHITGITITNDGKLSLSRKKKRYIRHLIHKFMMKSIETNELQYLRGYFSFIQHVEPDFLSRLISKYSEETIRLIRLMEN

SEQ ID NO: 4069 - protein, 312 aa, Acinetobacter baumannii
  source 1..312: note = Related to CP009256.1
MSILEHLISNTSYSRKDLLEFLENAPRKYKIYHIPKRTYGFRTIAQPIPELKNLQRITIKFLENELPIHNSAAAYIKGKSIKHNALSHCKNKYFLKLDFENFFNSINTTVFWKMWDSYTNVQVPTQDKTYIENLLFWRPSKTSKKLILSIGAPSSPFISNFCMYEFDQAVEEICLKHKVTYTRYADDLTFSTNTKGVLFDFPKYINSILLDVYDGQLRLNSLKTKFSSKAHNRHVTGVTITNDKKISLGRARKRYIKSLIFKYINSNIDLEDISKLKGLLSFSYSIEPTFILSLKSKYSAEVIDEIFEKTKS

SEQ ID NO: 4070 - protein, 312 aa, Acinetobacter johnsonii
  source 1..312: note = Related to NZ_CP090180.1
MSILEHLVENSSYSSQELIEFLDNAPRKYKVFHIPKRTYGFRTIAQPIPELKDLQRIAIKYLENQLPVHKNAMAYLKGKGIKQNATKHCKNKYFLKLDFENFFNSVNTTVFWQMWSLYSEFQIPLQEQAIINNLLFWRPSKTSKKLVLSIGAPSSPFISNFCMFQFDEAITELCLIYDVTYTRYADDLTFSTNTKNVLFDFPKHVTTILLNIYQGQLRLNSLKTKFSSKAHNRHVTGITITNDKKISLGRSRKRYIKSLVYKYMASELDNENLAKLKGLLSFSYSIEPTFILALKLKYSAEIIDKLFEKTKP

SEQ ID NO: 4071 - protein, 308 aa, Parasutterella excrementihominis
  source 1..308: note = Related to NZ_GL883764.1
MGIISRMAVRLNMSEPLLVSHLNGGARKYKLFFIPKKRGGKRAIAQPSKEIKFLQRVFLSAVHLPTSNFVYSYKQGKNIFQNASLHKGNKYFLKLDFDNFFNSITPRIFWEQWKLAFPEQNYLNAVDKICLEQLLFWQPSAYKSDLVLSVGAPSSPAISNFCLLSFDNEIHSYCYQRGITFSRYADDLTFSTNEPNVLYEVLPFVQELLTQKFNGAIRLNPSKTVFTSKKHLCKVTGLIITPEGKISIGRNNKRYIKHLTFEYLQGRLEEEDVMKLKGFLSFAKSIEPSFIHSLQKKYSPVLLSKLGI

SEQ ID NO: 4072 - protein, 309 aa, Acinetobacter guillouiae
  source 1..309: note = Related to NZ_CP083989.1
MCLIDDLVTEFSKSKNEILEYSFVAPNKYKVYKIPKRKTGERVIAQPTKELKSFQRYIVNKKLNILPIHNCAFAYVKLKNIKENANQHKSNSYLLNMDLEDFFNSITPSLFWKVWGRILINLPDLEDRKLYENFLFWKPKKFSNKLILSIGAPSSPFISNFILYELDDFLFEFCKINSITYSRYADDLTFSTNIKDILFSIPNEVESKILELYEGAINLNTSKTYFSSKARNRHVTGLVLSNDGKISIGRSKKKFVKHLIFQYMLNRLNHEEILFLRGYLNFIKDVEPEYISILKRKYSDNLILRIMVD

SEQ ID NO: 4073 - protein, 312 aa, Acinetobacter gyllenbergii
  source 1..312: note = Related to KI530706.1
MSLIDELAFEFNKSKEEIRTYLLQAPSKYKVYLIPKRKVGKRVIAQPTKDLKLIQRFILAKKLKHLPIHDAAFAYVKNKSIKNNAAVHLSNSYLLNLDLEDFFNSITPKLFWRVWKRTIDQVPEVEERRIYNQFLFWQPKKNSKKLILSIGAPSSPYISNFILYELDRYLTVFCKNNFISYSRYADDLTFSSNVRNSLFKVPKVVEDKLFDLYEGEINLNHSKTVFSSKAKNRHVTGLVLTNDGKISIGRAKKRFIKHLVYRFKIGELEQSSFQYVSGYLNFIQDVEPVFLESLKFKYTEEVVNKIMLGVWE

SEQ ID NO: 4074 - protein, 313 aa, Acinetobacter baumannii
  source 1..313: note = Related to NZ_MABW01000006.1
MNLLDELAIKFNKSKDEIRTYSLKAPDKYKMYLIPKRKKGKRLIAQPTSELKLIQRYIVIHKLQKLPIHPCTYAYRKNISIKDNASVHVKNSYLLNLDLENFFNSITPRLFWKVWERTLNNLPDKEEQELYENLIFWRPRKSSHKMILSIGAPSSPYISNFILYELDSFLSSYCDEKSINYSRYADDLTFSTSKRNILFDIPNIVEGKIFELYNGLISLNDDKTTYSSKARNRHVTGLVLANDGKISIGRRKKRFIKSLIFKSINNELPLESISYLSGYLSYINDVEPSFIYSLERKYSYEVIHKIMGSKNEN

SEQ ID NO: 4075 - protein, 313 aa, Acinetobacter pittii
  source 1..313: note = Related to LWHP01000001.1
MDLISRLEIKFSSLSRVDVRSYLSKAPDKYKVYPIPKRKGGTRVIAQPAKETKILQNFVIDEIFYNFPIHQAAMAYRKNHSIKMNASIHASQKYLLSMDFENFFHSITPQLFWDVYARLIQEPITFEDKNYYQNLFFWRPKKQSDKLLLSIGAPSSPFISNFVMYEFDTFIYDFCKSVGIKYTRYADDLTFSTNQKDILFEIPHLVAKKLDELYKNRININRNKTSFSSKAHNRHVTGIVLTNENKISLGRKKKRYIKHLVHEFKLGKLSIADKNYLCGFLNYANFIEPEFILSLENKYTKEIIALARRNINE

SEQ ID NO: 4076 - protein, 314 aa, Vibrio furnissii
  source 1..314: note = Related to QJUD01000001.1
MDLKLYQYLESQNSNFTNLLRATPSKHYKVYKIPKKRLGFRTIAQPTPAVKVIQKQIVDYLIPKTSIHTSALAYVSGKGVKDNALQHVKSDYLLKVDLENFFNSITPKMLVKALKHQGINISQTDIMVLSQFLFWNITKKTNGKLVLSVGAPSSPFVSNLVMFAFDQRMSKLCRSTGITYTRYADDLTFSTTHKNILFQHLNEVRKVLKKEFGARLVLNESKTVFSSKAHNRHVTGVTLTNNNKISLGRDKKRYISSLIHKFKLGLLDQEDIYHLQGLISYAKHIEVRFLRNMSLKYGANVLDSIRKYSGEDDA

SEQ ID NO: 4077 - protein, 314 aa, Vibrio kanaloae
  source 1..314: note = Related to SYUN01000005.1
MDLKLYQYLNERNLNFKSLLEATPSKHYKVYKIPKKRLGFRTIAQPTPAVKIIQKEIVDYLTPKVSIHTSATAYVPGRSVKDNALVHVKSNFLLKVDLENFFNNITPKMLFKSLKKQGIVVSGVDLIVLQQFLFWNISKKRSGKLALSVGAPSSPFVSNVVMLSFDERMTKLCRKSGINYSRYADDLTFSTTQKGLLFEHLFVVRKALKKEFGARLVLNESKTVFSSKAHNRHVTGITLTNNNKISLGRERKRYISALVHKFKLGLLDVEDTLHLQGLISYANHIEASFVQKMSIKYGDNVLTEIIKYSGENDV

SEQ ID NO: 4078 - protein, 319 aa, Photobacterium kishitanii
  source 1..319: note = Related to PYNL01000004.1
MDLKELHLLQYVISKNMHTVSLLDDHPSLHYKVYKIPKKNIGFRTIAQPTAPLKKMQRDIVEYMTPRVCIHKNAMAYIEGVGIKNNALAHAKSTYLLKVDLENFFNSITPEMLFHSLKNQGFKINSIDWAYLKELLFWNIAKKKNKGKLVLSVGAPSSPLISNIIMYNFDVRMTSLCEKQNINYTRYADDLTFSTKDKNILFEHLKIIRKVLDNEFKGELVLNESKTIFSSKGHNRHVTGITLTNNNKISIGREKKRYISSLIHKFKYQKLNEDDIYHLQGLLSFASHIEKDFIYRMSKKYGIDTIKKIKLFSGDKNDQ

SEQ ID NO: 4079 - protein, 316 aa, Shewanella sp.
  source 1..316: note = Related to JABAIP010000015.1
MDIKLYEQLNSTNIGFNELFLRSPSKHYKVYKIPKRTLGFRTIAQPTPAVKRIQKQIVSIISKNAKVHHCATAYVRGKGIKENANKHVCSEYILKVDLENFFNSVTPKMLFKALKKQKIVLSQIDEKVIEQFLFWNMSKKINGKLVLSVGAPSSPFISNLVMYSFDKKMEEYCSKESIVYTRYADDLTFSTKSKGILFTHLQFVRKMIAKEFSSKLMLNESKTVFSSKAHNRHVTGIVLTNNNKLSLGREKKRYISALIHKFKLGKLLIDDIYHLKGLLSHASHIERDFILKMSEKYGAEVVLEINKFSCGESNDG

SEQ ID NO: 4080 - protein, 312 aa, Vibrio nigripulchritudo
  source 1..312: note = Related to CAOA01000025.1
MDLRLYRQLEQRNPNFIRLLNRYPSRHYKVYKIPKRTFGFRTIAQPTPNVKQVQKLVISLLSEKVNVHPCATAYVQGKSIKDNASYHVKSEYLLKVDLENFFNSITPKMLFKALKKQSISLTDQDMLVLEQCLFWNMSKKLNGKLVLSVGAPSSPYVSNVIMYSFDKRMSKICAKNNINYTRYADDLTFSTNTKGLLFGHLNEVRKLLKKEFGAKLTLNESKTVFSSKAHNRHITGVTITNNNKLSLGRDRKRYISALIHKFKHSQLSEDDIYHLKGLISHALHIESKFVHRMIKKYSKETLNSIRKYPSGA

SEQ ID NO: 4081 - protein, 312 aa, Rheinheimera pacifica
  source 1..312: note = Related to NZ_FNXF01000018.1
MKSGIYGILKAEFCDFDAFLSSKPPLHYKVYKIPKRTIGFRTIAQPTPTLKKIQKTLVGLIEPHVKIHPNAAAYRIGKGVKENALSHVNSSYLLKVDLENFFNSITPHMLFKTLKQQHIEINDVDKYVLEQIFFWNRSRRKNGRLILSIGAPSSPFISNVIMSKFDNDISIICDKKGVSYTRYADDMTFSTKEKDVIFSVMADVRRLLRNNFSNKMNVNELKTIFSSKAHNRRVTGVTLTNDNKISIGRDKKRYISALTHKFKFGKLDISDIYHLKGLISYARHVDVGFIRKLQKKYGVTTLELINKYSSEG

SEQ ID NO: 4082 - protein, 315 aa, Psychromonas arctica
  source 1..315: note = Related to NZ_AXWP01000001.1
MDLNLYQRLETDNCNLNKLLSSLPSTHYKVYKIPKRTIGFRTIAQPTSEIKDIQRKIIEILSPKVQLHPIATAYIKGQSIKSNALKHVNSEFLMKIDLENFFNSINPEMLMKALSKQKVEISSEDEKILRELLFWNRSKRINGKVVLSVGAPSSPFISNLIMYEFDSKLESMCTKRKVICTRYADDLTFSTCDKGELFSLLPEIRKLLYRTFGNRLVVNDSKTVFSSKKHNRHVTGITLTNSNRLSIGREKKRYISALIHKFKNKKLDEQDIMHLKGLLSYAVHIEDIFVHRMGKKYGYETLEAIKKFSLGECNE

SEQ ID NO: 4083 - protein, 313 aa, Pseudoalteromonas sp.
  source 1..313: note = Related to JADYXL010000005.1
MHLELSDFLHKKIPEFDAFLQSRPSTHYKVFKIPKRKIGFRVIAQPTPQVKAVQSQIVSFLEKKSKIHPCSMAYQKGCSIKKNALAHSDSEFILKVDLENFFNSINPEMLFNALESQSIVISDDDKFILEECLFWNRSKKRTSKLILSVGAPSSPYLSNIVMYDFDRVIHKICINLNVNYTRYADDLTFSTKEKNVLSEMISKIREALKTFFTSKIIINESKTIFSSKAHNRHVTGITLTNNNKISVGREKRRYISALIHKFKNSLLDESDIYHLQGLFSFACHIEVDFKKRMKKKYGDDVVHNLIKYSSREN

SEQ ID NO: 4084 - protein, 320 aa, Pectobacterium wasabiae
  source 1..320: note = Related to CP015750.1
MSIDIETTLKKAYPDFEILLKSRPATHYKVYKIPKRTIGYRIIAQPTPRVKAIQSDIIKILKEYVYIHDAATAYVDGRNILDNAKIHQNSVFLLKLDLVNFFNRITPEILFKALSRQGLHISDDNKNILRQFCFWNRSKRKNGALVLSVGAPSSPFISNVVMKSFDEELTSFCESNKINYSRYADDLTFSTNERDVLGLAHQKVKTTLSHFFGTRIIINNNKIVYSSKAHNRHVTGVTLTNDNKLSIGRERKRYISSLVFKFKEGKLSGDDINHLKGLIGFSFNIEPLFIGRLEKKYGKSTIKSIKKYSEGGVNGTDLTE

SEQ ID NO: 4085 - protein, 312 aa, Klebsiella quasipneumoniae
  source 1..312: note = Related to DAFWTN010000002.1
MSIDIETTLQKAYPDFDELLKSRPATHYKVYKIPKRTIGYRIIAQPTSRVKAIQRNIIEILRQHAHIHDAATAYVDGKNILHNAKIHQNSVYLLKLDLVNFFNKITPEILFKALARQHLDISDEDKNILKQFCFWNRSKRKNGALVLSVGAPSSPFISNLVMNSFDEEISSFCKKNKISYTRYADDLTFSTNERDILGLAHQKVKTTLIRFFGTRLIINNNKVVYSSKAHNRHVTGVTLTNNNKLSIGRDRKRYITSLVFKFKEGKLSNVDINHLRGLISFAYNIEPTFIERLEKKYGDSTIKSIKKYSEGG

SEQ ID NO: 4086 - protein, 312 aa, Serratia quinivorans
  source 1..312: note = Related to UGYN01000002.1
MSIDLESELTEKFADLQQLLKSRPSTHYKVYKIPKRTIGFRLIAQPTKKVKDVQRIIVENLSKIALVHDVATAYIKGRNILYNASLHQDSDYLLKLDLEDFFNSITPDFFFKELERQSISLSINDKFLIEQLCFWNRSKKRNGALVLSVGSPSSPFISNVVMYSFDKKLHGICLAEKINYSRYADDMTFSTKEKDSLKFIHNEVKGLLQEYFGNRILINQSKIVYSSKAHNRHITGITLTNNDKLSMGRDKKRYISSLVYKFKNGQLDFDDIQSLKGLIGYARSIEPVFLLRIQKKYGPSIIEEINKYSSEE

SEQ ID NO: 4087 - protein, 312 aa, Pantoea agglomerans
  source 1..312: note = Related to CP034474.1
MIIDLKGELSEKVDDLQQLLKSRPSTHYKVYKIPKRSIGFRLIAQPTKKLKHIQKLIVDLLLNKVKVHKNATAYIKGKNISFNASIHKNSEYLLKLDLENFFNSIKPGMFFKELERQNIRLSNEDTAILEQFCFWNRSKRKNGALVLSVGAPSSPFISNVLMYTFDQELYEFCASKKIAYSRYADDMTFSTKEKNVLLSIHKHVDFLLIKYFSKNLRINDLKVVYSSKAHNRHVTGVTLTNDNEISIGRDKKRLISAMVYNFKNNSLGLDDTHTLQGLIGYAFSIEPDFIKRLQAKYGSTILEDINKNLLRT

SEQ ID NO: 4088 - protein, 314 aa, Pseudoalteromonas luteoviolacea
  source 1..314: note = Related to JAGJEM010000002.1
MNYLLLKNVATDIKFFETLYSSPSNHYKVFKIPKRSIGFRIIAQPTKNVKDYQRKIVRVLEPLTAIHSAATAYKKNQGIKDNAFIHKNSEFLLKLDLVNFFNSITPEMFFNALNVQKIKYSENDRMAMSEYLFWNINERRADNKKLVLSVGAPSSPFISNFVMFAFDKKISQFCLANSINYSRYADDLTFSTKDKNVLFNVISEVQTTLKACFGHKLKINTSKTIFSSKAHNRHVTGITLTNNNQLSIGRERKRYISALVHKASLNMLPKEDIHHLQGLISFARHIEPTFIQRLERRYGKDIIHNIINTDLDKF

SEQ ID NO: 4089 - protein, 315 aa, Colwellia polaris
  source 1..315: note = Related to NZ_NBOE01000008.1
MEFKIVQALIKEFPELKELVKKTPSTHYKVFKIPKRTIGFRTIAQPTSSLKDVQRKVVDLLLPHVKVHHAAKAYIKKCSIKDNAAVHLNSQYLLKLDFENFFNSITPIMLFKVLAEQGVSVSKSDSKILSEILFWNRSKKINAPLVLSIGAPSSPLISNIVMYSFDRKIEDICKALDINYSRYADDLTFSTNIKSVLFNLVDMVNEALQIEFEGEININSSKTVFSSKKHNRHVTGITLTNSNKLSIGRIRKRYISALVHKFKTNQLNDLTEINHLKGLLGFAYYIEPNFIVRLTKKYGSDIMIRIRKFNSEDLK

SEQ ID NO: 4090 - protein, 315 aa, Vibrio parahaemolyticus
  source 1..315: note = Related to NNIR01000014.1
MKLSVLSHISPEVFPVEFSHYLAKKPSGHYKVYKIPKRTFGFRVIAQPTPELKCIQRAIVEQMKPYVQIHSSAKAYINGINIKENASAHVESSYLLKLDLENFFNSLTPSMFLKALNYQEIELVNNDIEPLIELLFWNRTKKKSPNLVLSVGAPSSPFLSNFIMYEFDKIVTSYCTKSNINYSRYADDLTFSTSEKNLLFVIPKYIENTLRDLFDDRIKLNRSKTFFSSKAHNRHVTGITISNNNKLSLGRDRKRYIRALLHKFSIRSLDNEDDIEHLKGLIGFAKTVEPIFIDKMKNRYGEKVFIDLFRYSGGD

SEQ ID NO: 4091 - protein, 315 aa, Aliivibrio finisterrensis
  source 1..315: note = Related to SEZJ01000011.1
MKLPILSRISSEVFPSEFSHYLAKLPSSHYKVYKIPKRTFGFRVIAQPTPELKCIQREIVKQIKPYVKIHNVAKAYVDGVNIKDNAYVHVKSNYLLKLDLENFFNSLTPSMFLSALNYQEIELVNKEVDPLIELLFWNRTKKKRPNLILSVGAPSSPFLSNFIMYEFDKIVMNHCMKLNINYSRYADDLTFSTSEKGVLCMIPKFIEKVLCDLHDGKIKLNYSKSVFSSKAHNRHVTGITLSNNNKLSLGRDRKRYIRALLHKFSTESLQYEDDINHLKGLIGFAKMVEPSFFEKMKTRYGSKVFVDLFRYGGEH

SEQ ID NO: 4092 - protein, 315 aa, Vibrio brasiliensis
  source 1..315: note = Related to JAKEVQ010000003.1
MQVSILSRIPPEAFPNGLSQYLGEKPSSHYKVYKIPKRTFGFRVIAQPTPELKDIQRAITTQIKPFVQIHSSAKAYVEGVSIKDNAIVHVQSNYLLKLDLENFFNSLTPTMFLDALNYQNIRLVDGEVESLMELLFWNRTKKKTPNLILSVGAPSSPFLSNLIMYEFDTIVSSHSAKLNVNYSRYADDLTFSTSEKDVLFSFPQFIENVLNDLYDGRIKLNHSKSVFSSKAHNRHVTGITLSNNNKISLGRDKKRYIRSLLYKFSVQALQDEEDIKHLKGLIGFAKTVEPSFLERMKARYGISIFKDLFRYDGDD

SEQ ID NO: 4093 - protein, 315 aa, Vibrio sp.
  source 1..315: note = Related to PIZL01000016.1
MKLPILSRIPPDIFPKGFNDYLASNPSAHYKVYKIPKRTFGFRVIAQPTPELKNIQRSIINRIKPLVRIHNSAKAYVDNVGIKENASVHIKSNYLLKLDLENFFNSLTPPMLLNAIDYQNIELVDEEIYPLVELLFWNRTKKKTPNLVLSVGAPSSPFLSNLIMYEFDRIVTEYCGLNDVNYSRYADDLTFSTLNKGVLFNIPSFIEECLHELFKGKIKLNRSKTTFTSKAHNRHVTGITLANNNKISLGRERKRYIRALLHKFSTNSIKDKEDIEHLKGLIGFAKYIEPSFFDKMKVKYGEKLIFKLLKYDGIS

SEQ ID NO: 4094 - protein, 315 aa, Alteromonas sp.
  source 1..315: note = Related to JAEFCD010000023.1
MQLSILSCFTPEDFETDLNQYLAEKPSHHYKVYKIPKRTIGFRVIAQPTPKLKSIQRKIVEKMMSYLVVHSAAKAYVKSCSIKDNALVHANSNFLLKLDLENFFNSLTPDMLKRAVQYQGFSIVEKEANALNELLFWNKSKKKKANLYLSVGAPSSPFLSNVIMFEFDEAVTKLCKQLGISYSRYADDLTFSTSVKNVLFEVPKIIEEILLQMFGGKLKLNYSKTRFSSKAHNRHVTGITLTNNNKLSLGRERKRYIRSLLHKFSNSLLSEDDINSLKGLISFAMNVEPAFIAKMKAHYGTALFDELNRYNCGNN

SEQ ID NO: 4095 - protein, 315 aa, Vibrio sp.
  source 1..315: note = Related to VTYC01000009.1
MQLSILSRISQEDFNSSLNQYLAESPSTHYKVYKIPKRSFGFRVIAQPTPQLKNIQRKIVGEIKGYMHVHSAAKAYVKDCSIKDNAIVHVNSNYLLKLDLENFFNSLTPAMLARALKYQGLSLLESEVAALNELLFWNRTKKKSPNLVLSVGAPSSPFLSNVIMYEFDEAVSKFCSESGLSYSRYADDLTFSTSIKDILFEVPKFIESILFQLFQGKLKLNYSKTTFSSKAHNRHVTGVTLTNNNKLSLGRERKRYIRAMLHKFSCEELCDYDVQALKGLISFALNIEPTFVDKMKGRYGAKLFDDLFKYNNGDN

SEQ ID NO: 4096 - protein, 317 aa, Photobacterium carnosum
  source 1..317: note = Related to WMDD01000002.1
MKLSILSRISQEAFCSNLTQYLAKNPSKHYKTYKIPKRRFGFRIIAQPTPQLKLIQRKIVEMLKVHLKVHPAAKAYVKNCSIKDNAEVHVNSNYLLKLDLENFFNSLTPDMLAKSLFYQGVMFSENEVAGLNELLFWNRTKKKTPNLVLSVGAPSSPFLSNIIMYEFDDIVSARCSELQVSYSRYADDLTFSTLEKGILFDISELIESVLFELYQGRVKLNYSKTTFSSKAHNRHVTGITLTNNNKLSLGRERKRYIRALLHKFSNEALSDYDIQVLKGLIGFSRSIEPMFIEKMKIRYGIELFAKLYKQTNSNGDT

SEQ ID NO: 4097 - protein, 314 aa, Shewanella algae
  source 1..314: note = Related to JADZHL010000041.1
MKLNIEKVLAEKNPNLNIGELLASIPSKHYKVYKIPKRTIGFRLIAQPTPKIKNIQRSIIAELAPLLKIHKSATAYIQGKSILDNARVHRASNYLLKLDLENFFNSITPDIFINSLKNQGIELSAKNSNLLIQLLFWNRSRKRNGNLVLSVGAPSSPFISNIIMYDFDKKLYQYCKSIGASYTRYADDLTFSAKEKSVLQRIPNEVKRLLFKEFSNEIRLNNSKTVFSSKAHNRHVTGITLSNNNKLSLGRDRKRYISALVHKFTLSLLDEDDILHLKGLIGLAKFIEPEFIERLESKYGNSFILNLNRYLIKD

SEQ ID NO: 4098 - protein, 318 aa, unidentified
  source 1..318: note = Related to PAZB01000040.1; note = Idiomarinaceae bacterium
MSLDLHSYLSQFDSDLDAFLLTRPSKHYKAYKIPKRKVGFRVIAQPTPKVKMLQRKLVKQLSTILDVHDAAYGYRVGRGIKQNAEKHVDSEYLLKMDISNFFNSLSPNVFFDAIHSQNIRLSKQDREILREICFWNRTKRSTGKLVLSVGAPSSPFITNVIMFSFDEKVSKYCEKIGVTYTRYADDLTFSSKEKNLLQKVREQIVRDLESLYSGVLVINEAKTIFSSKGNNRHVTGIVLTNNNRLSIGRRRKRYLSALVHKFKCNELDALDSRMLQGWLSQARHIEPSFYERLEVKYGKEILKQISSFNIEVEDEPGT

SEQ ID NO: 4099 - protein, 317 aa, Serratia fonticola
  source 1..317: note = Related to NZ_CP054160.2
MKIEIPYQDIGISRIKLASTARRSPLKYKVYKIPKRRSGVRVIAQPTPEVKDLQRKLVDFLRTQLTVHSCATAYEPGKGIRENAQQHVNNPYLLKMDFSNFFNSITPEIFKNALLHDSVEIDDNTLMLLINIFFWCPGKKLSGKLVLSVGAPSSPFISNYVMKKFDQLLSVLCEQAGITYTRYADDMTFSTQRENVLFTLKEQIATLIVQSGYENITINESKTVFSSKAHNRHVTGVTLTNDNQLSVGRKNKRYASSLIFRFKLGELSTDETLMLKGLLAHYFHIEPEFKLSMQKKYGVEIISDIVNYQELINESDS

SEQ ID NO: 4100 - protein, 317 aa, Serratia ureilytica
  source 1..317: note = Related to JADTXI010000006.1
MKIDIPYKDIGINEKKLFLTAHRIPLKYKVYKIPKRHSGVRIIAQPTPEVKEIQRKLVGFLRTRLRIHNCATAYEAGKGIKENALKHVKNQYLLKMDLANFFNSITPDIFQNALAHDSVELDETTWTTLVNVFFWAPGKKLTGKLVLSVGAPSSPFISNYIMKRFDEQVSDLCEKSGVTYTRYADDITFSTNQQNILFSLKENIGSLLQANGYKSININESKTVFSSKAHNRHVTGVTLTNDGKLSVGRDKKRYASSLIFRFRLAELCHDDILFLKGLLAHYFHIEPSFRFSMEKKYGKNIIHALMKYQGDVHEPDN

SEQ ID NO: 4101 - protein, 312 aa, Serratia marcescens
  source 1..312: note = Related to CP059036.1
MQLERKLCESFNLTPLQLSVLSSKAPKKYRVYYIPKRTSGLRAIAQPTKELKNIQRFLASELDAYCPIHPAAMAYRNGKSIKDNAECHKNNPYLLKMDFQNFFNKIKPDIFFEKLNALDVKYDGKDKKHLRNFLFWKPGQKRSITHILSIGAPSSPFVSNFVMFDFDFEISKWCAEFDIVYTRYADDITFSTARKNILFSVPKIVKNILSKHASGITINEAKTIFTSKAHNRHVTGVTITNDGKLSIGRKKKKYLFSLVFKYSIGELTRDEIFYAKGLMSHCMHIEKNIISRMKNKYGADVINKFLKEGGDE

SEQ ID NO: 4102 - protein, 327 aa, Pectobacterium brasiliense
  source 1..327: note = Related to NZ_JACHAQ010000007.1
MLAAISAASISEMNIMQLERKLCEKFELTPLRLSILSSKAPKKYRVYYIPKRNSGLRAIAQPTKELKDIQRFLISELEPYLPVHPSAMAYRKGVSIRDNAECHKNNPYLLKMDFQNFFNKIKPNVFFDKLNDFGFEYDYKDKIYLHNFLFWKPGQKRSITYVLSVGAPSSPFISNFVMFEFDMAVSKWCAEFNIIYTRYADDVTFSTSRRNILFSVPKMVKNMLAQYASGITINEAKTVFTSKAHNRHVTGVTITNDGKLSIGRKRKKHLFSLLFKYSMGELTKDEILYAKGLMSHCMHIEKNIIARLKMKYGSELINDFFKDGGDE

SEQ ID NO: 4103 - protein, 327 aa, Klebsiella aerogenes
  source 1..327: note = Related to NZ_LR607333.1
MLAAIVAASIFEIDIMQLAKKLCEKFSLTPLKLSMLSTKAPKKYRVYYIPKRTSGFRAIAQPTKELKEIQRFLVSELEPILPIHSSAMAYRCGISIKNNAEKHKNNSFILKMDFQNFFNKIKPGIFFEKFNNLDIQCNSHDRYLLHNFLFWKPGQKRSVTHILSVGAPSSPFISNFVMFDFDSAISEWCAKFDIVYTRYADDITFSTSRKGILFSVPKIVKNMLAEYASGITLNEAKTIFTSKAHNRHVTGVTITTDGKLSIGRKKKKYLYSLVFKYTKGELTNEEILYAKGLMAYCIHIERNIITRLKKKYGSEVINQFLKETGDE

SEQ ID NO: 4104 - protein, 311 aa, Pantoea sp.
  source 1..311: note = Related to LGYX01000010.1
MQIEKLLCEKHKVTTLQLSVIAAKAPKRYRVYYIPKRTTGFRVIAQPTKKIKEIQRTLVAYLKDFLPVHSSATAYQNNISIKDNANRHKRNDYLLKMDFQNFFNKVKPELFFAKLNKLDFNITRKDESLLRDFLFWKPGQKRSKTHILSVGAPSSPFISNFVMYEFDKAMHEFCVSMGVVYTRYADDITFSTSSKGMLFVIPRIVKALLAEHASGLTVNESKTVFSSKAHNRHITGVTITNEGKLSIGRKKKRHLSSLIFRYSLNELTEEEVLNAKGLLSYCIHIEPDFILRMKVKYGHDLINKFLAEGAR

SEQ ID NO: 4105 - protein, 314 aa, Pectobacterium polaris
  source 1..314: note = Related to JACHAS010000001.1
MTVQIEKILCDHLDYPTYELTSIAIRAPKKYRVYYIPKRNGGLRVISQPTKQLKKIQRVLVAHLTNLLPVHSSAMAYRRGISIKHNAILHKENTFLLKMDFQNFFNKIKPDFFFSRLNSIDINLVANDAFLLKNFLFWKPGQKRSVTYILSVGAPSSPFISNFVMYEFDEAINEWCKNHGITYSRYADDITFSTNKKDLLFSVPKIVKSFLAKHTQGMTINEAKTVYSSKAHNRHVTGVTITSEGKLSVGRKRKKHLSSLLHKYSLNLLNPEEILRAKGLMSHCINIEKDFLLRMKKKYGKDIVDNFMREGNYD

SEQ ID NO: 4106 - protein, 310 aa, Leclercia sp.
  source 1..310: note = Related to PQJY01000001.1
MQLTSKIIKKFNYERLAFEQLLNEAPKKYKVYYIPKRGAGFRVIAQPTKELKNVQRFIVSLLEPILPVHHKAMAYQLNKSIKDNAYLHKDNSYVLKMDFQNFFNKIKPDLFLTKIEASNLELESLDKFVLRNLLFWRPGTKRSITLILSIGAPSSPFISNFIMYDFDRNVDDWCLNHGVVYSRYADDITFSTNTKDLLVSVPKMVKKMLSEYVPGLTVNESKTIFTSKAHNRHVTGVTLTPEGKLSVGRERKRMLYAKMHQYYLGMLSTEDINKVRGLVTFANYIEGDFIFRLKKKYGNELIDRFLKEGC

SEQ ID NO: 4107 - protein, 311 aa, Escherichia coli
  source 1..311: note = Related to CP026641.1
MQLTSKIISKFNYNRLAFQLLLNEAPKKYKVYYIPKRGAGFRVIAQPTKELKNVQRFIVSLLQPKLPVHHKAMAYEYKKSIKDNALLHKDNNYILKMDFQNFFNKIKPDIFFSKLENTGLKLDSFDENTLRNLLFWRPGKKRSTTLILSVGAPSSPFISNFVMYDFDKSLDDWCRNNGITYSRYADDITFSTNIKDILCRVPKVVKKMLSLHVPGLSINESKTIFTSMAHNRHVTGVTLTPQGNLSIGRDRKRMLFAKIHKYSLGLLSSEEINKTKGMIAFANYLEGDFLLRLQKKYGCELITKFLMEGNK

SEQ ID NO: 4108 - protein, 311 aa, Enterobacter mori
  source 1..311: note = Related to JAHEUL010000001.1
MQLTSKIISKFNYSNLAFHLLLADAPKKYKVYYIPKRGSGFRMIAQPTKELKHVQRFLVSLLEPNLPVHYKAMAYQKNKSIKDNALLHKGNNYILKMDFQNFFNKIKPELFFSKLQNANITLESGDRAVLRNLLFWRPGTKRSMTLILSIGAPSSPFISNFVMYDFDRKIDDWCESNNIVYSRYADDITFSTNSKDLLSSVPKVVKKMLATNVPGLSINESKTIFTSMAHNRHVTGVTLTSDGKLSIGRDRKRMLYAKIHKYSLGLLSSEEINKVRGLISFADYLEEDFLLRLRKKYGHDLIDKFMKEGGL

SEQ ID NO: 4109 - protein, 309 aa, Serratia marcescens
  source 1..309: note = Related to LFJS01000012.1
MTIRKELSKKLELPELQIVLFCINASKKYRVYSIPKRKVGRRIIAQPTKELKKYQRVLVEILQPYLKVHECAYAYKTDISIKDNAEQHRRNTYILKMDFQNFFNKIKPELFFSKVDSVSIKLSREDRSLLMDILFWKPGSKRSTALVLSVGAPSSPFISNFIMFDFDKAIFEYCKNIGVTYTRYADDLTFSTNKKDVLFGVPVVVKAALSALAPGMIINDSKTVFSSKAHNRHVTGVTISNEGELSLGRSKKRYISSLIHKYSLGTLPDSEIDYLRGLLSYAQHIEPMFLTRLKNKYGEKLINHIRSGA

SEQ ID NO: 4110 - protein, 312 aa, Pantoea agglomerans
  source 1..312: note = Related to JACYNT010000005.1
MSISILLAKKLNITEHQLHSFCLNAPKKYKVYTIPKRSMGKRIIAQPTKTLKRVQREALGILLPFLEVHFSSYAYKKGLGIKDNAMLHKDNSYLLKMDFQNFFNKIKPDVFMAKLRNKIPDISYSDEELLKNVFFWKPGLKKSKTLILSIGAPSSPHISNFVMFEFDSEIESLCRGLGVVYTRYADDLTFSTNKKDVLFQLPKIIRGLLSTCMPSLTINDSKTVFSSKAHNRHVTGVTITNDGMLSLGRKKKRYLSSLIFKYSLNQINYEDFSHLRGMLGHAKYIEPAFVFRMKAKYGAELVDKIILGESYE

SEQ ID NO: 4111 - protein, 311 aa, Yersinia enterocolitica
  source 1..311: note = Related to UHIX01000001.1
MSIYNQLCEKMKVDPADLDFFSHNAPKKYKVYSIPKRTVGHRLIAQPTSELKEYQRALVSILEKSLPIHESAYAYRKNIGIKQNALKHVANSYLLKMDFQNFFNKIKPEIFFSKLLKANIEISDDDRKILKNLLFWKPGLRRSVTLVLSVGAPSSPLITNFVMYYFDEHMTNWCKKNKISYTRYADDITFSTNTKSILFSVPSIVRTILKQEIPGMSINESKTIFSSKAHNRHVTGVTLTTDNKISLGRKKKKEISALLHRFTLKILPPEDISFLIGLLSHAKNIEPIFLSRMKSKYGEDTFYNLRGDYHV

SEQ ID NO: 4112 - protein, 311 aa, Escherichia coli
  source 1..311: note = Related to CP057778.1
MEILSAVSKELGVNVNELRRLSSVAPKKYKVYTIPKRQSGFRLIAQPTSEIKRIQREVVKILASKLIVHDAAKAYKVSIGIKDNAKIHMANSYLLKMDFQNFFNKIKPALLFDKLRSQGVVLSGEDKEFLEGILFWKPGKKRSITLVLSVGAPSSPFVSNFVMYDFDNYINNWCSVRNISYSRYADDITFSTDEKNILFEVPKVVRFALSLCAKGISLNESKTVFTSKAHNRHVTGVTLTVDGELSLGRQKKRMISSLLHKYTLGLLAKEDVISLKGFVGHALYIEPKFIARMKIKYGKEVIHALFSEEGM

SEQ ID NO: 4113 - protein, 315 aa, Vibrio cholerae
  source 1..315: note = Related to CP003330.1
MNILTTLREQLLTNNVIMPQEFERLEVRGSHAYKVYSIPKRKAGRRTIAHPSSKLKICQRHLNAILNPLLKVHDSSYAYVKGRSIKDNALVHSHSAYVLKMDFQNFFNSITPTILRQCLIQNDILLSVNELEKLEQLIFWNPSKKRNGKLILSVGSPISPLISNAIMYPFDKIINDICTKHGINYTRYADDITFSTNIKNTLNKLPEIVEQLIIQTYAGRIIINKRKTVFSSKKHNRHVTGITLTNDSKISIGRSRKRYISSLVFKYINKNLDIDEINHMKGMLAFAYNIEPIYIHRLSHKYKVNIVEKILRGSN

SEQ ID NO: 4114 - protein, 315 aa, Vibrio fluvialis
  source 1..315: note = Related to JAHUGH010000003.1
MNILTTLREQLLANNLLMPQEFEKLEAKGSHAYKVYSIPKRKAGRRTIAHPSKKLKICQRQLSHILSPLLNIHDSSYAYIKGRSIKDNALVHSHCDYLLKMDFHNFFNSITPSILRKCLVQNEILITEYDINKIEQLIFWNPSKKRYGKLILSVGSPISPLISNAIMYPFDKVISETCTKNGIRYTRYADDITFSTNRDNVLHNIPELVEHVLNKIYFGQIIINKRKTFFSSKKHNRHVTGITLTNDNKVSIGRSRKRYISSLVFRYINKNLDIDDINHMKGMLAFAYNIEPMFIHRLSHKYKVNIVEKILRGHD

SEQ ID NO: 4115 - protein, 315 aa, Vibrio parahaemolyticus
  source 1..315: note = Related to JACBSQ010000003.1
MKIVPILQQQLTKRKTVSDADFRKLLALGSHAYKVYTIPKRKAGHRLIAHPSKSLKECQRQLTSILELYLPVSDSSYAYMKGRSIKDNALVHVHSSYILKMDFQDFFNSITPEIFRQHLERNDIIISETEFKILEQLIFWNPSKRKYGKLILSVGSPISPFISNTIMYYFDEYINNLCSQLNINYSRYADDLTFSTNQKDILFSLPQFVSDILHKEFSGRIVINHRKTVFSSKGHNRHVTGVTITNQNKLSIGRKRKRYISSLVFNCINNNLSNEEIMHLKGLLAYCYNIEPMFIHRLSRKYKFNIIKNLVKKDD

SEQ ID NO: 4116 - protein, 329 aa, Vibrio alginolyticus
  source 1..329: note = Related to AAXMKO010000002.1
MCLGCFYVGGKLKILPLLEQSLANNEVVSNSDFRKLQMLGSHAYKVYTIPKRKAGKRVIAHPSVKLKKCQSNLVSILELYLPVHDSSYAYVKGRSIKDNALVHAKSDYLLKMDFYDFFNSITPPLLSEHLDKVGLTVDLYELAKLNQLLFWNPSKKKHGKLILSVGAPSSPFISNTMMYFFDEKISKLCAKNNINYSRYADDLTFSSNKKGILFLLPDVVKKILKQEFKDKIVINDSKTIFSSKKHNRHVTGLTINNNGSISLGRKRKKYISSLVFEYLNNRLDEGEFYHLIGLLAFSYNVEPMFLHRLSRKYKVNVIDSILKKGRLNE

SEQ ID NO: 4117 - protein, 317 aa, Vibrio cyclitrophicus
  source 1..317: note = Related to MCWW01000053.1
MKILSILELRLSEREKISYADFLKLQNLGSHAYRVYSIPKRKAGNRTIAHPSSKLKECQRQLVSILEMYLPVHESAYAYMKGRSIKDNALVHSKSAYLLKMDFQDFFNSITPETLERHMRKLGLTLPINEQKALEQLVFWNPSKRKYGKLILSVGSPISPFISNSVMFFFDQKMFDICTKHNINYSRYADDLTFSTNSKGLLFSIPELVKQAIKQEFNGELVINDSKTIFSSKAHNRHVTGITINNNGQISLGRQRKRYVSSLVYQYTKNELSEEEIDRLKGLLSFCHNVEPYFLSRLTRKYKLNIVDELLRKGTKK

SEQ ID NO: 4118 - protein, 314 aa, Aggregatibacter actinomycetemcomitans
  source 1..314: note = Related to JACAWH010000114.1
MESKLFHTLCTNLNLSTSELMEFISNAPISYKVYSIPKKNGGRRTIAHPSKKLKKIQRELLVLLEKTLQIHQSAFAYIKGKNIINNAELHKNNKYLLKLDFYDFFNSISDVIFINYLDKIGLSLSELDSKLVSHIFFWNPNNKDKTHKKLILSVGSPSSPMISNAIMYFFDSEIKIHCDSMSIVYTRYADDLSISGNDKDKLKEITQFIRSRLYDLFNGKIILNDLKTILVSPGYNKFITGITLTPQGGLSIGRKRKKYIFGLIYKYIKNELKDDSISHIKGMLSFSYSIEPSFIRRLELKYGKDTIRRIINEK

SEQ ID NO: 4119 - protein, 314 aa, Haemophilus parainfluenzae
  source 1..314: note = Related to NZ_QEPT01000001.1
MESKFFHTLCKKLNLSTSELMEFISNAPVSYKIYSIPKKNGGRRVIAHPAKKLKKIQRELLLLLEKDLKIHQSAFAYIKGKNIIQNAEPHKNNKYLLKLDFYDFFNSISDDIFINYLDKIGLVLNELDKELVKHIFFWNPNSKDKRHKKLILSVGSPSSPMISNAIMYFFDSEIKTYCDSISIVYTRYADDLSISGNDKDNLKDVIMFIRSKLYDLFNGRIILNDLKTTLISPGYNKFVTGITLTTQGGLSIGRKRKRYIFSLVYKYIKNELKEDAVLHMKGMISFSHLVEPSFIIRLESKYGKNIINRIINGK

SEQ ID NO: 4120 - protein, 318 aa, Haemophilus parahaemolyticus
  source 1..318: note = Related to CP069510.1
MKSKRKFELFYKLHEGERFSSKLNELIALTPTAPISYKVYSIPKKKGGRRTIAHPTKKLKEIQKKLLELLQLQIHKSAYAYRKGRNIAQNAETHKENKFLLKLDFHDFFNSINNIIFTRHLDKIGIHYNEDDKWLINHIFFWNPNKKDNSHKKLILSVGAPSSPTISNAVMYFFDKEIEEYCESKSMKYSRYADDISISGNNKNELKTIIPVIREKLNELFNGRIILNELKTVIISPGYNKFITGITLTSQGSISIGRKRKRYIFSLVYKYKINELSKDLIPHLKGLLLFSKNIEPSFIVRLELKYGKEIIRRILDEK

SEQ ID NO: 4121 - protein, 345 aa, Serratia marcescens
  source 1..345: note = Related to NZ_CP060440.1
MQSPAFVPCPGAAPFASFSKESYAQGLPWALQLEAMMLFSDRICDELGYSKRQLNSFLKNAPRKYRVYSIPKRTVGYRTIAHPSKKLKEIQRVCDALLQDILPVHHCAYAYKKGCSIKKNAMLHVSQSYLLKMDFSNFFNSITPDMFWSKVDGFKIGINKKERGKLTKAMFWQPNRHDSDKLKLSIGAPTSPLISNFVAYEFDCFLSEWCISQGIIYSRYADDLTFSTFNAGILFSVPRVVKAFLNKYFDGITINEAKTKFSSKKHNRHVTGITLTDDGRISLGRGEKRRIFHFVHVFSLGELDPDLLPKLRGKIVFYEHIQPGFIKRLSDKYTEELISSLLNGD

SEQ ID NO: 4122 - protein, 312 aa, Aeromonas veronii
  source 1..312: note = Related to JAEHHT010000028.1
MLLIEKIIKESKLSRPELTILSHKAPYMYKVYAIPKRRSGYRIIAHPAKPLKLIQRLILQLLEPSVKIHDNVHAYVKGRSIITNATVHKKNKYLLKMDINNFFNSIKPELFWSSLNKQDIMLPKIHQKTIERLIFWNPSKKKDGKLILSVGAPTSPFISNIVMFSFDSKLSSVCDKLGISYSRYADDLTFSTKKKNILFNLPHIVKILLQEEFSGAMTINEQKTVFSSKAHNRHVTGITITNDKQLSIGRARKKYIYHLIHQATLGNLDDERMNHLLGLISFCRSIDANFLDKIANKYGSSFVKDLIKRELK

SEQ ID NO: 4123 - protein, 316 aa, Vibrio parahaemolyticus
  source 1..316: note = Related to NNJO01000006.1
MLQRLYSKLQKKLEIPRYKIESFSSSAPNRYKVYTIPKRTSGRRVIAHPSRELKKYQRALVSILTPLLSVHKCSFAYKKGVSIKENALEHAKNSYLLKMDFNDFFNSIDPELFFLMNKSNGVEFSDSEKKLIQNLVFWNKTKSYEQKLVLSVGAPSSPFISNFVMFKFDELIEKFSKKNNITYTRYADDITFSTNKRNALFLIPEEVNNILREHYGYRITVNSTKTVFSSKAHNRHITGITINNEGQLSIGRDRKRMISSLIHKYSIKVLDISDFQYLQGLLSFASHVEPRFLDSMTRKYGHETITNIVKGDFYDS

SEQ ID NO: 4124 - protein, 314 aa, Vibrio splendidus
  source 1..314: note = Related to PIFK01000090.1
MMFKLYFKLSKKLELSRSRIESFSKNAPNMYKVYTIPKRTSGRRVIAHPSRELKVYQRALVEILASSFEPHHCSFAYRKQLSIKENALVHSRNSYLLKMDFSEFFNSIEPDMLFSAAKVRNIGLSDAEKRLVENLVFWNKTKSHNTKLVLSVGAPSSPLISNFIMFEFDRLMYEFSKNNSIVYTRYADDITFSTNRKNTLFDVPNEVNRVLSKFYDYRISINSTKTVFSSKAHNRHITGVTITNDGKLSIGRSRKRMISSLIHQFTLKKIDSCDFSYLQGLLSFASHIEPSFIFSMKSKYGDEIITQIIKGDFS

SEQ ID NO: 4125 - protein, 328 aa, Salinivibrio costicola
  source 1..328: note = Related to NZ_LT897828.1
MLQLSAAPFSLSRAMFKLYFKLAQKLDVSRRRIDTLASGAPNKYKVYTIPKRTSGLRVIAHPSREVKVYQRALIKILQDVLRVHHCSYAYKKKLSIKDNALRHASNRYLLKMDFNDFFNSITPEVFEDALNHVEVDFSEAETKLIKHLVFWNKNKSFPPHLVLSVGAPTSPLISNFIMYEFDKAMYDFCEENLITYTRYADDITFSTNVKDILFKVPNKVNKILEEKFNGAISINQSKTIFSSKAHNRHITGITITNQGSLSIGRSRKRMISSLIHKFMIGEIDYSDFKYLQGLLSFSSHIEPSFISSMRKKYGEGIIGQVIKGDFNE

SEQ ID NO: 4126 - protein, 320 aa, Proteus vulgaris
  source 1..320: note = Related to NZ_NBUT01000010.1
MLKIFLKLQNELASSKNDGVLPTRARIESFARRATNCYKVYSIPKRTSGVRVIAHPSKELKNYQRALISILEQQLEPHSASYAYQKGKSIKLNAQKHTKKKFLLKMDFNDFFNSITPQIFLTELRYRRIFLSKAEEKLLINLFFWNKTKSEDKKLVLSVGAPSSPMLSNFIMYRFDELVSKYAKENSIVYTRYADDLTFSTNIKNVLFSVPEYIKGILRDLYQHYITINDSKTIFTSMAHNRHVTGITITNNFELSIGRERKRLISAMIHKFKIGVLNEDDLCYLQGLLSFAINIEPNFINRLSRKYGKEIVHVIRKGGL

SEQ ID NO: 4127 - protein, 318 aa, Pseudoalteromonas arctica
  source 1..318: note = Related to NZ_CP011025.1
MAQKLFSKLIDILPLVSASRSKIERFSLTAPNRYKVYSIPKRTSGRRIIAHPSKELKIYQRALLSSLEYLLDSHDSAYAYKKDRNIKANAKRHVRKKYLLKMDFNDFFNSITPDMLFTQFVKEEVIFSEAEKRLLKNLLFWNKTKSFDGKMVLSVGAPSSPSVSNFIMKEFDEFVYRYSKEKSIIYTRYADDLTFSTNKKDTLFDMPNFIKKVLGEVFEHKLTINESKTIYTSMAHNRHVTGVTLTNKSTLSIGREKKRLISLLVHKYKINEIDESDFNYLHGLLSFSHHIEPSFTKRLSKKYGSDILKNIIKGIYCE

SEQ ID NO: 4128 - protein, 310 aa, Shewanella putrefaciens
  source 1..310: note = Related to NZ_CP080635.1
MRIKLFSNLQTKLNCSRKKIETFSEKAPYKYKVYTIPKRSSGLRVIAHPSKELKVYQRALLSVLGDHLISHKSSFAYKLNTGIKDNAYQHMHNSYLLKLDFSNFFNSIVPDMLLAALNFRGIEVSDAELRLLSNLLFWNKTKTSDNKLVLSVGAPSSPAISNFIMFRFDKVVFKYCKEKSIIYTRYADDLTFSTNIKDALFELPRYINGLLGSMFDHRIMLNERKTVFSSKAHNRHVTGITITNENNLSVGRARKRTVSSLVHKYSLNKLDQFEFEQLRGMLSFILHIEPHFLHRLEKKYGRSLLIKIRS

SEQ ID NO: 4129 - protein, 327 aa, Photobacterium frigidiphilum
  source 1..327: note = Related to NZ_PYMJ01000011.1
MLLISLQEFSLTIRLYKAFEDELGVTRSRLMNFAKTAPKRYKVYTIPKRTSGYRVIAHPSKSLKKIQKFLAGFLADIFITHPNSFAYKKGVSIKDNASVHLGTKYLLKMDFSNFFNSITFDLLVSSCKECEVKISLAELRLLEGLLFWNKTKTINGDLVLSVGAPTSPLVSNFVMYKFDIFISDYCKINNINYSRYADDITFSTNDKNKLFGVTRVVKDILSEHYSNKITVNNVKTTFSSKAHNRHITGVTLTNDNKLSVGRERKRLISTLIHKYVINDIEKQDVTYLQGMLSFAIHVEPDFRGKMSKKYGSNVVTEILKLRVENDE

SEQ ID NO: 4130 - protein, 319 aa, Vibrio splendidus
  source 1..319: note = Related to MCYX01000113.1
MTIRLYRAFEEDFGITRARLTTFAKTAPKKYKVYTIPKRSSGYRVIAHPSKSLKEKQKFLVAFLSDFFVSHSNSFAYKKGVGIKDNARMHLGTKYLLKMDFSDFFNSITVDLLALACDENGIKVSSAELKLLESLLFWNKTKTIRGSQNLVLSVGAPTSPLVSNFVMYKFDTLMSDYCSQNEINYSRYADDITFSTNKKNHLFQVTRVVKDILSDHYSNKITVNNIKTVFSSKAHNRHVTGITITNNNKLSVGRERKRLISTLIHKYTIGSIDIDDTVYLQGLLSFAIHVEPDFRVKMSNKYGFEVINTILKLRVENDK

SEQ ID NO: 4131 - protein, 316 aa, Shewanella benthica
  source 1..316: note = Related to ABIC01000002.1
MKLKLYRALYESLSITRSSLNRFAESAPKKYRVYTIPKRTSGQRVIAHPSKQLKAVQKELVKILVFPLKSHETAYAYKKGLSIKDNAEQHLNTAYLLKMDFSDFFNSITPAVLFLICENNNIKWSDAEKRLLKNLLFWNKTKSFNGKLVLSVGAPSSPLISNFVMYDFDVKISDFCKKNKINYTRYADDITFSTNVKEILFEVPKLVKTLLNEIYNNLITINDLKTIFSSKRHNRHVTGVTISSENKLSIGRSRKRMISSLIHKFKINVISQEDTCYLQGLLAFSISVEPIFIERMKNKYTESVIHNILKIRVENE

SEQ ID NO: 4132 - protein, 313 aa, Photorhabdus khanii
  source 1..313: note = Related to NZ_WHZZ01000005.1
MQLHLYKNITEMLSWSRSQITSFARNAPNKYKVYTIPKRSSGQRLIAHPSRKLKLLQRALVEILSNNLIPHECAFAYRNSISIKENAQYHLDNQYLLKMDFSDFFNSITPDILFSVCEIKEITLSEAEKWLLQRAFFWNKTKSHDGKLVLSVGAPSSPLISNFIMYPFDEAINLYCTQHSIYYTRYADDLTFSTKIKNTLFNIPDIVKWALKKHYASQISINEFKTVFSSKAHNRHITGITITNDNKLSVGRERKRMISSLIHKYKIGIVNEEEKTYLQGLLSFSFHIEPMFKIRMSKKYSPEIINEILKFRK

SEQ ID NO: 4133 - protein, 313 aa, Yersinia frederiksenii
  source 1..313: note = Related to NHOK01000005.1
MQLHLYRSIIDKLSWSRSRITSFARNAPNKYKVYTIPKRSSGQRLIAHPSKNLKLIQKKWIEILSDIFVSHQSAFAYKDNMGIRENAQHHMKNQYLLKMDFTDFFNSITPEIFFSICLKKEIIMSNAEKWLLQQTLFWNKTKSYDGKLVLSVGAPSSPLVSNFVMFPFDEIISEYCNSHHIKYSRYADDLTFSTDEKNCLFTIPNLVKSALQKIYAYQISINEFKTIFSSKAHNRHITGITITNDNDLSIGRGRKRMISSLIHRYRIGVMDDIEKAHLQGFLAFSFYIEPLFKTRMIKKYSSEVITDILKFRK

SEQ ID NO: 4134 - protein, 380 aa, Photobacterium carnosum
  source 1..380: note = Related to NZ_WMDE01000055.1
MSSRALRQTQIYWGTIPVAVKNFPRAGVRTSHPDRGKFSTASFSKGESPVLSFQYRHFYLRICTDMHQKLYSKLVDKLDSTRSTINSFSKNAPNKYKVYTIPKRTSGHRVIAHPSKELKKYQRALVSILSDILNIHPTSYAYRTGFSIKDNAYKHRKNQYLLKMDFSDFFNSIEPKLLFFVFDECEIHFSSSELRLLEKLLFWNKNKSVDAKLALSVGAPSSPLISNFIMCIFDEKINYFCEKNGITYTRYADDLTFSSNKKNILFNVPNIVKNLLKEEYKNLILVNDLKTCFSSKAHNRHITGVTINNDAELSIGRDRKRLISAMINNYKKGILLSEDFDYLRGILSFANNIEPDFISRMKRKYGKCILLKIKKGLPNE

SEQ ID NO: 4135 - protein, 315 aa, Vibrio sp.
  source 1..315: note = Related to JAKEUP010000008.1
MRQQLYSKLQIKLGRSRSSIKSFANNAPNKYKVYTIPKRTSGRRVIAHPSKLLKDYQRALTDILKPALTVHPAAFAYRTGFSIKDNAQMHKNHQYLLKMDFNDFFNSIDPELFEDILIRRGIRFSNAEMSLLTRLLFWNKTKSHDEKLVLSVGAPSSPLISNFVMSIFDAKMKLHCLKRQITYTRYADDLTFSTNKKDVLFNIPQLVKDTLTKDYSHKILINELKTIFASKAHNRHITGVTINNASELSIGRERKRLISALVHKYTVKQLDTDDIHYVQGLLSFAQNIEPHFVDRLSKKYGFDVLSKLIRDKGDE

SEQ ID NO: 4136 - protein, 314 aa, Vibrio parahaemolyticus
  source 1..314: note = Related to AAZQRX010000007.1
MHNKIFSKLQASTSRARSTIESFSRNAPNKYKVYSIPKRTSGSRTIAHPSKELKYYQRALAIILRPILTVHIRAYAYRTGLSIKDNAAIHAKNKYLLKMDFNDFFNSITPVMFFKICDKRKIKFSASEQRLLTRMLFWNKSRSANEKLVLSVGAPTSPLVSNFTMSLFDFLLHDECLSRGITYSRYADDITFSTNHKGILFDIPLYVKAVLAERYDYGITINESKTVFSSKAHNRHITGITINNEGKLSLGRERKRVISSLVHQFKLNKLAIEDFAYLQGLLAFAQHIEPAFIIRLKNKYGESTVSNINKGLNI

SEQ ID NO: 4137 - protein, 317 aa, Vibrio parahaemolyticus
  source 1..317: note = Related to CP066247.1
MHHKIYSKLQLKLKTSRSSIDNFALNSPNKYKVYTIPKRTAGFRVIAHPSRELKCYQRHLVEILTPHLKNHSSSIAYTKEKSIRENALIHVRNDYLLKMDFNDFFNSITPELFFHICRVQEVFFSQAEERLLTKLLFWSKSKSKDEHLVLSVGAPSSPLISNFTMYTFDELITSICHENGISYTRYADDITFSTNRKNILFSIPSLVKSILLNKYEYKITINDSKTVFSSKAHNRHVTGITLNNEGQLSLGRNRKRMLSSMIHKEKIGSLSLDDFTYMRGLISFAKHIEPAFIFRMRVKYGNETVDNIIKGVRNVTN

SEQ ID NO: 4138 - protein, 315 aa, Vibrio crassostreae
  source 1..315: note = Related to NZ_JAFNJW010000049.1
MYQKLYSKLQNELKRSRSSIESFSKTAPNRYKVYTIPKRTSGHRVIAHPSRELKLFQKALNTLLLDTLKTHFCSVAYAKGLSIKDNALRHAGNSYLLKLDFNDFFNSIEPDLFFVICDLQEINFSNAEKRLLTQLCFWNKTKSNNTKLVLSVGAPSSPMISNFVMTVFDELMYKHCRVQGITYTRYADDLTFSTNKKNILFDIPTFVEAVLVAYYASKISINPEKTCYSSKKHNRHVTGITISNTGELSLGRERKRMISAMLHNFKVGRLDSDDYAYLQGLLSFARHIEPKFVDKFRKKYGDGLIDTITKGNFNE

SEQ ID NO: 4139 - protein, 320 aa, Serratia marcescens
  source 1..320: note = Related to JABCPW010000001.1
MRLHLYAKLTEIQSRNRRQIDNFLYNAPNRYKVYSIPKRNGGERVIAQPSGELKDFQHNLINILESNFLIHSSAVAYKKGFGIKHNAAMHSGNPYLLKLDFTDFFNSITPELFFMACVWNRYDLSTAEKRVFTKGLFWNKAKSQSGRLSLSVGAPSSPLVSNIIMYLFDEEFSRRCEKRGIVYTRYADDLTFSTHHKNSLFSLPDEVRVFLNKNYHNRITLNERKTIFTSRAHNRHVTGVTLTTQGGLSVGRERKRFISSLIHKYTLGILEPDMAYYLQGLLSFAIYIEPEFRTRLSKKYSQETILELLKLRKEDGTENE

SEQ ID NO: 4140 - protein, 328 aa, Serratia marcescens
  source 1..328: note = Related to PEHA01000001.1
MRLNLYAKLTEIQSRNRRQIDSFLFNAPNRYKVYSIPKRNGGERIIAHPSSELKSFQHSLIDILESNFLIHKSAVAYKKGWGIKHNAALHSNNPYILKLDFTDFFNSITPDLLLMACAWNGYTLSIAEERVLTKSLFWNKAKSQSGRLSLSVGAPSSPLISNIVMYLFDETFSSLCEQREIIYSRYADDLTFSTQHKNILFSLPDEVRTFLNKNYHNRITLNERKTVFTSRAHNRHITGITLTTKGTLSVGRERKRFISSLIHKYKLGLLEPEMTYYLQGLLSFAIYIEPEFRTRMSKKYSQEIILEIIKLRKEDGTYKKLKIYQTHI

SEQ ID NO: 4141 - protein, 320 aa, Raoultella ornithinolytica
  source 1..320: note = Related to AP021969.1
MRLNLYAKLIEIQSRSRRAIDSFLYNAPNRYKVYSIPKRNGGERIIAHPSRELKTFQYDLIRILEPHFRIHTSAVAYKKGSGIKQNAAMHSHNPYILKMDFTDFFNSITPDLLFMACAWNECNLSAAEQRVLTKGLFWNKAKSQSGRLSLSVGAPSSPFISNIIMFLFDETFSRLCEQRGIVYSRYADDLTFSTHHKNILFTLPDEVRIFLNKNYHNRITLNERKTVFTSRAHNRHITGITLTTQGSLSVGRERKRFISSLIHKYTLGILEPEMTYYLQGLLSFAIHIEPEFKTRMINKYSTDAVMEIITLRKKDETYRT

SEQ ID NO: 4142 - protein, 321 aa, Klebsiella pneumoniae
  source 1..321: note = Related to CP019077.1
MRLNLYAKLVKIQPRNRRQIDSFLFNAPNRYKVYTIPKRNGGERIIAHPSRELKTFQYGLITILETHFRIHESAVAYKKGLGIKQNATLHSNNPYILKMDFSDFFNSITPDLLFMACEWNDYELSSAEKRVLTKGLFWNKAKNQSGRLSLSVGAPSSPLISNVIMYLFDDSFTNFCQQREITYSRYADDLTFSTHHKNALFDLPNEVRHFLNKEYQNRITLNERKTVFTSRAHNRHITGVTLTTQGSLSIGRERKRFISSLIHKYKLGLLDPDTSYYLQGLLSFAIYIEPDFRVRMSKKYSTNTVTEIIKLRKEDEAYRKQ

SEQ ID NO: 4143 - protein, 321 aa, Lonsdalea britannica
  source 1..321: note = Related to CP023009.1
MRLNLYAKLIEIQPRSRRQIDRFLANAPNKYKVYTIPKRDIGERIIAQPSRELKKFQHYIISILESLFEIHTSAIAYRKGTGIKQNANMHSANPYILKMDFSNFFNSITPDLFFLACKWNNYSLSAAEERLLTKALFWNKSKTQDGRLALSIGAPSSPLVSNIIMYLFDEEFNTLCKDNGIVYSRYADDLTFSTSHKNLLFSLPDKVRAFLFKHYNNRITLNERKTVFTSKAHNRHITGVTLTNEGTLSVGRERKRLISSLVHKYKLGLLEPDMVYYLQGLLSFASYIEPNFRFRLARKYSAETITKLIKLRKADGKFKKQ

SEQ ID NO: 4144 - protein, 320 aa, Proteus mirabilis
  source 1..320: note = Related to NZ_CP029133.1
MRLNLYTKLVKIQPRNRRQIDSFLYNAPNRYKVYSIPKRNGGERIIAHPSRELKNFQYNLIDILEPLLKIHPNALAYRKGLGIKKNASLHAQNSYILKLDFSDFFNSITPDLLFTACTKNEYELSSAEKRVLTKGLFWNKAKSQSARLSLSVGAPSSPLISNIIMYYFDETFTDICNQREIVYTRYADDLTFSTNKKNILFNLPDEIRFFLNKEYKNLITLNERKTVFTSRAHNRHITGITITTEGSLSVGRERKRLISSLIHRYTLDSLSPDMTYYLQGLLSFAIYIEPDFRDRMSKKYSSHIITKLIKLRKEDGTYCE

SEQ ID NO: 4145 - protein, 320 aa, Enterobacter asburiae
  source 1..320: note = Related to NZ_RXRP01000001.1
MHLNLYAKLDGVQSLTRKQIDSFLANAPDRYKVYSIPKRNGGERIIAHPAKRLKQFQYHIVDIMEEVCEIHPCAMAYSKGKSIKENALSHADNQYILKLDFSDFFNSITPEMLFKALTDNNLNVTKAEERALSKSLFWNKSKTVNSRLALSVGAPSSPLISNIVMYSFDAFFANFCKQHGMHFTRYADDLTFSTNIKGVLFRIPDMVRKYLNEYYKNNITLNERKTVFTSKAHNRRVTGITITPQGTLSLGRERKRLISVLIHKYTLGILESDTLSYLQGMLAFAFHIEPVFYESMKRKYSSETIYNLMPIRKKNVESTS

SEQ ID NO: 4146 - protein, 316 aa, Pectobacterium carotovorum
  source 1..316: note = Related to NZ_CP051652.1
MKLHLYAKLTKDLDKSRSAVERYIYNAPMKYKVYTIPKRTSGQRVIAHPARKLKVFQRALIKVIEPHFNLHIKAMAYRNGIGIKHNAAIHQNNNYLLKLDFNDFFNSITPDLLFTHFLKKEILLSDAEKKLLTNTFFWNKPKKKDGKLVLSVGAPSSPFISNLILFPFDELIDDYCSKKNISYSRYADDLTFSTSEKNILFQLPSLVKRHLSSIYKNKITINEFKTVFSSKAHNRHVTGVTITNTGELSIGRERKRLISSLIHKFKIGELNLDLTRYLQGLLSFASDIEPSFKSRMELKYSLSTIEKIIEFRGENE

SEQ ID NO: 4147 - protein, 320 aa, Yersinia intermedia
  source 1..320: note = Related to NZ_LR134116.1
MKLHLYAELTKKLNRSRNSVERFISNAPMKYKVYTIPKRTSGQRVIAHPAKKLKVLQRALVAVLQPHFSIHDKAMAYRKGLGIKQNATLHQKNDYLLKLDFNDFFNSITPEIFIKYCTQKEIELSDAEKKLLIKTFFWNKTKKTDGKLVLSVGAPSSPFLSNVLMFGFDEFIENYCSQKNISYSRYADDLTFSTSDKNVLFHIPKLVKTQLGLMFFNQITINEFKTVFSSKAHNRHVTGVTLNNNGELSIGRGRKRLISSLIHKFMHGELDIELTRHLQGLLSFASDIEPIFKSRMEIKYSHKLIESIVKFRGEHEQENQ

SEQ ID NO: 4148 - protein, 319 aa, Salmonella enterica
  source 1..319: note = Related to AAXBOI010000003.1
MKLNLYAKLTDKLGRSRNTVERYISNGPMKYKVYTIPKRTSGQRVIAHPAKKLKVIQRALVSVLEPHLKIHHKAMAYRKGLGIKDNAVLHKENEYLLKLDFSDFFNSITPELFINYCMQNDITLSTAEKNLLIKTFFWNKTKKNDGKLVLSVGAPSSPFISNTIMYFFDEAIDKYCITKNITYSRYADDLTFSTPDKNVLFHIPTLVKKQLGIIFSNQITINAFKTIFSSKAHNRHVTGVTINNDGEISIGRERKRLISSLIHKFILGQLDIEHIRYLQGLLSFATDIEPKFKSRMISKYSNQVIENLIKFRGSDEQTN

SEQ ID NO: 4149 - protein, 316 aa, Enterobacter sp.
  source 1..316: note = Related to NZ_LRCR01000003.1
MKLHLFSNLVKETKFSRNAIERYIYNAPMKYKVYTIPKRSSGQRVIAHPAKKLKILQRALVSILMPFLNIHDRAMAYRKGIGIKHNATMHKNNEYILKIDFNDFFNSITPDMILERFSKNNIELSSAEKKLIIKCFFWNKTKRIDGKLVLSVGAPSSPFLSNVLMFDFDEFFSNYCKENSIVYSRYADDITFSSSKKNVLFIIPDLVKKQLAILFKNKITINEFKTIFSSKAHNRHVTGVTINNNGELSLGRERKRFISALIHKFTLKTLSLDQAQQLQGMISFASDIEPSFRLRMEKKYSEGIICKIVKFRGSYE

SEQ ID NO: 4150 - protein, 315 aa, Proteus mirabilis
  source 1..315: note = Related to JADSTR010000010.1
MSVHLYKRLSEAMATPRNTIDSYIRNAPMKYKVYTIPKRTSGQRVIAHPAIRLKKIQRALVVLLQEYMFIHQKAMAYKTGSSIKKNAELHRTNDYILKIDFNDFFNSITPDLFVNYCNNLGLKLTSAEMNALIKILFWNKSKKNDGKLVLSVGAPSSPFISNVILYSFDEIVDNYCNERNIVYSRYADDLSFSTKEKNILFSVPEFIKKQLNKLFSNAITINELKTTFSSKAHNRHITGVTIDNDGRLSIGRERKRYISSLIHKFSLKKLEFNDAKHLQGLFAFACNIEPRFKARMEKKYSKLIIDDLIKLKELL

SEQ ID NO: 4151 - protein, 317 aa, Methylovulum psychrotolerans
  source 1..317: note = Related to JAGVVN010000001.1
MQIYEFLCKELLVSKQEINEFVLSAPKKYKRYTIPKRTSGKRVIAQPAKRLKDYQRALIKLLEQILPVHDAAFAYKKNIGIKENARRHQKSSYLLKMDFRDFFYSITPDLFFAILKKLDIVFSPQDCYLLTQVLFFNPSKKTGGKLIMSIGAPSSPFISNSIMFFFDKAIYESCLKKGICYTRYADDLTFSSNKKNALFELPVLVKQLLVEHFCGCITINESKTVFSSKSHNRHVTGITITNDDRLSIGRQRKRYISSLIHKFSLNQLADEDINYLQGLLAFACHIEPNFKQRMIDKYSAETISQIVTCVRRGDEKA

SEQ ID NO: 4152 - protein, 313 aa, unidentified
  source 1..313: note = Related to JAATWI010000006.1; note = Methylococcaceae bacterium WWC4
MQIYDFLCKEISVSKQEIYDFVSSAPKMYKVYTIPKRTSGKRVIAQPAKRLKDYQRALVKLLEKVLPVHDAAFAYKKQVGIKENAMKHQKSSYLLKMDFQNFFYSITPTLFFSILYKLNIDLSSEDRYLLTQILFFNPSKKTGGKLVLSIGAPSSPFISNSIMYFFDMSIYEYCINNNINYTRYADDLTFSCQKKDILFAVPTHVKQLLVEYFDGRITINESKTVFSSKSHNRHVTGVTLTNDNRLSIGRQKKRYISSLIHQFSLNQLADEDISYLQGLLAFACHIEPNFKQRMIDKYSAEIIAKIITRKRTL

SEQ ID NO: 4153 - protein, 319 aa, unidentified
  source 1..319: note = Related to WTAZ01000264.1; note = Methylococcaceae bacterium
MQLYQFLSTELSTSKQEIDKFILSAPKMYKIYTIPKRTSGKRTIAHPAKKLKEYQRTLISLLEQSLPVHDVAFAYKKNTGIKQNAAQHQQSKYLLKMDFQDFFHSIKPKLFLSILEKLKVDLTQEDRYLLSQILFWNPSKRSGGKLILSIGAPSSPFISNVIMFFFDQALYTECHRQNITYTRYADDISFSTNTKNTLFEIPHLVKKLLVNHFNGAITVNESKTVFSSKAHNRHITGITLTNENKLSIGRQKKRYISSLIHQFSLGQLPTEDIQYLQGLLAFACHIEPEFKQKMIKKYSFETINQISTSVEGEDEPIRR

SEQ ID NO: 4154 - protein, 316 aa, Pseudoalteromonas sp.
  source 1..316: note = Related to JACJDY010000010.1
MHICQALCAELKLDKTQVIDFALESPKMYKVYAIPKRTSGKRIIAHPAKRVKVAQHALLRQMKVIFPIHHCAFAYQEGLSIKLNAQEHCHNQYLLKMDFQNFFNSITAPLFVRMLDKLSIKISPQDTFLIEHLAFWCPSKETGGKRILSVGAPSSPFISNWIMYGFDKIVFELCRKENIVYTRYADDLTFSTNKKNVLYKIPKQIKSILREQLDGGIVINDVKTIFTSKKHNRHVTGITLTNQGLLSIGRKRKRHISLLLHKFSLGLLGTEDILSLRGLLTFANHIESDFKARMTKKYSSQVIQQLLAYDRVHNHE

SEQ ID NO: 4155 - protein, 316 aa, Shewanella sp.
  source 1..316: note = Related to JAHKQX010000026.1
MLICQSLCTELNLNQTQLIDFAIEAPKMYKVYAIPKRTSGKRIIAHPAKRVKIAQRALLTQMETIFPIHRCAFAYQQGLSIKLNAQQHCDNQFLLKMDFQNFFNSITAPLFVSMLDKLSINISSQDLFLIEHLAFWCPSKETGGKRILSIGAPISPFISNWIMYGFDKTIFDLCRKENIVYTRYADDLTFSTNKKNILHRMPKKIKSILRDELGGNIVINDIKTILTSKKHNRHVTGITITNHGDLSVGRDRKRYISLLIHKFSLGLLSEEDIASLCGLFSFANHIEPDFKDRMVKKYTAQVIQKLFSYDRVYKHE

SEQ ID NO: 4156 - protein, 311 aa, Ketobacter sp.
  source 1..311: note = Related to RCHN01000034.1
MHLAHFLSTSLSISNQEIITFSSSAPNRYKVYSIPKRTSGKRTIAHPAKKLKLVQRLLSNHLSTILPVHESAFAYRKGLGIKDNAQYHMNGRYLLKMDFQNFFLSIVPELLFITLKKNAIEFSEEDEFLMSRLLFWRPSKSSSGKLVLSIGAPSSPLISNFIMFQFDQEMAAKCKSKGVRYSRYADDLTFSTNVKGALFDLTSLVKELLEKHLLGYIAINETKTVFSSKAHNRHVTGVTLTNDGQLSIGRQRKRFISSLIHQYSLGKLPAEDLSYLQGLIAYANDIEPVFVKRMSKKYSPQTMDQLIKGVK

SEQ ID NO: 4157 - protein, 314 aa, Reinekea marinisedimentorum
  source 1..314: note = Related to NZ_SLZR01000017.1
MDFFERLARDLDISEQDVRGFALTAPNRYKIYRIPKRTSGSRVIAHPSRMLKAYQRLIISYVTELLPVHSCAYAYRQGVGIKDNARVHAKSSYLLKMDLQNFFNSINPSLFFDVVEKVGLEVADRDKWLLTKLLFWSPNKSSSGRLILSVGAPSSPLVSNFIMYPFDIRMSEYCFANGLKYTRYADDITLSTNKRGCLFDLPDYIKGVLANEYQGKLSVNESKTVFSSKAHNRHVTGITITNKGSLSIGRQRKRYISSLIYQFSSDQLDPDDTLHLKGLLSFAFDVEPDLRRRFEKKYTSKVIHQILTCEKGND

SEQ ID NO: 4158 - protein, 314 aa, Rahnella variigena
  source 1..314: note = Related to NSDJ01000001.1
MKIVEFLSNKTGKNIQALIRLIDQAPRMYKVYKIPKRSVGFRVIAQPSKEIKELQRFTVEMLEKILPVHEKAMAYQKGKDIRSNALLHVKNDYILKMDFEDFFNSINPEVFHKSLEIDEISINNTELYFLTRLLFWNPSKRKNGKLILSVGAPSSPIISNYIMHRFDCAIEEFCNSNAIMYSRYADDMTFSTSKKNHLFSIPEIVRKTLRNKYYKRISIKQSKTIFSSKAHNRHITGVTLNNEGKISIGRSRKRMLSSLIFKASKNAIDDESLSSLTGQLGQAFYIDNFFKESMIKKYGESLIKSILGKKNEKA

SEQ ID NO: 4159 - protein, 314 aa, Serratia sp.
  source 1..314: note = Related to NZ_CAJCKX010000049.1
MYIVEYLSKKTGRGMQELSRLVDQAPRMYKVYKIPKRSAGFRVIAQPSKDIKELQRFAVEILKQILPVHDKAMAYQKGKDIKTNALLHARNDYILKMDFEDFFNSINPELFNISVEKDKINITKNELYWLTRLLFWNPSKRKNGKLILSVGAPSSPLVSNYIMYRFDCAIEEYCNSNSITYSRYADDMTFSTSKRNVLFMIPEIVRKILKNNSYKRISIKQSKTVFTSKAHNRHVTGVTINNEGKVSVGRSRKRMLSSLIFKASKNELDHEVLSSLTGQLGQAFYIDVCFKESMIKKYGASIIKSILSGNHEKT

SEQ ID NO: 4160 - protein, 314 aa, Providencia rettgeri
  source 1..314: note = Related to AP022371.1
MTIVKYLSEKTGTEIQELNKLISQAPRMYKVYKIPKRSLGFRVIAQPAKSIKKLQRFAVEILETILPVHESAMAYQKDKDIKKNALLHVKNNYILKMDFEDFFNSINPELFIKSLKKDKILISKIDLNHLTKLLFWNPSKRKNGKLILSVGAPSSPLISNYIMYRFDCDIEEYCQLKNITYSRYADDMTFSTKEKDRLFEIPGFVKKTLKKQSYKKISIKQSKTIFSSKAHNRHVTGVTLNNQGNLSIGRARKRMLSSFIYKACKNELNQEELLSLVGQLGQAFYIDKIFKKSMERKYGLLTIKSILGGNNEKI

SEQ ID NO: 4161 - protein, 314 aa, Citrobacter freundii
  source 1..314: note = Related to CP058318.1
MQIAEYLSTKTGKSVHDIGSLISNAPRMYKVYRIPKRTGGYRVIAQPSKVIKSLQRHAVEMLRDYLPVHLHAMAYQKGKDIKLNAQVHCKNEYILKMDFEDFFNSINPELFKKCLKLDGLHFSESDINLLIKLLFWNPSKRKNGKLILSVGAPSSPLISNYIMYRFDCAIEKYCKQENITYSRYADDITFSTLKKDQLFIIPDIVNKTLKQNSYKRISIKLSKTVFSSKAHNRHVTGVTLNNDGDISIGRARKRMLSSLIFQAMHGKLDNDELSSLKGQLGQAFYIDSKFKASMHKKYGISIINKIIGGNSEKT

SEQ ID NO: 4162 - protein, 318 aa, unidentified
  source 1..318: note = Related to JABSOI010000029.1; note = Alteromonadaceae bacterium
MNLLDLLNRELNKTTFSISESDILIFSMNAPKKYRVYSIPKRSAGTRIIAHPSKELKVYQRHLVDLFKNILPTHHTAYAYRQGLSIKENAECHKKNKYLLKMDFENFFNSINPLILKNELVKNKIKFTKEDFKLLEQLCFWCPSKKIGGKLILSVGAPSSPSISNFIMYQFDEIVENWCKQRKITYTRYADDISFSTSLKDALFEVPKLVESTLTSNFGKRISVKASKTVFSSKAHNRHITGVTITNEGELSIGRDRKRYISSLIHKFKLNMLAQQDIEHLKGLLGFAFHVEPVFRERMINKYSKKTMDEINQFRSES

SEQ ID NO: 4163 - protein, 308 aa, Alteromonas stellipolaris
  source 1..308: note = Related to NZ_CP014322.1
MSILTLLSNDLGISENELKALLVNAPRKYKVYSIPKRTGGRRTIAQPIPALKQAQRSFNKCINLNVHEAAMAYRTGLSIKENANIHRMNPYLLKMDLENFFNSITPSLLWLNLKKQNIEFNLYDNHYLENLLFWRPRKSSKIILSVGAPSSPYVSNSLMYNFDITVHELCSNMHIKYSRYADDLTFSTKEKNHLFEVPKAINNLLLKEFGNNLTINTSKTVFSSKAHNRHVTGVTINNQGNLSLGREKKRYIKHLVHKFSFDLLDDSEVPYLKGLLSHANHIEPDFIVRLQKKYSDEIIQCLVNGTNR

SEQ ID NO: 4164 - protein, 310 aa, Aeromonas dhakensis
  source 1..310: note = Related to NZ_CDBH01000035.1
MDLIDALSSSLKINKSTLQDFCTLAPNKYRIYSIPKRNSGYRIIAHPSKELKKYQRTLNDLIKNILPVHSSAFAYRNGLDIKKNALRHAKNPYLLKMDFHDFFNRITPDVFWKQVGNKFLSLTRKDADIFEKLIFWNRSKKNDGKLILSVGAPTSPLISNSVMYNFDCSISEWCVKNDITYTRYADDITFSTRKKNILFTVPEKIKNEIIMHFGNAMLINDGKTIFSSKAHNRHITGITITNEGIPSLGREKKRYIYHLLHQYSLNLLEHDDILHLKGQFSFSCYIDKSLMHRAEKKYSSELVQKLIHYV

SEQ ID NO: 4165 - protein, 315 aa, Aeromonas hydrophila
  source 1..315: note = Related to NZ_CP027804.1
MQLIDFLSSKLEKTPQEIEKFALTAPKMYKIYTIPKRKAGHRIIAHPSKNLKSYQHLVIDYIKIKLPIHGAAQAYKTGHSIKTNALAHINGEYLLKMDFNNFFNSITPELFSLECAKRNIDLTRSELSLIKKLIFWNPSKKKGGKLILSVGAPTSPLISNFVMYGFDYLLSEYCHKNYISYTRYADDLTFSTRKKNNLFQIPSIVKDFLSAELNKRISVNESKTIFSSKAHNRHITGVTLTTENKLSVGRERKRYIYSLLHSFSLGNMAKPDIEHLQGLFSFACHIDETFKSRAENKYSKLIISQLHEGRLNNEK

SEQ ID NO: 4166 - protein, 337 aa, Pectobacterium versatile
  source 1..337: note = Related to QEKR01000001.1
MTTLRQHLLTSPLVAELAFSLLSSSSKKVTKPDVDKWLILSLAKVMLSGPKMYRVYTIPKKNGGKRTIAHPSKVLKVFQKGLVEFLINKLPVHDAAYAYRKNISIKDNAFQHVKNSYFLRMDLADFFNSIDTSLFEEQIEKHKVQLADSDKVLLRRSAFWSPKKINSGNLILSVGAPSSPMISNFIMFSFDETITSICEPLKIKYTRYADDLFFSTSHKDVLFKMPKLIQYVLYSEFGKKITINEVKTSFSSKAHNRHIAGITITNNDTLSLGRERKRTISSMIHKYSLGNCTDFELAKLQGLLSFSKHIEPLFIERMKKKYSVSLIDVIISGQWRK

SEQ ID NO: 4167 - protein, 338 aa, Lelliottia amnigena
  source 1..338: note = Related to JAENMV010000007.1
MTTLRHHLLTSPLVAEHAFSLLSSSSSKKVTKSDVEKWLTISIATVMTSGPKMYKVYTIPKKNGGKRTIAHPSKVLKVFQKGLVEFLVNKLPVHDAAYAYRKNISIKDNALQHAKNAYFLRMDLADFFNSIDVNLFEKQIEKHKIELAAADKALLRRSAFWSPKKMSSGNLILSVGAPSSPMISNFIMFSFDETITSVCDPLRIKYTRYADDLFFSTEHKNILFKIPSLIQYVLTSEFGKKIAINEVKTSFSSKAHNRHIAGVTITNNDTLSLGRERKRLISSMIHKYSLGNSNDIELAKLQGLLSFSKHIEPLFIDRMKEKYSISLVENIITGRWRK

SEQ ID NO: 4168 - protein, 338 aa, Klebsiella aerogenes
  source 1..338: note = Related to CP002824.1
MTTLKHHLLTSPLVAEQAFSLLSTSSSKKVTKLDVEKWLTVSLAKVMVSGPKMYRVYTIPKKNGGKRTIAHPSRALKVIQRGLVEFLNDKLPVHDAAYAYRKNISIKDNALQHVTNPYFLRMDLADFFNSIDVNLFEERIEKHKIQLSAADKALIRRSAFWSPKKTNTGTLILSIGAPSSPLISNFIMFSFDETISSICAPLKITYTRYADDLFFSTKNKNILFKIPSLIQYVLSTEFGKKLTINEVKTSFSSKAHNRHIAGVTITNNDTLSLGREKKRIISSMIHKYSLGKSDDIELAKLQGLLSFSKHIEPLFIERMMKKYSVNLVDKIISGQWRK

SEQ ID NO: 4169 - protein, 340 aa, Rahnella aceris
  source 1..340: note = Related to JAADJV010000002.1
MKKLTIFFASSPFIEAWLHIVKPSDEENFTSEQKIAHIKQSIALIMRSGPKMYKVYSIPKRNGGKRVIAHPAAMLKAFQRDLCLHLANLLPVHSAATAYQPASSVKINALAHASNHYLVKMDLANFFNSIDVDIFAAELRRHKIALTLKELSFIRQCTFWSPSKTSTGRLILSVGAPTSPLISNFVMHAFDDIIQKICEPLAVTYTRYADDLFFSTNVRDISFKIPDLVAYVLAKTYENHFSINQAKTRFSSRAHNRHVTGVTITNEGALSVGRQRKRIISSLIHKYTLQKINLAETKILQGLLSWAFCIEPTFVISMRKKYSDNVIQSIISGNWNNDRA

SEQ ID NO: 4170 - protein, 337 aa, Raoultella terrigena
  source 1..337: note = Related to NZ_CP050508.1
MKKITNFFVTSPFVDAWLQTTVPSVGELSTEQRVACIGHNLALITRSGPKMYKVYSIPKRNGGKRVIAHPAAMLKAFQRDLNLHLVSLLPVHNAATAYRVSSSVKTNAKAHASNPYLLKMDLYNFFNSIDVDIFVAELRRHRITLAVKELSFIRQCTFWSPSKTSTGRLILSVGAPTSPLISNFVMYEFDNIIHKICESLSVTYTRYADDLFFSTNVQDVLFKIPDLVTYVLTNTYNGKFSTNQTKTRFSSKAHNRHVTGVTITNEGRLSLGRQRKRMISALIHQHCLKKINLVETKKLQGLLSWASNIEPTFVISMRKKYSDKVIQSIISGNWNDD

SEQ ID NO: 4171 - protein, 338 aa, Vibrio sp.
  source 1..338: note = Related to MCYT01000164.1
MAKLIEQLIHSTPVTAYANSVLSEYTDKFTAKDIEIIATQTLNDVKARGPKMYKVYTIPKRNGGKRLIAHPSKPLKATQRALVELLQKQLPVHEAAFAYRDGVSIKDNAFAHSKNPYFLKMDLSDFFNSIDTELFEDQLKSHSIFIRNKKLLHNTIFWSPAKELNNKLKLSVGAPSSPLISNFIMYNFDEAISTICHSSNIKYTRYADDLFFSTNTKNLLFNIPSLVNYLLEKQYDNKLSVNESKTSFSSKAHNRHITGVTITNDNNLSIGRKKKRYISSLVHKYKLGSLDVENIETLQGLLGFAKHVEPSFMIRLCKKYSQNTIDSITRGAWKNNEK

SEQ ID NO: 4172 - protein, 337 aa, Vibrio owensii
  source 1..337: note = Related to CP030798.1
MAKLIDQLINSSFVVSYAYSVLSACTGKFTQEDVKLLATQTINDVKARGPKMYKVYTIPKRNGGKRLIAHPSKPLKATQRALVEVLQKKLPVHEAAFAYRSGLSIRDNALVHSKNRYFLKLDLSDFFNSIDVDLFESQLASNRIFIRNKTLLNQIIFWSPTKDLQSKLKLSVGAPSSPLISNFIMYRFDKDMSKICDSLNVRYTRYADDLFFSTNIKDILFDIPELVNYILDKRYDNKLLVNKSKTSFSSKAHNRHITGVTITNEGKLSIGRGKKRYISSLVHKYNLGLLEYEDMEKLQGLLGFAKHIEPSFIIKLSKKYSHQSVEYIAKGGWKNNE

SEQ ID NO: 4173 - protein, 339 aa, Grimontia hollisae
  source 1..339: note = Related to NZ_UGHC01000001.1
MTKLKNQLINSTSVRSYAYDVLSEQSTRISEDDIEALAQKTVHDVWDNGPKMYKVYTIPKRSGGRRTIAHPSKPLKAVQKALVELWEAELPIHSAALAYQKGKSIKENAECHRYNKFLLKVDLSEFFNSIDIEVFESQLLGNNIKFDKRDSRLIRNILFWSPQKSLSSKLVLSVGAPSSPFISNFVMYTFDSLISEVCESLNIIYTRYADDMFFSTQVKNTLFKVPEIISFLLKNKYNNKLLINESKTIFSSKAHNRHVTGITITNDNKLSLGRSRKRYISSMVHKYKLGMLDFEDIEQLQGLLGFAKNIEPEFLVRLKKKYSSETVNIILNGKWKNEK

SEQ ID NO: 4174 - protein, 342 aa, Vibrio tritonius
  source 1..342: note = Related to NZ_AP014635.1
MTKIAKQLLSSPFIHSYAYKELDELMDNVTQKDIDSFVELTVDDAIINGPKMYKVYAIPKRNGGRRIIAHPSQPLKAVQRDLIEILKSQLPIHDAAFAYQQGKSIKGNAEVHRFNKFFLKMDLSNFFNSIDVDLFYNHLDLNSVNIDIEDKSTIKNIIFWRPQKNETGELRLSVGAPSSPLISNFIMYKFDSIISEVCASFKIKYTRYADDLFFSTTVKGVLFKIPDIVEFILKSKYDDVLTINKSKTSFSSKAHNRNITGITITNSNELSLGRNRKRYISALVHKYRIGLLDDNATESLQGLLAFAKNIEPKFLMRLKNKYSNDVIESIISGRWKNHESEE

SEQ ID NO: 4175 - protein, 327 aa, Vibrio cholerae
  source 1..327: note = Related to CP036500.1
MENIFNYLLSSPNVVDFSNESKKTKQPKLPQDILHDVLLYGPKMYKVYTIPKKNGGKRVIAHPSRGLKVVQRDLVVFLEKILPVHNSAYAYIKNRSIKDNAHYHSKNRYHLKMDLSNFFNSIDTELFFTQLDTNGVTFNSDEMYLLQRSLFWSPTKSEIGKLITSVGAPSSPLISNFIMNTYDFMISDICKSLEVKYSRYADDMFFSTNIKDILFTLPNIVDYILDTIYSGKLRVNSAKTKFSSKAHNRYITGLVITNDAKVSIGRSRKRLISSLVHKHQLGLLEPDSVSSLQGLLGFVRSVEPEFLDRLVKKYGDYEIQRIIKGLV

SEQ ID NO: 4176 - protein, 336 aa, Vibrio crassostreae
  source 1..336: note = Related to NZ_SLWI01000001.1
MKKLLNYLASPETADNLKKYFELAYPQIKYDEDVFNLMAKHHIETLLKSAPKMYKIYTIPKRNGGNRTIAHPAKGLKATQRDLSKYLVDILPVHSCAFAYTKNKSIKDNALVHSKNKFLLKMDLVNFFNNINDTLLNNELVENDIPLTTLEITQVNKLSFWCPTKDDDGKMILSVGAPISPLISNFIMYRFDSKLSELAVNNKVKYSRYADDIFLSTNAPNVLGLFVNVVELLLLELYGGKLVINKTKTVFSSKANNRHVTGLTINNSGEVSLGRKRKRVISSLVHKFSIGILDSSEIESLRGLLSFSSSVEPEFITRLEKKYTFKLIDKIVRGLS

SEQ ID NO: 4177 - protein, 333 aa, Aliivibrio fischeri
  source 1..333: note = Related to JAJVEH010000001.1
MKKLLDYLTSSDNLKNYLKLTYPQISYDDDVFLIMGKYHLSSLYKSAPKMYKFYTIPKRNGGRRAIAHPSKKLKVTQRDLSTYLEKILPVHDCAFAYRKNKSIKDNALIHVGNKFLLKMDLVNFFNSITPKMLINEIKESDLSFEESELDYIKKLAFWCPSKEDNGKLILSVGAPSSPLLSNFIMYRFDSVLSEVAKSNKVKYSRYADDIFLSTNVPNVLKLFVNIVKIILKEMYHDELIINEMKTVFSSKAHNRHVTGITITNDNKISLGRQNKRMISSLVHKYSLGVLDTSKIIRLRGLISFASSIEPDFIIRLENKYTFNLINKLIKGLD

SEQ ID NO: 4178 - protein, 339 aa, Shewanella sp.
  source 1..339: note = Related to NZ_JWGX01000025.1
MEELQKSLLASNPVKEFFSQKASHIFGESGQKLPMAAESLALAALQNVKVQGFKMYKVYTIPKRSGGNRVIAHPSKELKAFQRGLVDILESELPIHSCAHAYVKRKSIKSNAMAHAKNQYLLKMDFLNFFNSVDIELLAKACSGNKKIEEVGLMQFANLVFWSPTKQRDGKLVLSVGAPTSPLLSNFVLYEFDNLISLVCNSMHVTYTRYADDLFFSTNEADILKSVPNIVKYFLDYIYGDKLRVNDAKTAFSSKAHNRHVTGLVIANSGRISLGRERKRFIKSLVYKSTKNELDVEELNSLMGLLSFSQHVEPDFIMRLVCKFGQDAVDYIVNAQWRG

SEQ ID NO: 4179 - protein, 308 aa, Enterobacter ludwigii
  source 1..308: note = Related to NZ_CP041062.1
MNIIEIISKKTMLASSNVITFIHTAPYRYKKYYLPKNNGGSREIAQPSRELKIMQRLILQLLLPYLPVHENAFAYVEGKSIKRNALMHRNNEYFLKMDFSDFFNSIKPIDLRNVLLKNGYETIPLNLNLIDNLFFYKKTKKSGLSLSVGAPSSPLISNAVLYDFDVRVSELCKQEDITYTRYADDLTFSCNEKGKLLVFQKEIAKILRKIQSPKLKLNDKKTIYASRSVSRRVTGIVINNNGELSLGRHKKRMISSLVHRYTLGKLIPDDIHKLKGYLAYAKHIESGFIVSMRNKYGADVIDSILKYN

SEQ ID NO: 4180 - protein, 308 aa, Leclercia sp.
  source 1..308: note = Related to NZ_CP031104.1
MNIIEIISKKTMLSSSNVITFIHTAPYRYKKYYLKKNSGGVREIAQPSRELKIMQKLILELLVPYLPVHENAFAYVEGKSIKRNALMHHKNEYFLKMDFSDFFNSIKPLDLRNTLTDNGFETIPVNLNLIDKLFFYKKTKKSGLSLSVGAPSSPLISNAVLYDFDIKVTELCERQDIIYTRYADDLTFSCNEKGKLIGFQKEIVRILRKMKSPKLKINDKKTIYASRAVSRRVTGIIINNNGDLSLGRHKKRMISSLIHRYTLNQLNNDDILKLKGYISYAKHIDINFVSSMNKKYGAETLNSITKHN

SEQ ID NO: 4181 - protein, 308 aa, Mangrovibacter yixingensis
  source 1..308: note = Related to NZ_JAIVKM010000013.1
MNIIDIISKKTLLPSPNVMVFINTAPYRYKKYYLPKNSGGVREIAQPSRELKVMQRIIIEKIADFLPIHESAFAYVKGKSIKENAQKHKRNEYFLKLDFSNFFNSIKPSDLRRVLIKNGFENNTFNLLLIDKIFFYKKTKKSGLTLSVGAPSSPLISNAVLYEFDVKVTELCNKEGITYTRYADDLTFSCNEKGKLIGFQKSIIKILRKIPSPHLRLNDKKTIYTSKSVSRRVTGIVINNDGQLSLGRKNKRMISSLIHHYTLNKLNAEDVYKLKGYLSYAKHIETTFINSMTIKYGVDTINAILKSN

SEQ ID NO: 4182 - protein, 308 aa, Providencia rettgeri
  source 1..308: note = Related to NZ_JAAQVP010000001.1
MNIIDIISKKTMLPSSNVITFINTAPYRYKKYYLKKNNGSLREIAQPSRELKIMQKLILNILSEFLPVHENAFAYIEGKSIKLNALKHKENKYFLKMDFSDFFNSIKPIDLRNILIKNGFESNMYNLKLIDNLFFYKKTKKSALSLSVGAPSSPLISNAVLYQFDIELSEICRNENITYTRYADDLTFSSNEKGKLIDFPKVVYLILRKMHSPKIKVNNSKTIYTSKAVSRRVTGITINNQGELSLGRHKKRVICSLIHKFLQGELDNDEIHKLKGYLSYAKHIEINFIKSMEKKYGVELLNSIKKVV

SEQ ID NO: 4183 - protein, 310 aa, Salmonella enterica
  source 1..310: note = Related to CP074606.1
MDIIKKIADETLMPVSKVSAFIFTAPYRYKVYPIPKRNGGFREIAQPSRALKFMQRIVIAELEKVLKVHENAYAYVKGRSIKDNVEKHQRNSYILKVDFCEFFNSISPCDLELCLKNNGLDSLLSSKELLNKLFFYKKSKRSALSMSIGAPSSPFLSNAIMYNFDSVISDMCSNKNITYTRYADDLTFSTNEKGILYEFIHEIDKVLEGIDSPKLKLNDKKTIFASKKCNRHITGIVINNEGELSIGRDKKRYLSSLVHKFSLNALNEEEIEHLKGYLAYVNKIEPSFISGMKRKYGVEVVNSIITFNPL

SEQ ID NO: 4184 - protein, 313 aa, Shewanella sp.
  source 1..313: note = Related to JAKUDL010000001.1
MVIDDCITKMLKNQLLLSDAELLYFASTAPHRYKKYFIPKRNGVDLREIAHPSSQLKYVQRLLVESMVKTFPIHSSAVAYRKGISIRDNATLHLKNNYLLKMDFENFFNNITPEIFFDACEDNNISYSEKDKNLLKNILFYKKRRASGLSLSIGAPSSPLVSNFIMYQFDVLVSDFCAARNIVYSRYADDLFFSTRKSDELSQVAGFIKEILRTMYRGRLKINDAKTIHTSKKNKRLVTGVVLSSEDKLSIGREKKRFYSSMIHKFTLKLLDGDEIHKLQGYLSHAKNIEPLFISRMEKKYGHKALAEIMSYN

SEQ ID NO: 4185 - protein, 316 aa, Hydrogenovibrio sp.
  source 1..316: note = Related to WBJR01000006.1
MSLLAFLSDNLMFHSSELKKFISTAPHRYKHYPIPKRSGNGFRIISQPSKELKFIQKILVEHLEEVVIIHHKALAYRKGLSIKDNALLHKANPYLLKMDFKDFFPSIVPELFFDALLKQDIHFSKQDYALLQKVFFMKKTRKSPFILSIGAPSSPLISNAVMFEFDKQIDELCQKRNITYSRYADDLVFSSKIDGALFDLPKLVEGVLDKDYFGLIRINKDKTVFSSKAHNRHITGVTITNDNKLSIGRDKKRLLSSKVHRYSLNQLEAELAAKLSGEISFAIFIEPSFKAFLIRKYGRDVVESLLRFNFENTPEL

SEQ ID NO: 4186 - protein, 311 aa, Shewanella morhuae
  source 1..311: note = Related to NZ_UGYV01000001.1
MNLIKFLKETTLIPEDELLKFASTAPHRYKEYDIPKRNGKGVRHIAQPSKELKFFQKIIVNYLSDILPVHEKATAYKQRVGIKENALYHCGNEFILKMDFENFFPSITPDVLFHLFKRLDIKFDKTDEFFLEKLLFKKGRRDRNSYLSIGSPSSPFISNCIMYFFDIEADRVCWNRGITYSRYADDITLSTKKRNNLFDMPKLLNEMLTRELLGFIKVNKDKTVFSSKRHNRHITGVTLNNDGDISLGRDRKRLISSMIHRFKSGQLDSIQTAELQGFISFSYYIEPLFLNRLKLKYGTDIIDRIKSYNLL

SEQ ID NO: 4187 - protein, 311 aa, Glaciecola sp.
  source 1..311: note = Related to PJAR01000040.1
MSIYVFLSDSLLISESDLEKFSSTAPYRYKVYDIPKRNGKGFRTIAHPSKELKLIQRLCVQYLENKLYVNDAATGYRRGLSIKDNAAAHSKNKYLLKMDFEDFFPSIKPLLFFYICKQREIKFTVKEKAFLRYILFRKSRGEDVFRLSIGAPSSPLISNFVMSTFDEIVLKYCINNKITYTRYADDLAFSTNVRNSLFDVPKTIQERLHDATRGTIKVNSSKTVFSSRKHNRHITGVTLTNDGLLSLGRKKKREISSLVHKFSIGTLEQTKISNLQGQLSFAYHIEPEFLIRLQKKYGQAIIDKIKGKTDK

SEQ ID NO: 4188 - protein, 309 aa, Hahella ganghwensis
  source 1..309: note = Related to NZ_AQXX01000010.1
MNIEEYLTELLYVGPDLLYKFASTSSRRYKTYQIKKRSGKGVRTIAHPSKELKYIQRLLVEKLEQLLPVSDNAYAYIKGKSIRDNAQQHVNNKYFLKIDFSDFFYSITPDIFFFMLKKHKIEYSQKDQFLLKNLLFWRKERDGGLTLSIGAPSSPLISNFVLYDFDKSINSWCQGNKIVYTRYADDISFSTNKRNALFDVLANVKKTLNDCGLENIKINDSKTIFSSKAHNRHITGVTITNDNKLSIGREKKRLLSSMIHHFSQGNLPKEKYEELSGHLAHAFFIDPDFKNFVIKKYGNEVLKNLFQRK

SEQ ID NO: 4189 - protein, 310 aa, Bowmanella pacifica
  source 1..310: note = Related to NZ_BMLS01000007.1
MIIEHLSETLFLAEHDIVRFSLSSPHRYKVYEIPKRNSSKTRTIAHPSKELKFIQRALVEFLSKILPIHEAAFAYKKGMGIKDNAKQHSKSKYLLKMDFKDFFPSITPDLFFRVAEDYGIEFNENDRIVLTGLLFWKPKRSDGLVLSIGAPTSPLISNFVMFEFDKKVSSDCLNKKITYTRYADDITFSTRVKDALFEIPPFISSVLNETVKGIELNPEKTIFTSRAHNRHVTGVTLTNDGEISVGREKKRLISSMIHKSKYSKLSSEAAANLLGLISYATHIEPEFMDRMIKKYGAEVIQAIKARAIGS

SEQ ID NO: 4190 - protein, 310 aa, unidentified
  source 1..310: note = Related to nan
MIIKHLSDTLFLAEHDIVRFSLSSPHRYKVYEIPKRNSKKTRTIAHPSKELKFIQRTLVDYLSKILPVHGAAFAYKKGIGIKDNARQHAKSKYLLKMDFKDFFPSITPELFFSVAKAHGIEFNKEDRIVLTGLLFWKPEGSDGLVLSIGAPTSPLISNFVMYIFDQKLSDECLNRKVTYTRYADDITFSTRIKNTLFELPHLITSLLTKTVDGVVINPDKTVFTSRAHNRHVTGVTLTNEGELSIGRERKRLISSMIHKSKFSKLSSEDASNLLGLISYATHIESQFLDRMTKKYGAEVLQAIKDRAVGS

SEQ ID NO: 4191 - protein, 310 aa, Shewanella aestuarii
  source 1..310: note = Related to BMOT01000001.1
MIIEYLSESLFMAKYDIVNFALTSPHRYKVYEIPKRNSKNTRTIAHPSKELKFIQRELLKKLIEILPVHDAAFAYQKGIGIKDNANKHSNSKYLLKMDFKNFFPSITPSLFFSIAEKNGIVFDKNDQLVLKGLLFYKSKANKELTLSVGAPTSPLISNFLMHIFDQKISYECSLKKVTYTRYADDITFSTNIKNILFELPEIIMQLLQETVVGVEINPEKTIFTSKAHNRHVTGVTLTNEGGLSIGRDKKRLISSMIHKSKFNTLANDDACYLLGLISHASHIEPEFLERIIKKYGLEVIQNIKLSAITS

SEQ ID NO: 4192 - protein, 310 aa, Pseudoalteromonas sp.
  source 1..310: note = Related to JADYXE010000008.1
MIIEYLSESLLIAEHDLTSFALTAPHRYKVYEIAKRNSKKTRTIAHPSKELKFIQRSLVELFEKSLDIHKAAFAYKKGFGIKDNAKAHINSKYLLKMDFKNFFPSITPSLFFTVAEKKGVVFTAADRAILTGLVFWKPQGRDDLILSIGAPTSPIVSNFVMNYFDEAVFDLCINRKITYTRYADDITFSTKLKDNLFDLPKIIETILNETVQGIEVNSEKTIFTSKAHNRHVTGVTLTNDNHISVGRDKKRLISAMIHQSKFKSLTPEDASHILGLISFAIHIEPEFLDRILRKYGAEVLNNIKAKAGGI

SEQ ID NO: 4193 - protein, 310 aa, unidentified
  source 1..310: note = Related to PGZF01000002.1; note = Gammaproteobacteria bacterium HGW-Gammaproteobacteria-15
MIINYLSDSLFMSKDDIVRFSLTAPHRYKVYEIPKRKSGQKRVIAHPSKELKFIQRSLIDILKLYLPVHDAAFAYRKGIGIKENAKQHLNSKYLLKMDFENFFPSITPALFFKTLEEHGFVLDGDDKLVLSGLLFWKKKDFDGLTLSIGAPTSPLVSNSVMYLFDKKISEICLSRKISYTRYADDITFSTNIKNILFDIPELVSSVLNELVDGVKLNCKKTIFTSKAHNRHVTGVTLTNDGKLSIGRERKRLISSMIHQSKFCNLTMDEASKLLGLISHAEHIEPGFLKRMIHKYGEEVLNNIKSRASGV

SEQ ID NO: 4194 - protein, 311 aa, Klebsiella oxytoca
  source 1..311: note = Related to NZ_CP027426.1
MDILQHISDLLLTKKSEIISFSLTAPYRYKIYRIAKRNSDKKRTIAHPSKELKFIQRAITEYLSDKLPVHECAFAYKKGSSIKTNAQIHLHTKYLLKMDFENFFPSITPRLFFSKLRLANIDLTADDKVILENILFFKSKRNSNLRLSIGAPSSPLISNFVMYFWDIEVQKICSKIGVNYTRYADDLTFSTNNKDVLFDIPDMLENILPKYSLGKIRINHEKTVFSSKGHNRHVTGITLTNDNKLSIGRERKRKISAMIHHFINGKLPADEYNKLIGLLAFAKNIEPSFYKSMVIKYGPDNIHKLQKQKDK

SEQ ID NO: 4195 - protein, 319 aa, Acerihabitans arboris
  source 1..319: note = Related to NZ_WUBS01000016.1
MNISKHLCEKLVMDEDEIFKFSITAPYRYKVYEIPKRNSPKKRTIAQPSKELKFIQRIIISLLKDVLPIHASCYAYRKNLSIKHNALVHLNTKYLLKMDFEDFFPSISPHLFFEILKLTKIQFEDNDLILLEKLLFFKPKRNSTLRLSIGAPSSPFISNFVMYFFDIEVQSLCDAHGINYSRYADDLTFSTNNKDLLFDMPIIVSDILSKHSFDSIKINNRKTIFSSKGHNRHVTGITLTNESNLSVGREKKRLISVMIHYFVTGRLDVDDVLKLQGMLSFARFVEPKFYLSMCKKYGLVNIKKLNSLQIASGDKSSYI

SEQ ID NO: 4196 - protein, 304 aa, Methylomonas methanica
  source 1..304: note = Related to NZ_LUUH01000065.1
MSKPEIIRFCLTSPHRYKTYKIPKRNSDQKRTISHPSKELKFIQRVLNDYLREKLPIHDCAYAYKQGLNIKDNAEVHASTKYFLKMDFEDFFPSITPDFFFTMLDKAGLEINEIDSILLKNFIFCKASRKSGLFLSIGAPSSPLISNFVLFGFDENIKRFCAEKNINYTRYADDLTFSSNIKNSLFEVPEIVKFYLDKETNGKIKINKRKTVFSSKAHNRHVTGVTLTNDEKLSVGRNRKRLISAMIHHFKCGKLDPTEIDKLKGLMSFVNYIEGDFYRRMIIKYGSETIDKLNNYKQVKRDAK

SEQ ID NO: 4197 - protein, 307 aa, Aliivibrio fischeri
  source 1..307: note = Related to MAJP01000040.1
MNIFEQLSDILCVDANELMDFASTSPHRYKVYTIAKRNSNKRRLIAHPSKELKFIQRILIKILEPKLKVNNVAHAYIKDKSIKTNAMQHVNSKYLLKMDLENFFPSITPNLFFSCLTKSGVEITERDKELLTGFLFWKPRHSYKLLLSIGAPSSPLVSNFILNSLDEELSVYCESNKIKYTRYADDLTFSTNVKDILFSLPEVVSESLYNNYNGDIKVNKDKTIFSSKGFNRHVTGIVLTNDNVLSIGREKKRVISSTIHKLKLGALDDNEVNQLQGIFAHACFIEPDFYNRMLKKYGAETLNKIKK

SEQ ID NO: 4198 - protein, 309 aa, Rodentibacter pneumotropicus
  source 1..309: note = Related to NZ_MKZZ01000010.1
MKIVDVLSLKLLMSNTDIVKFANTAPHRYKVYQIPKRNSSKKRTIAQPSKELKFLQRILCGILEDILPIHNSAFAYKKNIGIKQNAEFHSKNKFLLKMDFKNFFPSINPNLFLRQIESHAISLDEVDKKLLINLIFRKPYREGILELSIGAPSSPLISNFIMYNFDKAISEKCNSMSITYTRYADDITFSTNSVNILFNIPKIVESLLHDIYQGDISLNKEKTVFSSKAHNRHVTGITLSNDSKLSIGRYKKRVLSSKIHHYLLGHLKEDEIQKLKGELAFSFHIEPILKKRFIRKYGKECFLKLDKEL

SEQ ID NO: 4199 - protein, 308 aa, Haemophilus haemolyticus
  source 1..308: note = Related to LZOY01000008.1
MKIIELLSSMLLMENSDIIKFSNSAPYRYKVYQIPKRNSLKKRTIAQPSKELKFIQKLLYQILGKELPVHKSAFAYQKYIGIKQNAEQHVKNRFLLKMDFKNFFPSVNPELFFIEIEHYGIELDKIDKSLLTNLIFRKPYRKGGLELSIGAPISPLISNFVMYRFDDFISIKCNEMNVKYTRYADDLTFSSNCKDILFEIPGIVEKALFDIYKGNIVINKSKTIFSSKAHNRHVTGITLSNDDSLSIGRNKKRILSASLHYYTLGRLTKEEIQKLKGYLAFSFYIEPNLESKLIRKYGKECLDNLMKE

SEQ ID NO: 4200 - protein, 307 aa, Pasteurella multocida
  source 1..307: note = Related to NZ_CP028926.1
MNILSSISDKLLMNNSDLLEFSRTCPHRYKIYTIPKRNSKKKRVIAQPSKELKFIQRILIQNLENKLPIHNMAFAYRKGISIKNNAQKHLYNDYLLKMDFKDFFESITPKIFFRELEKHKIILSSEDIKFLTGVIFRKEKNELLLSIGSPISPLISNFVMFSFDKIVYELCLKKEITYTRYADDITFSTNRKNILFNIPSMIEDVLLANYEGEIILNKEKTRFTSKAHNRHVTGVTLSNENKLSIGRTKKRELIVALHYFINNKLDIDSIEKLRGELAFAFYIEPDFKNRLIKKYGQNSLDRIRHNN

SEQ ID NO: 4201 - protein, 309 aa, Haemophilus parainfluenzae
  source 1..309: note = Related to NZ_CP063116.1
MNIVDYLSDLILMDRRELLKFSSTSPYRYKVYEIPKRNSNGKRTIAQPSKELKYIQRALLKFFDGVIPIHDSVFSYKKGISIKDNACCHVNYKYLLKMDFKDFFPSITPSILFNEFEKYKLYFNDDDKKLLSGLLFWKKNRKNDFLQLSIGAPTSPFISNFILYSFDKAISDICSEKNVVYSRYADDITFSSNVKNVLFEFPKIVIELLYQLYNGNIKINKDKTVFSSRAHNRHVTGITLSNDGFLSIGREKKRKLSSCFHYYITRKLSKIEIDKLKGELAFAFYIEPDFKNRLMGKYGEKTLELLMRE

SEQ ID NO: 4202 - protein, 309 aa, Cricetibacter osteomyelitidis
  source 1..309: note = Related to NZ_SLYB01000005.1
MTILDILMDTLLLDMQELKKFASTSPYRYKVYQIPKRNSKKKRTIAHPSKELKFIQRALNGILSNILPVHEAVFSYKKEVSIKDNAQKHLKSQYLLKMDFKNFFPSITPEIFFDQLDKNNISYSVEDREIISRLLFWKPSRYKEYLSLSIGAPSSPLISNFIMYSFDKKINDYCNNINVTYTRYADDITFTTNVRNILFDIPNEIKKILLEEFSGKIIINNKKTIFSSKANNRHVTGIRLTNDNKLSIGRNKKRVLSSKVHHYSLGKINDDEAKKLQGELAFTFYIEPEFESKLIKKYGLETLLKLNKI

SEQ ID NO: 4203 - protein, 309 aa, Aeromonas media
  source 1..309: note = Related to NZ_AP022188.1
MSIVDYVCDALCIEKMQLMHFAVTAPHRYKKYEIPKRSGNGTRTIAQPSKQLKFIQRIIISELEKILTPHPSAFAYIKGISIKDNAEMHVKNRYLLKMDFKDFFPSITPDLMFQEYARFGVTFSPEDSALLSNILFFKLRKNSKLKLSIGAPSSPFISNIIMRHFDAVISELCQHKKISYTRYADDITFSSNIKNVLFEIPEAITVALKKEGYKCIKINKEKTVFSSKRNNRHVTGITISNEDKLSVGRTKKRILTAAVHKFSLGYLSESDIEKLKGELSFVFFVEPAFKDRLIKKYGYDVCHKLWKHA

SEQ ID NO: 4204 - protein, 309 aa, Aeromonas veronii
  source 1..309: note = Related to NZ_AP022264.1
MSIIDYVCDALCIEKTQLIQFAVTAPHRYKKYDIPKRSGNGTRTIAQPSKQLKFIQKIILLKLEKLLTPHQSAYAYVKNKSIKDNATVHINNRYLLKMDFKDFFPSITPELMFQEYARFGIMFSNDEQTLLSNILFFKLRKNSKLKLSIGAPSSPFISNIVMRHFDTVVSELCENKKIKYTRYADDITFSSNIRDVLFEFPQIIANTLKNEGYHDITLNIEKTIFSSKRNNRHVTGVTLSNDGNLSIGRDKKRLLSASIHTFSLGKLCEKDIEKLKGELAFAFYIEPEFKIRMLKKYGSSTCSRLWKVD

SEQ ID NO: 4205 - protein, 310 aa, Aeromonas enteropelogenes
  source 1..310: note = Related to NZ_JMGO02000012.1
MNIVSYVCDTLCIDEKQLMLFAATSPHRYKTYEIPKRSGNGTRTIAHPSKQLKFIQRLVISQLEKIVSPHKAAVAYIKGLSIKDNAILHAKNSFLLKMDFKDFFHSITPELMFQTYEQLGVSFSIKEREFLSNILFYKVRKNSHLRLSIGAPSSPFISNIVMHHFDDSMSKYCSEKEIIYTRYADDLTFSSNIKGILFHLPDEVRFHLDETGYKSIVVNIEKTTFTSKKHNRHVTGITISNDSTTSIGRQRKRNLSAAIHKFSLGNMTEDEIEKLKGDLSFAFFVEPDFKLRMKQKYGEKIYGMLFKKNS

SEQ ID NO: 4206 - protein, 312 aa, Alteromonas flava
  source 1..312: note = Related to NZ_PEAX01000003.1
MSIFDSIVDSLCTSPEHLRNFAATSPYRYKVYDIPKRSGSGKRKIAHPAKQLKYIQRLAVHELEKFFTPHESAFAYVKGKSIRDNAKVHVRNEYLLKMDFKDFFPSITPELFFAQVEKLGTTFCDEDKVFLSNILFYKLRSYSKLRLSIGAPSSPFVSNIVMREFDIKISEFCKTKSIAYSRYADDLCFSTNISGLLFELPKLVTKTLKSNGYAELKMNRSKTVYSSKGHNRHVTGVTLSNDEKLSVGRSKKRETIARVHHYLNGRLTPEQVESLQGYLSFVFHIEPEFKIRLHKKYGNEAIEMLLSERKID

SEQ ID NO: 4207 - protein, 310 aa, unidentified
  source 1..310: note = Related to DQNK01000125.1; note = Gammaproteobacteria bacterium
MVKIVNFISESLCIEESELISFAHTAPHRYKIYTIPKRSGNGRRTIAHPSKQLKFIQRLTLRLLQDVLPIHESALAYKKSISIRDNANIHRKNQYLLKMDFKDFFPSITPSLLFRELERKNIIVSDEDKNFLASILFFKLRSNSSLKLSIGAPSSPLISNFIMHHFDQILSSECKKMKICYTRYADDITFSTNIKDSLFKIPSIVKNILKNEKYPELKVNEEKTVFSSKAHNRHVTGITITNEGALSVGREKRRLLSASLHRYIEGKIDGETKNTLKGQLSFAFFIEPQFKIRLQKKYGERALEKLFSNE

SEQ ID NO: 4208 - protein, 311 aa, Alishewanella sp.
  source 1..311: note = Related to JAEINI020000025.1
MNILNSVSKESGLSVTDLLAFSKTCPHRYKVYFIAKRNSDAKRVIAQPSKEVKYLQGAVIKIFKSFDLVHEAAFAYKDGINIKQNAQVHANQKYILKMDFKDFFPSITPDLLFSQLNIAKVFLSEKDKEFLSGLLFWKRRRNSKLRLSIGAPSSPLMSNIVMYFFDSYIESYCRLNRIRYTRYADDLCFSSSMAGGLDSVKDTVNKALRSFFGRKIRLNTAKTIFASKAMNRHITGITLTNDGKLSVGRDRKREIIAAVHKVSQGNSPDCSLKTLAGLISYVHSVEGDFKDRLIKKYGEVIVQKIFDSLRE

SEQ ID NO: 4209 - protein, 315 aa, Acinetobacter sp.
  source 1..315: note = Related to NZ_CP055277.1
MIELNLLKSLNTDFPLGEDNILSFARTAPHRYKTYEILKRDGVSKRKIAQPSKEVKLLQRSALKVLEPILPVHPLAFAYTKARSIKHNALIHKESKFILKLDLTNFFNSITPKLLLEKFHTANISLTHNDQDLISHLFFWKEKRNESPKLSVGAPSSPLLSNFIMYNFDTKIIEVCKKNGCLYSRYADDITISSTENFYQLNLPFIIAKILREEFGESITLNNTKTKYISSAYRRQVTGVILTNDQDISIGHRKKRLLSSKIHHFKIQRLLDPNEIQKLKGELAFAFYIKPELRKKFEIKYGQNTITKILKYKRL

SEQ ID NO: 4210 - protein, 313 aa, Acinetobacter sp.
  source 1..313: note = Related to MVON01000005.1
MIELNLLKFLNIEFPLGEENIISFVNTAPHRYKTYEILKKDGKNKRKIAQPSKEVKLLQRSALKLLEPILPIHDLAFAYTKNRSIKNNAMIHQNSKFILKTDLSNFFNSITPKILLEQIRKTNISVSSKNEELVSNLFFWKETRKDGLKLSIGAPSSPLLSNFIMYNFDNKIVEVCKQYDCAYSRYADDITISSSKNFYELNFPLIIKKILLEEFGESIKLNSNKTKYISKAYHRNVTGITITNDGSISIGSNNKRLLSSKIHHFKNNKIKDTNEIFKLKGQLSFAFHIRPQLKEQFEKKYGKDTIYKILKYK

SEQ ID NO: 4211 - protein, 315 aa, Acinetobacter bereziniae
  source 1..315: note = Related to JADWNN010000006.1
MKELNLLNLLNLEFPLGQDNILSFSRTAPHRYKTYEILKKDGISTRKIAQPSKEVKLLQRSAIKILESNFPVHYSAFAYVKNRSIKQNAIIHQNSNYIFKTDLSNFFNSITPLIFLEKIKQNNIILSDKNSQLITHLFFWKENRNDSLKLSIGAPSSPFISNFIMFNFDEKILEICKKHNCEYSRYADDITISSRNNFFELNFTSIITALLNEEFKGNIKLNTKKTKYISKAYHRNITGITITNDHNISIGHRKKRLLSAKIHHFKNNKIKNQSDILKLKGELAFAFYIMPHLREKFENKYGNDTILQILKFKTD

SEQ ID NO: 4212 - protein, 335 aa, Acinetobacter equi
  source 1..335: note = Related to NZ_CP012808.1
MSNFLQKLKQFVYQLFNSKSEKNVLKISYPTNINQQKFKNKKSFLDFAYSAPYKYKNYYIPKRNSTQKRLISQPTAELKFVQKDVINQLSAFLPIHNCAYAYVKNRNIKDNAELHRHSNYVLKLDFKHFFHSIRPKILFNQLEHHQIKLSEIDQTILSFIFFWREKKDSPLKLSIGAPSSPVLSNFIMYRFDEMLNQLCEKHQCIYSRYADDITISSKYHFYDLNFPQHVQNLLDQEFQGKIKLNTQKTKYLTRKHRRFVTGITLTNDAKLSIGRQQKRLLSAKIHHFKINKLNDEQQILSLKGQLAFAFYIQPELKVQFSRKYGEELLHKIMSD

SEQ ID NO: 4213 - protein, 301 aa, Acinetobacter baumannii
  source 1..301: note = Related to DADAZD010000003.1
MSDSELFDLAKTCPHRYKVYEIDKKNGGKRLIAHPSKELKYIQKLILDILKANLSIHHSAYAYVAEKNIKENASLHVNNSYLLKMDFKDFFPSITPGLFFDECEKHNIFFSKEDKDLLANILFWKKKHAKKLVLSIGAPSSPFISNFIMFSFDALISEYCNTNGIKYSRYADDLTFSTNKKEKLSKLPKLISEKLNSLYRKSIRINIEKTTFVSKACSRKVTGLVITNNNTISIGRERKRQISAMVHQYSIGKMTNSKDIEKLVGLVNFAIYIEPQFLNFLLKKYGREIVNSIYKLKNKNK

SEQ ID NO: 4214 - protein, 312 aa, Acinetobacter seifertii
  source 1..312: note = Related to NZ_CP061828.1
MNIDIKRHLRNNLFISDLEIFELSKTCPHRYKVYEINKKNGGTRTIAHPSKELKYIQTLIINVLKTQLPIHRCAFAYVAGKNIKENALLHVKNPYVLKMDFKDFFPSITPGLFFNECEKHSLYLSKEDQQLIANFLFWKKKRAHKLILSIGAPSSPFISNFIMYSFDVVVNEYCSEKGIIYSRYADDLTFSTKQAGLLSHLPKIVSEKLNSLYKKSIRINSEKTTFVSKAHSRKVTGLILTNQNNVSIGRTKKRNISAMVHQYKIGKIIDKKEIEKLIGLVNFAVYIEPDFLNFLIKKYGKDTISKIYKIDT

SEQ ID NO: 4215 - protein, 301 aa, Acinetobacter sp.
  source 1..301: note = Related to NEGC01000003.1
MSEKELFNFSKTCPHRYKVYPIPKKNGGERIIAHPAKELKYIQRVIVKILKTKLSIHHSSYAYMNNISIKDNAALHSNNDFILKMDFKEFFPSITPLIFFNALNTQNIHLSKIDSALLANFLFWKPYRKQKLVLSIGAPSSPLISNFVMYEFDNQISSLCRNLNITYSRYADDLTFSTQEKNVLYVLPKQIQQILNTTYKKGIRINPEKTSFISKAFQRKVTGLILTNENNISIGRDKKRLISSMLHKYKIGLNTQKEDIEKLTGLLSFAFYIEPHFKESMIRKYEIDTINKLFKNKENPS

SEQ ID NO: 4216 - protein, 312 aa, Providencia rettgeri
  source 1..312: note = Related to NZ_JAGKLI010000001.1
MSLLQFIANGLYITEDEAIRYIVTIPRRYKKFNIRKRNSNEFRLIAQPAKQVKSIQRIVLKYVISDFHVHERAFAYESYKDIRKNALVHHNNDYILKMDFKNFFPSIRPFHLMNCFANMNIKLDEMDFFVIENLFFWKPRRNSPLQLSIGAPSSPKISNVIMYSFDCEIFSRCKEMGIEYSRYADDLTFSTTKKGILFDIPKIVREILNEVNLKSIKINHEKTIFSSKKFNRHVTGITITNDGGLSLGREKKRILRSKIHHYICGVLPDVEILKLRGELGYAKFIEPSFFKAMVNKYGYDVIDSIAKYGNCS

SEQ ID NO: 4217 - protein, 312 aa, Proteus mirabilis
  source 1..312: note = Related to CP049941.1
MNLLQFISNGLYLTDDEAISYIMTIPRRYKKFYIKKRSSQEYRLIAQPARQVKSLQKVVLKHIDKHFHVHENAFAYEYNKDIRKNALLHSKNQFILKMDFKNFFLSIKPILLKKYFNEIGIELDKKDIIVIENLFFWKLRRNSPLRLSIGAPSSPKISNVVMYFFDCEISKKCKQLGIEYSRYADDLTFSTNINNILFSIPKIVRETLNQVGLNDIKINHKKTVFSSKKFNRHVTGVTITNDKKLSLGRERKRLLRSKIHHYTCGILSETEILKLRGELGFAKFIEPTFFESMVNKYGYKVIKSITTYGNLS

SEQ ID NO: 4218 - protein, 310 aa, Morganella morganii
  source 1..310: note = Related to NZ_CP025933.1
MNLLQFIANGLYLTEDEAMRYIVTIPRRYKKFYIRKRNGIDYRLIAQPARQVKFLQKATLKYMGKYFHIHESAFAYKSGKDIRKNALVHCNNEYILKMDFKNFFLSIKPIHLKNYFSRMGITLDEKDIFVLENLFFWKLRRNSPLRLSIGAPSSPMLSNVVMYLFDVEINNQCEALDVTYTRYADDLTFSSNVKGILFDIPKIVKEVLTKVNMKGIKINREKTVFSSKKFNRHITGVTITNNGTLSLGRERKRLLRSKIHHYICGLLPDVEILKLRGELGYAKFIEPKFFESMMSRYGYEIIESIAKYGN

SEQ ID NO: 4219 - protein, 310 aa, Salmonella enterica
  source 1..310: note = Related to CP074281.1
MELLSYISKGLFLSEEEAKRYIVTIPRRYKKYPIAKRNGNGYRLIAQPARQVKALQKAVINHMLANLKVHENAFAYEADKSIRSNALMHCNNDYLLKMDFKNFFMSIKPHNLLSVLKEYGVELTGTDIFVLENLFFWKLRRNSPLRLSVGAPSSPIISNTVMYFFDEEISKRCKELDITYSRYADDLTFSTKIKGALFDVPKLVREVLNIVNLRNIKINHEKTVFTSRKFNRHVTGVTITTEGYLSLGRDRKRLLRSKIHHYVCGVLSEKEILTLKGELGYAKFIEHKFFLSMIKRYGNAVISEISKYEI

SEQ ID NO: 4220 - protein, 310 aa, Klebsiella quasipneumoniae
  source 1..310: note = Related to NZ_CP033901.1
MELLNYIANGLFLSDEEARKYISTIPRRYKKYHILKRNGKAFRLIAQPARQVKSLQSAVLNHISDVLQVHESAFAYESSKGIKANALIHCRNDYLLKMDFKNFFLSIKPFNFLRNLKEFGIELNETDVFVIENLFFWKLRRSSPLRLSIGAPSSPKISNVVMYFFDEKMTKKCAALGITYSRYADDLTFSTKVKGVLFNVPKIVREILNEVSLRNIKINHEKTVFSSSKFNRHITGVTITPDGHLSLGRERKRLLRSKIHHYVSGVLSPKEILTLKGEMGYAKFIEHSFYQSMINRYGVAVIDAIAKYEI

SEQ ID NO: 4221 - protein, 310 aa, Pantoea stewartii
  source 1..310: note = Related to NZ_CP049115.1
MELLSFISNGLLLTEAETKKYISTIPRRYKKYQIPKRNGHGNRLIAQPAKQVKLLQKAVLNFICEHLQVHESAFAYEENKSIRANALIHCSNQYLLKMDFRNFFLSIKPHNLINYFQTKGVVLTESDIFIIENLFFWKLRRNSPLRLSIGAPSSPKLSNVIMYNFDEKISLKCSKMNIIYSRYADDITFSSHVKGSLFEIPRIVRETLNEVNLKNIKINHQKTVFSSRKFNRHITGVTITTEGHLSLGRVRKRLLRSKIHRFINEKLTSKETASLKGELGYAKFIEYSFYQSMIDKYGFDTINKIAKFPQ

SEQ ID NO: 4222 - protein, 310 aa, Escherichia coli
  source 1..310: note = Related to ABCQBJ010000001.1
MNLLQYIANGLFLTEDETKRFIITAPRRYKKFTIAKRNGLDRRLIAQPARQVKSIQRAVLKHIRENIKVHEHAFAYEKERDIKKNASLHKDHDYLLKMDFKNFFLSIKPVNLLNVIKMQGISLENDDVFVLENLFFWKLRRNSPLRLSIGAPSSPFISNAVMFFFDTVMSEKCKKIEVTYTRYADDLTFSTNRKNVLFEVPRLVREILNETSLRNIKINHEKTVFSSKKFNRHVTGVTLANNGVLSLGRERKRLLRSKVDYYRKGLLSPEEILTLKGELGNAKFIEPEFIERVESKYGSDVIREIQKYNI

SEQ ID NO: 4223 - protein, 310 aa, Dickeya sp.
  source 1..310: note = Related to NZ_CP023484.1
MSLLKYIADGLFLTEEETKRFIITVPRRYKRFTIAKRKGLERRLIAQPARQVKSIQRAVLKYIRDEIKVHECAFAYEIDRDIKKNAFLHKDNSYLLKMDFKNFFLSIKPINLLNVIKRHGIELEGNDIFVLENLFFWKLRRNSPLRLSIGAPSSPFISNAVMFFFDKMLSEKCEQMGVVYTRYADDLTFSTNRKNILFGMPRLVREVLNETNLRNIKINHEKTVFSSKRFNRHVTGLTLANNGVLSLGRERKRLLRSKVDHYKKGLLSPKEILILKGELGYAKFIEPVFIERVKQKYGRDVVHQIQKYNI

SEQ ID NO: 4224 - protein, 312 aa, Dickeya undicola
  source 1..312: note = Related to RJLS01000002.1
MKLLEIISKGLYLTEDEAKRYIATMPRRYKRYHIAKRNSDKKRLIAQPARQVKSIQRSVISIIHDEILIHENAYAYASGRDIKKNAEMHRKNKYILKMDFKNFFLSIKPHNLFHVFERQGIILDDEDFFVYGCLFFWKQRRNSPLRLSIGAPSSPFISNAIMFFFDDVISNKCKEMDVSYTRYADDMTFSTNNKGILFDLPKLVRNTLNDVGLKNIKINHEKTVFSSKKFNRHVTGVTITNDEALSIGREKKRLLRTKIDYYRKGLLNPGEVMKLKGELGFAKFIEEGFIERMIKKYGIELIESIKKFEINE

SEQ ID NO: 4225 - protein, 311 aa, Pluralibacter gergoviae
  source 1..311: note = Related to JZYL01000045.1
MSLLEKISNGLMLSKADAKNYISTIPRRYKVYTIKKRNSEETRLIAHPSKQVKSLQRAMLTYFKDKLPVHSSAYAYISGKSIKENAERHVNNSYILKMDFRHFFLSIEPLHFINVIYNHGFELNEEDKFVIWNLFFWKRRSNSPLRLSVGAPSSPFISNAIMYFFDEAISETCAKMNVTYTRYADDLTFSTNNEDILFNIPRMVKGILKANGLSKIKINEAKTVYSSKKFNRHVTGVTLSNDGCISLGRERKRLLSSKIHHFSQGRLSDVEVLKLKGELGFAKFIEPLFIERMSIKYGLDIINHIQKFNPS

SEQ ID NO: 4226 - protein, 311 aa, Citrobacter braakii
  source 1..311: note = Related to JADVIA010000001.1
MTLLEKIANGLMLSKDDAKNYVSTIPRRYKVYTINKRNSEEKRLIAHPSKQVKALQRAFMSGFKKNIPIHSSAYAYENERDIKKNALQHVSNPFLLKMDFRHFFLSIEPRHLIKVMNDHGFELNDEDKFVISHMFFWKRRSNSLLKLSIGAPSSPFISNAVMYFFDEALSIACKDIDVVYTRYADDLTFSTCQSGVLFGVPKMVKNILKANGLSKIKINEKKTVFSSKKFNRHVTGVTLNNEGAVSLGRERKRLLSSKIHHFCNDLLDEDETLKLKGELGFAKFIEPSFVEKMKNKYGVDIIMAIQKYNPN

SEQ ID NO: 4227 - protein, 309 aa, Serratia marcescens
  source 1..309: note = Related to MVGB01000005.1
MKIVNFISDKFFMPEQEVRNYLRTVPRRYKQFTIDKRNGEPRLIAQPAKQVKALQVSVLSELKRYIPIHECAYAYQSGRNIKANALLHAKNSYLLKMDFKNFFLSIKPEVFLNVLSKHGIAVSEDDALSIANLFFWKLRRNSPLRLSIGAPSSPFISNATMYFFDSYLSAECKKIDVDYSRYADDLTFSTKTKGILKDIPLLVKKALEMNDLKTIKINNSKTVFSSKKFNRHVTGITLNNNGDISLGRNKKRFLSSRIHYYSLGLLNNDDILELKGLLGFANYIEPIFLERMKVKYGDDLIVSIQKYIG

SEQ ID NO: 4228 - protein, 310 aa, Yersinia kristensenii
  source 1..310: note = Related to NZ_CABHXL010000034.1
MNLFGIVSNSLFLSDMEIRNYVSTIPRRYKRYSIPKRNGIEFRIIAQPAKQVKVLQRIVLPFLQQIIPIHGNAHAYEKNKSIKTNALVHSKNEYLLKMDFKNFFLSIKPNDFIDIMKKHEIKITDDDKFIIENLFFWKLTRRSPLRLSIGAPSSPFISNAVMYFFDEIISHECEALDVKYTRYADDLTFSTNVKDILFLVPKIVKGVLKSSGLKNIKINTNKTVFSSKKFNRHVTGITLTNDGEVSLGRERKRVISVRIHYFTLGLLSTDDILKLKGDLGFAKFIEPEFIYRMERKYGLENIEKLRKFMG

SEQ ID NO: 4229 - protein, 310 aa, Rahnella variigena
  source 1..310: note = Related to NZ_CACSJK010000006.1
MTIVEYISQGLFISESEFVSYTNTMPRRYKQFYIKKRNGEDRLIAQPAKTVKNLQLTVVGLLRDELRIHPAAMAYVKGRSIKDNAQKHVHNQFLLKMDFKNFFLSIKPAMFLMCLKKQGVNLDERDEHVISNIFFWKLRRNSTLRLSIGAPSSPFVSNVVMYYFDEAVESLCRMLGVVYTRYADDLTFSTNKKNVLFELPSVVKNVLNDVGLKAIKVNKDKTVFSSKKFNRHVTGVTLNNSGELSLGRERKRTISAMIHHHKLGLLNNEDVTKLKGYLGFAKYVEPLFLTRMERKYGEQLISQIQKFIPG

SEQ ID NO: 4230 - protein, 309 aa, Enterobacter cloacae
  source 1..309: note = Related to JAJFTC010000002.1
MDIVEFLAQAVFLSEKEFVSYVNTMPRRYKQFYIKKRNGDDRLIAQPARTVKTLQLTVVGMLQHDLKIHDASMAYVKGKSIKDNALQHVNNQYLLKMDFKNFFLSIKPEMFLTCVRKQGLKLSERDSLILANLFFWKLRRNSSLRLSIGAPSSPFVSNVTMYYFDEMVSDICNEYGITYTRYADDLTFSTNKKGILFSLPPLIKDSLKQTGLNDIKINNKKTVFSSKKFNRHITGVTLSNDDKISLGRERKRMISAMVHHFKNEVLEVDEIYKLKGYLGFANYIEPMFIARLKRKYGENVIMQIQKFIV

SEQ ID NO: 4231 - protein, 309 aa, Pantoea agglomerans
  source 1..309: note = Related to JPOT02000001.1
MDIVEYLAQGVFLSEKDFLSYVNTMPRRYKQFTVKKRNGEDRLIAQPARTVKTLQMVVVSLLKNHLNIHEAAMAYVKGKSIKDNANAHVQNKFILKMDFRNFFLSIKPDIFLACIEKQGLILSDQDKMVLSNLFFWKLRRNSSLRLSIGAPSSPFVSNVTMFFFDELISKICKDKGIVYTRYADDLSFSTNQKDILFSIPALVKESLKVVGLKNIKVNNAKTVFSSKKFNRHVTGITLSNEGVVSLGRERKRSISAMVHHFTLGLLDKESIYKLKGYLGFAKYIEPSFVLRLKIKYGDEVVLKIQKFND

SEQ ID NO: 4232 - protein, 315 aa, Pectobacterium odoriferum
  source 1..315: note = Related to NZ_CP034938.1
MNILNQLSNTLFMDKDSLKSFISTAPRRYKKYTIPKRNGDGVRIIAQPSKQIKSLQRYAANLLSKHLRVHYAAHAYVRGKGIKTNAAAHRNSNYILKIDFKDFFHSITPDIFLKTLETNNNIIENEDKFIISHLFFWKLRGNSPLRLSIGAPTSPIISNAIMYCFDEELTNYCTEINVTYTRYADDLTFSSFHSLSLATIQSTVQRLLIKHYKRKIKINREKTIYCNKAMNRNITGVILNNENELSLGRKKKRMISSLVHKFSYSLLNQKEINYLNGILGHASHIEPQFIERLKEKYGHDVIAKIKKSITYAHIT

SEQ ID NO: 4233 - protein, 315 aa, Citrobacter braakii
  source 1..315: note = Related to JADVFW010000007.1
MSILNQLSATLFMDKDSLKSFISTAPRRYKKYTIPKRSGDGVRIIAQPSKQIKSLQRFTANLLSEHLKVHYAAHAYVPGKGIKTNAAAHKNSQFILKIDFKDFFHSITPDLFIKTLEANEANISEEDRFIIAHLLFWKLRGNSPLRLSIGAPTSPLISNAIMYCFDEELTNYCTDLNVTYTRYADDLTFSSFHGLSLATIQRTVQTLLIKHYNRKIRINRDKTIFCNKAMNRTITGVVLNNSNELSLGRKKKRMISSLVHKFSYSLLNQKEINYLNGILGHAFHIEPQFIERLQVKYGHDVIDKIKQSITYDDIT

SEQ ID NO: 4234 - protein, 315 aa, Pantoea ananatis
  source 1..315: note = Related to JAKZMT010000006.1
MSLLEQFSSALFMDRASLKSFIYTAPRRYKRYAIPKKNGNGFRTIAQPSKQIKSLQRFGISLLAIFLKTHYSAHAYVEGKGIKTNAAAHQGSDHLLKMDFKDFFHSITPDILMNTLDKNGGKEILDEEDRHIISHLFFWKLRGNSPLRLSIGAPTSPIISNAIMYDFDEEIADYCAELNVKYTRYADDLTFSSKDRESLTTIPNEVNIVLRKNFGSKIRINKEKTLHCNKSMNRSVTGIVLNNTNDSLSLGRKKKRMISSFVHKFSFSLLDQNEINYLNGILGHAAHIEPQFIERLKEKYGQDVIAKIKASIEYL

SEQ ID NO: 4235 - protein, 314 aa, Serratia fonticola
  source 1..314: note = Related to JAAAXN010000025.1
MSLLDHLSEVFFMDKASLKSFIFSAPRRYKKYPIPKRNGEGDRIIAQPSKQIKSLQRFTINLLIDYLKVHHAAHAYVSGKSIKTNAAAHRKNSYILKMDFKDFFHSITPDLFLKVLSDRDNDGKLTEEDSFLISNLFFWKLRGNSPLRLSIGAPTSPIISNTIMYDFDEELTNYCLELNIVYTRYADDLTFSSSDRESLSIIPIAVRRVLIKNFNRKIRINSGKTIFCSKAMSRNITGVVINNNCELSLGRKKKRMISSLVHKFSYSLLTQDEMNYLNGILSHAHYIEPAFIERLKSKYGSDVIDKIKHSITFP

SEQ ID NO: 4236 - protein, 313 aa, Vibrio sp.
  source 1..313: note = Related to NZ_CP049914.1
MTNLFETLQEQLSLSDDELLSYLHTVPLRYKRYYIDKRNSTEKRLIAQPSRTVKILQKYVASELEEVIPVHQSAMAYCKGRGIKENAKKHAHSRYLLKMDLKRFFDSITPTILSDVIMKHGIELSEKDYILVSQLFFWKLRRNSPLRLSIGAPSSPFVSNAIMYFFDEEISKHCEELNIVYTRYADDMTFSTNKKNVLFELERTVVKLLRLNFGKDIKVNKEKTVHSSKAHNRHVTGVTLSNTGKLSIGRENKRNIRVSIHRFINGKTNDRDVQNLKGNLGFAKHIEPEFVKSLEDRYGVETIKKIQTFDILP

SEQ ID NO: 4237 - protein, 310 aa, Vibrio europaeus
  source 1..310: note = Related to NZ_CP053541.1
MFQLFDTFREQLALSNDELSSYLHTIPFRYKRFYIDKRNSDEKRLIAQPAKAVKTLQRYAISEIEDELPIHSSAMAYCKGRGIKENALVHAKSRYLLKLDLKNFFESISPEILLSVISKHSIELCDNDKFLISNLFFWKLRRNSHLKLSVGAPSSPFISNVIMYFFDKDLAEKCNEMNVSYTRYADDMTFSTQDSNILYKIETIVRKLLKFHFDNKLTINRSKTVHSSKAHNRHVTGVTLDNHGRISLGRDNKRSLRAGVYNFTQGRLNKDEAMKLRGKLGFAKYIEPKFILRLEKTFGKDVIDELKKYN

SEQ ID NO: 4238 - protein, 314 aa, Aeromonas encheleia
  source 1..314: note = Related to NZ_LR134376.1
MTNIFRGLCEQLLMSENELKSYISSVPFRYKRYYIPKRNSNELRLIAHPAKVVKSLQRHAVSKLEPLLPIHKCAMAYCKGKGIKENAYQHKNNRFLLKMDLRDFFGSINPSIFLGVLKKHDLTLSKEDVFLLSNLFFWKLRRNSPLRLSVGAPSSPFVSNAIMYFFDKELHEYCNDNDIVYTRYADDMTFSTSKKDILFALEKTVKAFLKKNFGSFLRVNHNKTFHSSTAHNRHVTGITITNNKKISVGRNRKRKIRACVHSFKNGLLSNNDALKLKGELGFIKHIEPDFIINLTNKYGLDTIKKIQTFESVDT

SEQ ID NO: 4239 - protein, 314 aa, Pseudoalteromonas sp.
  source 1..314: note = Related to CP001796.1
MNIIERISEDLLMPEKELLNFSSTAPRRYKKYTIAKRNSDERRLIAHPSKEVKFLQRLLVTHLEDKLTIHASANAYVKQKGIKSNALAHKDNQYLLKMDFKNFFLSITPSILIEQMLAFGIGLDDRNIEFISGILFWKLRRNSPLRLSIGAPSSPFISNVIMYNFDRLIEKECKVMGITYTRYADDLAFSTNIKDILFEIPKLVKNTLKKLYGSKIRVNTKKTVFSSKKFNRHITGITLTNNNLLSIGRKKKRFISSLVHKYTLELLSDEEILQLKGLLSHVSNIEPLFIGRLSNKYGTNIMTDLAPSKFFIGN

SEQ ID NO: 4240 - protein, 314 aa, Vibrio parahaemolyticus
  source 1..314: note = Related to NZ_CAJOAG010000011.1
MNIIESISEALLMPEKELLSFSSTAPRRYKKYTIAKRNSDERRLIAHPSKEVKFLQRLLVTHMEDKLPIHDSASAYVKQKDIKSNAFCHKNNQYLLKMDFKNFFLSITPDILLEQMLSFGIKLDSNNMDFISGMLFWKLRRNSPLRLSIGAPSSPFISNVVMYNFDCIIEKECKHMGITYTRYADDLTFSTNSKNILFEMPKLVKKTLKELYGTRIRVNSDKTVFSSKKFNRHITGVTLTNNNLLSVGRAKKRYISSLIHKYTLSLLSEEEILQLKGLLSHASNIEPLLIGRLSKKYGVDVMANLAPKKFFIGN

SEQ ID NO: 4241 - protein, 311 aa, Vibrio splendidus
  source 1..311: note = Related to MCWA01000032.1
MSLISEISDDVLMTKDELLSFSFTAPRRYKKYHILKRNGNGLRLIAHPSKEVKFFQRLAISKLEILLPIHDCAIAYVKGKSIRDNAEAHRRNRYMLKMDFKNFFMSITPDLFISSLERNDINLEAQDIKFLEGVLFWKLRRNSPLRLSVGAPSSPFISNFVMTAFDIFMFGYCKDKGITYTRYADDLTFSTREKDLLFTIPKVVRDALKEYCNSKIRINSKKTVFTSKKFNRHVTGVTITNDEKLSLGRERKRLISAMVHHFVDDKYSLSHEEIQKLKGYLSFAKSIEPDFINRLSKKYGREYILKIQSFN

SEQ ID NO: 4242 - protein, 311 aa, Photobacterium carnosum
  source 1..311: note = Related to WMDC01000029.1
MSILSDISKDVLMTESEILNFSSTAPRRYKRYYILKRNGKDLRLIAHPSKEVKFFQRLVISKLDGKLPIHHCAMAYVKGKSIKDNADAHKKNKYLLKMDFKNFFMSVTPELFISSLKKNNIILDTNDLIFLEGILFWKLRRNSPLRLSVGAPSSPFISNFIMKSFDDYIFNTCKEMNVTYTRYADDITFSTNIKTLLFTFPVIIKNALKEHCDKKIRINSEKTIFTSKKFNRHITGITINNNNNLSLGRNKKRLISSMVHHFISKDHSLTADEILKLKGHLSFAHFIEPDFIQRLSDKYGNEEIINIIKHI

SEQ ID NO: 4243 - protein, 307 aa, Vogesella alkaliphila
  source 1..307: note = Related to NZ_BMYW01000013.1
MRISKKLADELLLDEAELRKFCATAPYRYKKYEIPKRNSDKTRLIAQPSKEVKFMQRLVVKYLRDILPVSRHAMAYESGTSIVKNASIHKNNPYLLKMDFKNFFLSITPSLFFGLMSDGGVEFSDDDKILLSNLLFWKLRRNSPLRLSVGAPSSPFISNVVMYHFDCLMESQCAAMRIRYSRYADDMTFSTRERDALSEMPGFVRSVLKRDYDGKIKVNSEKTIFLSKAKRRTVTGITITNDDTLSVGRDRKRNISAMVHHFSLGKLSAEEVQKLKGYLSFVAAVEPNFIYRMMSKYGNKVIEALFI

SEQ ID NO: 4244 - protein, 317 aa, unidentified
  source 1..317: note = Related to JACYUE010000003.1; note = Oxalobacteraceae bacterium
MSIFSTLADKLLMSEEELLRFALTMPRRYKKYEILKRNGIDTRQIAQPSRESKFIQRMIIDELRGVLRVHKAATAYEKETGIRLNALRHLNSRYLLKMDFKNFFPSITPELFFAVAESSGVDFEQADKVFLEHALFFRATRRSRLRMSIGAPSSPFISNFVMNTFDHAMMKFCVERNISYTRYADDLTFTTNEKNILFDLPKMVATLLAEYCFKKIRINSSKTVFSSKRFNRHVTGIVLTNNNELSIGRARKREIASLINSFRYGALSEDATLKLKGLMAHAYHIEPDFIARMKLKYSYEVVNAILRYPLAIQTLEQ

SEQ ID NO: 4245 - protein, 313 aa, Massilia violacea
  source 1..313: note = Related to NZ_JACHXD010000002.1
MSLASILANKLVMSNADLFGFVLTMPRRYKQYKIFKRNGIETRHIAQPSKEAKFIQRIIVEELRKLLPPIHKAATAYEPGTGIKANALRHLNSRYLLKMDFKNFFPSITPEFLFLAAESSGIKFDELDKILLENALFYKSTRRARLRMSIGAPSSPFISNFVMSGFDNDMFDYCAKRNISYTRYADDLTFTTNEKDVLFEIPKIVESTLINACFRKIRINSKKTIFSSKKYNRHVTGVVLTSDGQLSVGRARKREVSSLINSFKYGKLDEKERLHLKGLIAHVHHIEPDFIFKMRKKYSDEVVNSLMKPPTAG

SEQ ID NO: 4246 - protein, 315 aa, Alcaligenes sp.
  source 1..315: note = Related to JAKUDK010000002.1
MNLISKLTEKLMMTEEELLRFALTMPRRYKQYFIPKRNSNERRLIAQPSQEAKFIQRIIIAELRELLTVHKAATAYEKGTGIRLNAIHHVGNRYLLKMDFKNFFPSITPELLFMILRDCGIKYDDRDRTILEHALFFKSTRRSRLRLSVGAPSSPFISNFIMNIFDENLAAYCLQQGITYTRYADDLTFTCNKKGILFNVPDVVKQFSKEHCHGKIRINSSKTVFSSKAFNRHVTGIVLTNDNQLSIGRARKREIASLVNSFKYGHLDLDESSRLKGLLAYANHIEPDFIARMKTKYSADVIDAIFHLDSTQKDH

SEQ ID NO: 4247 - protein, 311 aa, Massilia sp.
  source 1..311: note = Related to NZ_CP086370.1
MNFLQHMCDKLFMSQDELINFARTMPYRYKKYRVGKRNGSGYRIIAQPSSEAKFIQRILLKELRRLLPVHECAMAYEPGVGIRKNAMRHLHSDYLLKMDFKDFFPSITPDLFFFFTKKIGLELGEKDKELLENVIFWKSTRSSYLKLSIGAPTSPFISNFVMHEFDKSMNQFCISKAITYTRYADDLTFTSNAKNILFEIPSLVSGHLKKDCLGLIKVNTKKTVFSSKAFNRHVTGIVLANDNSLSLGREQKRTLSSIIHRFSLGKLSEKETSRLKGHLSFAHHIEPKFIDRMKKKYGNDLIDLIFLHSCE

SEQ ID NO: 4248 - protein, 308 aa, Janthinobacterium lividum
  source 1..308: note = Related to NZ_CP048832.1
MMSILSFVSDALMIDKVEMMMFAQTAPHRYKKYFINKRNGAGVRLIAQPSKETKFIQRVVLSKLREILPVHRCAMAYEKSVGIKLNAMHHKDGRYLLKMDFRDFFPSIMPNMFLALAKDCGVEFSDEDKEFLSRILFFRSTRKSLLRLSIGAPTSPFISNFIMYKFDVAMAEYCQENGINYTRYADDVTFSSNVKGILFDVPDIVKKNLRQYCCGQIKINPLKTIFSSKAFNRHVTGIVINNDSSLSLGREKKRIYSSMIHKFSLGLMDEKERERLKGFLAYAIYIEPDFIERMKKKYSSDLIAAIML

SEQ ID NO: 4249 - protein, 314 aa, Pseudomonas aeruginosa
  source 1..314: note = Related to DAFPVK010000010.1
MSITTALCEKMLTGKSELLSFSHTVPRRYKTYYIKKRNSTEMRLIAHPAKTVKFIQRLAVEELRNYFPIHHCATAYEKGTGIKMNAFQHRRNQYLLKMDFKNFFLSITPELFFRVSEDLGVVFDSEDKALLEGLLFWRLRRNSPLRLSIGAPSSPFVSNLVMYKFDAALCEICESMGVVYTRYADDLTFTTNRKDVLFAIPDIVRQNLKAQCYSKIRINSEKTVFSSKAFNRHITGVTITNEGRLSVGRERKRLVSALIHKFTLGALSDQQIENLKGQLAHVKNIEPDFVVRMKKKYSDEAIAKIFAWKREGFL

SEQ ID NO: 4250 - protein, 312 aa, Pseudoalteromonas sp.
  source 1..312: note = Related to JAKFZQ010000002.1
MNFLSKLNDALMIGEKALLSFILTSPHRYKKYEINKRNGKGKRLIAHPSKQLKYIQRLLVKELEEQLPVHESAMAYKKGVGIKNNALAHKDSKYLLKMDFKDFFYSITPEMFFKATASKGLHYSESDKLVLSHLLFFRLNRNSPLTLSIGAPSSPLISNFSMNLFDEAISNYCAELEVTYTRYADDIVFSTNSKNALFSIPSKVEKTLKSECFGCVKVNTGKTVFSSKAHNRHVTGITISNEGKLSLGRDRKRKISSLVHKFGLGLLNVREINELRGLLAFASDIEPLFLARLRGKYGSKCLSSISNYKQEE

SEQ ID NO: 4251 - protein, 308 aa, Pseudoalteromonas sp.
  source 1..308: note = Related to NZ_LR877185.1
MDIMLLLKTMLVISESEILKFSATAPHRYKKYRIPKRNGNGKRRIAHPSKELKFIQRLIVNKLESILPVHDSAKAYKKGVSIKDNALAHKNTRYMLKMDCKDFFPSIEPQLFFKVASSCGINFSNLDKELLSNLLFYKLTRRSRLKLSIGAPSSPLVSNFVMYFFDAAIYEYCSELGVNYTRYADDLTFSTNRKEVLFEFPKVISEQLKKHCNGSIKVNSIKTVFSSKGHNRHVTGITITNDSKLSLGRSKKRTISSLIHKYSLGILTDEQKDCLRGHISFAKFVEPAFFIRMEKKYGKEVIQSIFSD

SEQ ID NO: 4252 - protein, 313 aa, Vibrio metoecus
  source 1..313: note = Related to NZ_LBGP01000014.1
MNLSEILASSLFMDDEEIRSFAASSPYRYKVYTIAKRNSQERRVIAHPSKELKFIQRLIVSLLEKRLPIHYTAKAYTKGLSIKDNAQPHMKSKYLLKMDLKDFFPSIKPSLFFRECRVHGVELSELDVELLEGFLFWKRRRATQLVLSIGAPSSPIVSNFILYRFDEVISEYCMRLGINYTRYADDLTFSTNEKDLLIKFPARVRKVLNHLYDGQIKVNLKKTVLSSKAHNRHVTGITLSNDGKLSVGREKKRKLSASIHHFIMKKLSVEEILKLKGELAHTTFIEPLFLERMIEKYGYDAINELKHFSDESS

SEQ ID NO: 4253 - protein, 313 aa, Vibrio echinoideorum
  source 1..313: note = Related to NZ_SMJS01000013.1
MNLSELLESFLFMEEEEIVSFAASSPYRYKVYSIAKRNSEERRIIAHPSKELKFIQRIIVDQLAGQLPIHNTAKAYMKGLSIKDNARPHAKYKYLLKMDLKNFFPSIKPSLFFKECRLHGVELSELDIDLLEGFLFWKRKRATHLVLSIGAPSSPLVSNFILYRFDEAISRYCKSLGINYTRYADDLTFSTNEKDVLLKFPAKVRKTLNYLYDGQIKINLRKTVLSSKAHNRHVTGITLSNEGKLSVGRETKRTLSASIHRFTQQKLSDDDILKLKGNLAHTVFIEPDFLDRMIKKYGRNAIYELKHYTPSSN

SEQ ID NO: 4254 - protein, 313 aa, Shewanella gelidii
  source 1..313: note = Related to BMPZ01000002.1
MNLSELLASLIFMDDEEIISFAASSPYRYKVYSIPKRNSEERRIIAHPSKELKFFQRVIVKQLSERLPIHSAAKAYTKGLSIKDNALPHANSKYLLKMDLKDFFPSINPSLFFKECRRHGIDFSDLDIELLEGFLFWKRRRATKLVLSIGAPSSPLVSNFILYKFDEDISRYCNSIGINYTRYADDLTFSTNKKDVLLKFPTKVRNTLNSLYDGQIKVNLRKTVLSSKAHNRHVTGVTLTNEGKLSVGREAKRNLSASIHSFTLQKLSNEEIFKLKGHLAHAEFIEPDFLERMVKKYGQEAIWELKHYTHSKN

SEQ ID NO: 4255 - protein, 312 aa, Shewanella xiamenensis
  source 1..312: note = Related to NZ_BLRF01000013.1
MNLSELLASLLFMDDEEIISFATSSPYRYKVYSIAKRNSSERRIIAHPSKELKFIQRLIIQQLTVILPVHKAAIAYTKGLSIKDNARPHANSKYLLKMDLKDFFPSINPSLFFKECKKNGIDFSDLDMKILEGFLFWKRRRTTNLVLSIGAPSSPLVSNFILFKFDEIISNHCAILGINYTRYADDLTFSTNEKNVLLSFPAYVRKVLNTLYDGQIKVNLKKTVLSSKAHNRHVTGVTLTNEGCLSVGRNKKRQLSAAIHYFSLKKLSNEDIFKLKGSLAHSVFIEPDFLLQMERKYGKEIIFQLIHYALDD

SEQ ID NO: 4256 - protein, 313 aa, Vibrio cholerae
  source 1..313: note = Related to JAEMEZ010000008.1
MSLFESLSMMLLMDEGELRSFALTAPYRYKVYTIAKRNSEERRVIAHPSKELKFVQRLIINQLEPKLPIHPSATAYIKGKSIKDNALPHVNSKYLLKMDLKNFFPSIKPELFFKECRHHGIELTDVDKSLLEGFLFWKTRRSNKLTLSIGAPSSPMVSNFILHRFDEKMSKLCLAEGVRYTRYADDLTFSTNKRGTLLSYQSKVRRIIGILYDGNIKINLRKTVLSSKAHNRHVTGVTLTNDGNLSVGREEKRKISAAIHHYSFNMLEHEDVLRLSGRLAHASFIEPEFLEKMIKKYGQDTISKLMKSGTEPV

SEQ ID NO: 4257 - protein, 309 aa, Vibrio campbellii
  source 1..309: note = Related to NZ_CP026321.1
MNLFESLSAMLLMDEKELRSFALTAPYRYKVYTIAKRNSDDRRIIAHPSKELKFIQRLIINMLLPKLPVHSAATAYIKGKSIKDNAIPHASKKYLLKMDLKDFFPSIKPDLFFKECRHHKIEISETDKSLLEGFLFWKTRRSNQLKLSIGAPSSPFISNFILYRFDEEVSKLCRAEGVTYTRYADDLTFSTNKKGVLLSYQSKVRRIIGTLYNGNIKVNLKKTVLSSKGHNRHVTGITLSNDGSISLGREQKRKISAGIHHFSLNLLEHEDVLKLGGKLAHASFIEPSFLEKMIKKYGQEAISRLMKTT

SEQ ID NO: 4258 - protein, 316 aa, Vibrio sp.
  source 1..316: note = Related to VHSP01000001.1
MNLSETLSTVLFMDEAELRSFASSAPYRYKVYAINKRNSDEKRIIAHPSKELKFIQRLIIKQLQPRLPVHTVATAYIRGKSIKDNALPHAKSKYLLKMDLKNFFPSIKPDLFFKECKHQGVPLSDSDKELLEGFLFWKSRRAKGLSLSIGAPSSPLVSNFILYRFDKAMNQLCQSEGVTYTRYADDLIFSTNKKGVLLAYPPKVRRLIGTLYDGNIKINLRKTVLSSKAHNRHVTGITLTNDGRLSVGRDDKRKLSAAIHHYASHMLTPEEVQILRGKLSYAVFVEPELLERLIRKYGKQVIADLQKVNPTLNLKS

SEQ ID NO: 4259 - protein, 315 aa, Shewanella sp.
  source 1..315: note = Related to JACJEU010000008.1
MSISKLLSKNLFMDELELRSFSLSSPYRYKVYKIPKRNSKELRTIAHPSKELKFVQRLIVRELGQLLPVSEAATAYMKGISIRDNALVHSNTRYLLKMDLKNFFPSITPEIFFNECLRAGVEFEQLDIDLLRGFLFWRPRRSKKLILSIGAPSSPLVSNFILNQFDENIINFCKTIGVRYSRYADDMTFSTDIKGVLFTFPLMIKKILKTLYGNSIKINQDKTVFASKAHNRHVTGVTLSNDGCVTVGRESKRKISASIHHFSLGILQPNNIIQLKGLFAHSTFIEPKLKNQMVEKYGIEIIERLMSYQPNDLKK

SEQ ID NO: 4260 - protein, 312 aa, Vibrio crassostreae
  source 1..312: note = Related to RKQY01000017.1
MNISTLLSEHLFLDDIELRSFADSAPYRYKVYKIPKRNSEELRTIAHPSKELKFVQRLIAKELSSVLPLHQASMAYRKGTSIRDNALVHSNSSYLLKMDLKDFFPSIKPELFFRECSRYGLEWTDLDKTLLNGFLFWKPRRAKKLVLSIGAPSSPLVSNFVLYQFDEHIANYCKELGVNYTRYADDMTFSTDRKDLLFKFPIQVRKTLKALYGSSIKVNLNKTVFSSKAHNRHVTGVTLSNEGKVTIGRERKRVLSASIHHFSLGVLGHDEILKLKGHFAHLIFIEPLVKEQMIKKYGSSLIGRLTSYQGSP

SEQ ID NO: 4261 - protein, 309 aa, Thorsellia anophelis
  source 1..309: note = Related to NZ_FOHV01000012.1
MNIEKYLSENLSINISALHSFSRTAPHRYKVYSIPKRNSKGERIIAHPSKELKFIQKMIIKKLTDILPLHESVISYRKKKSIVNNVIPHLNSSFLLKIDLKDFFPSIEPDLFFEQCKLLDIHFSDNDKKLLTGFLFWRNRKSSKLQLSIGAPSSPLISNFILYRFDDRITKLCASYNVNYTRYADDLSFSTISNSILLKLSEEISAMLQEIFQGRFLINHEKTIFSSKASNRHITGITITNSGEMSLGRNFKRNISACIHKFTLNQLPQEELLKLKGHLSFFKHVEPYFILRMESKYGKHILDKIRKSQ

SEQ ID NO: 4262 - protein, 312 aa, Leclercia sp.
  source 1..312: note = Related to NZ_CP088265.1
MTNNLKSLRKLLQSTLFLSDDLINIFITTAPYRYKIYEIDKRSSDEKRKIAHPSKELKLIQRIIVKELSNMLPVHDCAYAYRTGRGIKENALIHSKNSYLLKLDLSNFFNSLTPEIFFAECRRNNIDFDKDNASIISNCLFYREHRKSSLKLSVGAPSSPFISNVIMYSFDQIIETECRKREITFTRYADDMTFSTSIKNTLIGFDELIKKVLFDLFKGAISLNQDKTILSSKAHNRHITGITISNNDNISLGRERKRLISSAIHRFSYGKLDQEAVDKLKGLLAFAYYIEPSFIATMEKKYGRETINKLKK

SEQ ID NO: 4263 - protein, 315 aa, Serratia marcescens
  source 1..315: note = Related to CP020501.1
MSNNPKSFRKLLQSTLFLSDELINTFIATSPYRYKIYDIAKRNSDEMRRIAHPSKELKFIQRIIVKELSDLLPIHECAYAYRPGRGIKENALFHSKNSYLLKLDLSNFFNSLTPKIFFSECKRNNIFFDEDDTSIISNCLFYREHRKASLKLSVGAPSSPFISNAIMYSFDKRIEEVCNNKGVSFTRYADDMTFSTNTKNVLVGFDRIVKEVLFDIFKDAIFLNNDKTIFSSKAHNRHITGVTISNDDNISLGRDRKRYISSAIHHFSLDKLSENEIEKLKGLLAFAEHIEHSFVDRMVKKYGSDVMKKLKKTDK

SEQ ID NO: 4264 - protein, 312 aa, Pseudomonas arcuscaelestis
  source 1..312: note = Related to NZ_JADBHI010000015.1
MLILEELASKLLISTAELVKFVNTAPYRYKVYSIPKRSGRGLRTIAQPTEVLKVIQRMVLDSYLKGLPIHDCATAYRDGLSIKENAAVHLGSKYLLKMDFSDFFPSIGPSDLITHIKKHRKDIAREDAYAVRKIFFWATKKDPAHRLSIGAPSSPFISNTLMYEFDCKVFDECTRLGVRYTRYADDLTFTTNVRGILFELPDIVTKTCAEIGYPTLRVNQDKTVFSSKGNNRHVTGLVLTNDNKISLGREKKRYFRSLIHRYSLGGMSSEDIYALKGRLAFAKHVEPTFYYAVVQKYGAELIKSIMEYQILK

SEQ ID NO: 4265 - protein, 312 aa, Pseudomonas sp.
  source 1..312: note = Related to NZ_CP025261.1
MLILEELASKLLISTAELVTFVNTAPYRYKVYTIPKRSGRGVRIIAQPTEVLKVMQRMVLDSYLKGLPVHDCATAYRDGVSIKENATAHLDSKYLLKMDFSDFFPSISPSDLISHIKRHRGSVSREDAYAVKKIFFWARKKDPLHRLSIGAPSSPFISNTLMYEFDCKVFDECARIGVRYTRYADDLTFTTNTQGVLFGLLDIVNKICAELAYPTLRINSDKTVFSSKGNNRHITGLVLTNDNKVSLGRERKRYFRSLIHKYSLGELSGEDIYALKGRLAFAKHVEPTFYSAVIQKYGAELIASIMVFQILE

SEQ ID NO: 4266 - protein, 316 aa, Pseudomonas sp.
  source 1..316: note = Related to NZ_CP067098.1
MTILAYLSNKLLISSAELIGFVNTAPYRYKVYPIPKRSGRGVRIIAQPTDVLKVMQRMVLESFLVGLPVHHCATAYRDGVGIRENATEHLKSKYLLKMDFSDFFPSIGPKDLILHIKKHRGEISKEDAYAVKKLFFWTKKKDPVHKLSIGAPSSPFISNTLMYEFDCRIFEECARLEISYTRYADDLTFTTNKQGILFELPSLVVRICREIDYPTLNINADKTVFSSKGRNRHVTGLVLTNDDKISLGHEKKRYVRSLIYRYSLGGMSSDEIYSLKGMLAFAKHVEPSFYQSVVRKYGEAVVGSIVSFQLIKQVAQ

SEQ ID NO: 4267 - protein, 312 aa, Pseudomonas sp.
  source 1..312: note = Related to DORR01000095.1
MTILTELSQKLLISSEELKEFINTAPYRYKVYPIPKRNGRGVRVIAQPTEVLKAMQRMVLDDFLAGLPVHACAMAYRDGLGIKDNASLHVKNQYLLKMDFSDFFPSIGPDDLISHIRRHREGIGREDAYAVKKLFFWARKKDPTHRLSIGAPSSPFISNTLLYDFDCRVNDECTRLGIIYTRYADDLTFTTNNKGVLFGIPDFITHICKLVDYPTLKVNHEKTVFSSKKNNRHVTGLVLTNDNKISLGHDKKRHIRSLIYKYSLGGIPSEEILALKGMLAFAKHIEPVFYQAVMRKYGFHVLDSIMSFQPKE

SEQ ID NO: 4268 - protein, 313 aa, Pseudomonas azadiae
  source 1..313: note = Related to NZ_JAHSTY010000001.1
MTILADLAKKFLISSVEIAHFVNTAPYRYKVYTIPKRSGRGVRVIAQPTDVLKVMQRMVLETYLVGLPVHNCAVAYKEGQGIKENAIAHVNNQFLLKMDFSDFFPSIGPQDLISHIKKHKGQISREDAYAVKKLFFWARKKDPTHRLSIGAPSSPFISNTLLYEFDCLVSHACSKLGVVYTRYADDLTFTTNEQGVLFDVPVFIFKICDAVEYPRLKVNSDKTVFSSKANNRHVTGVVLTNDNKISLGHARKRQIRSLVYKYSSGEMTTEEVYSLKGMLSFARHIEPTFFQGLIRKYSYEVVGSIVRFESIKA

SEQ ID NO: 4269 - protein, 321 aa, Pseudomonas fluorescens
  source 1..321: note = Related to LKEF01000044.1
MSILELLSQKLMMSSSELRLFIKTAPYRYKVYPILKRSGKGIRLIAQPTDVLKMMQRMVADESLSGLPVHACATAYREGLSIKDNAEAHAKNQYLLKMDFSDFFPSMGPSDLVKHIEKHKGSITAEDAYMVKKLFFWARKKDPIHRLSIGAPSSPLISNTLMYDFDCALQEYCDKLSITYTRYADDITFTTNTKEILSAIPNYIEGLCERISYPKLKINNQKTVFSSKKNNRHVTGLVISNEDKVSLGRERKRYIRSLIHKSIAEAMTSEEIYNLRGLLAFSKHVEPTFYQSVIKKYGQPAIYFIETFQSAQKAAKVINKT

SEQ ID NO: 4270 - protein, 311 aa, Pseudomonas syringae
  source 1..311: note = Related to FOQB01000015.1
MSILELLSQKLMMSTSELRSFIKTAPYRYKVYPVPKRSGKGVRIIAQPTDVLKMMQRMVADEFLSELPIHACATAYREGLSIKDNAEAHVKNQYLLKMDFSDFFPSMRPSDLVKHISKYKGSITAEDAYMVKKLFFWARKKDPIHRLSIGAPSSPLISNTLMYEFDCILQEYCDKLSVTYTRYADDITLTTNIKGVLLGVPNHVKELCGHIAYPTLKVNDAKTVFSSKKNNRHVTGLVISNEDKVSLGRERKRYIRSLIHKSVVGDMTNEEMYNLRGLLAFARHIEPTFYDAIAKKYGLSAIYFIETFQPA

SEQ ID NO: 4271 - protein, 325 aa, Pseudomonas shahriarae
  source 1..325: note = Related to NZ_CP077085.1
MSILESLSQKFMISANELRSFIKTAPYRYKVYPIPKRSGKGFRLIAQPSDVLKMMQRMVLEEFLSELPVHSCAAAYREGLSIKDNAEAHAKNQYLLKMDFSDFFPSMAPADLINHIVKHKGAITSEDAYMVRKLFFWARKQDPTYRLSIGAPSSPFISNTLMYSFDCVLQDYCEKIGVTYTRYADDITLTTNVKGLLLNMPNYVRSICKEIAYPTLKVNEQKTVFSSKKSNRHVTGLVINNENQISLGRERKRYIRSLIHKSSLGGLTDEEMHNLKGLLAFAKYIEPTFYKSVLDKYGLPALYLIETFQSNPKVIESLEIKRQFP

SEQ ID NO: 4272 - protein, 311 aa, Pseudomonas oryzihabitans
  source 1..311: note = Related to NZ_VDNQ01000002.1
MSILESLANKLLIKPGELFSFIKSAPYRYKVYSIPKRNGRGMRIIAQPSEALKVMQRLVLDDYLMGLPIHNSATAYIVGKSIRDNALRHANNPYLLKMDFSEFFPSISPADLSLHVKKYKGVVSPEDEFMLRKLFFWAQKHDTRHRLSIGAPSSPFISNTLMYEFDSKLSRACSEKEVVYTRYADDLTLTTRNKDVLFSMPEFIAGLCQQIEYPRLQINSEKTVFSSKKHNRHVTGIVINNKNELSLGREKKRFIKSYIYRFSSDELSSVEIIQLRGLLAFAKHVEVSFYNALIAKYGLETVSRIERYQPV

SEQ ID NO: 4273 - protein, 312 aa, Alteromonas naphthalenivorans
  source 1..312: note = Related to NC_015554.1
MDIYNALSELLLIDEVEIVSYINKAPHRYKVYKIPKRNGSGSRVIAQPAKELKVLQKSALNMPLLDLPVHKSAFAYMEGIGIKQNAQKHSKNQYLLKMDFSDFFPSIVSSDLLSHVEKHKGKLEIKEKVALKKLFFWCVKGSTEHRLSIGAPSSPFLSNTILFDFDTIVNDYCTQEKITYTRYADDLTFTTNVSGVLFELPTYIEGVLKKLEYPTLKINHSKTVFSSKKNNRHVTGLVLTNDNAISLGRDRKRYIRSLVYGFCNKKLSDDESIKLRGLISFAKHVEPTFFRSLVKKYSLAVISDIERYYPDN

SEQ ID NO: 4274 - protein, 311 aa, Shewanella algae
  source 1..311: note = Related to JADZHD010000030.1
MDIYESLSEMLLIDESEIVEYINKAPHKYKVYEIPKRNGHGTRTIAQPARELKVFQKLSLEHPLLNLPVHDAAFAYRDGIGIKQNAEVHAKNQYLLKMDFADFFPSILDTDLITHIEKHHGKIDQRNKTAISKLFFWRKKRDIINRLSIGAPSSPFISNTLLYDFDEEISNICTPLMITYTRYADDLIFTTNEPGILSNIPNVVVETLKSIKVPTLRINPQKTVYSSKKNNRHVTGLVLSNDDKVSLGRTRKRYIRSLVFQYHSENLASDDIVKLKGLLGFAKHIEPTFYSSLINKYSLDLILSIEKYDPA

SEQ ID NO: 4275 - protein, 308 aa, Chromobacterium phragmitis
  source 1..308: note = Related to NZ_CP029554.1
MSIIKYLADQLLLSEEDIRLFIKKAPYKYKVFAIQKRNNHGERIIAQPAKELKSIQQMVLIEFLKELPIHSCAMAYRHGISIKDNAKVHSSNTYLLKMDFADFFHSIRPEDLIEHYEKYKAKLSADDRVSLKKIFFWASRKPPEIKLSIGAPSSPFISNTILFDFDSIVSKVCIAHEITYTRYADDLTFTTNIRDTLFDIPNLIARVIKDIDYPRLKINHTKTVFSSKRSNRHVTGLVLTNENQISIGRSMKRKIKTMIFLYSKKNLSPDDIKFLRGYLSHIHNVEPTFLHSLTKKFGTRIVTSIFHQ

SEQ ID NO: 4276 - protein, 314 aa, Hydrogenovibrio halophilus
  source 1..314: note = Related to NZ_KB913033.1
MSLIDFLKEKTGVHKSTLKSFVRSAPHRYKTFPIDKRNSDKKRLIAQPSRLLKKIQNLVVSEYEFLINLPIHPCVMSYVKGKSIRDNALVHKDSSYLLKMDFKDFFPSIKPSDLIEHIEKHKRVSLDDDEKDYLSRLFFYSQSRKEEIVLSIGAPSSPYISNTVLYDFDVTIAAECDSTGVKYTRYADDLTFSSNDKQSLINLHNAMESILSSLQYPKLALNTNKTTFLSKRVNRHVTGLVINNDGGVGIGRKKKREIKSLVHRYLNHSLEDERHPYLRGYLAYIWGVDKQFVAQLEAKYEISILDVVKQLEAD

SEQ ID NO: 4277 - protein, 313 aa, Thiomicrorhabdus sp.
  source 1..313: note = Related to JAKISK010000029.1
MSIVDFLVEKLVVPKSIVETLVLTAPHRYKTYEVTKRNGKGKREIAQPSKELKYIQRIVLKEFDLMQNLPIHDSAMAYRKNIGIQDNALMHKDNQYLLKMDFSNFFPSIVPTDLIKHIEKYKGLKLDEEDIKCLSRLFFYTKEKGSGLVLSIGAPSSPYISNTLMYDFDILLQKKCEQKNIVYSRYADDLTLSTNVPKILFDFPAVVNGILKEILTPKLLINDSKTVFLSKGTNRNVTGLVISNEGKVTIGRDKKREIKSMVYKYSLSHQLDPESEIPYLKGYLNYINGVEPSFLKSLEKKYGIDLIKLIRNS

SEQ ID NO: 4278 - protein, 314 aa, unidentified
  source 1..314: note = Related to BLYD01000277.1
MSILEGLSKKILLNEPDLWKFISSAPHRYKKYKIEKRNGKGFRDIAQPSKELKFVQNTAVFGIDLFQNLPIHHSAKAYIKKINIKDNAEAHKLNSYFLKMDFSNFFPSIKPVDFINHIEKHKNLTLSEKDKLIISKLFFYKKYRKSELVLSVGSPTSPYISNTLMYDFDDIVYKYCIEKKITYTRYADDLTFSTMTKVDLFEIPVFIKSTLNELLYPRILINNDKTVFLSKRTNRHITGLVITNDGKVSIGRKKKRYIQSLVYKYCNSNISEESTSYLKGYLAFCLGIDVDFVISLEKKYGKENIDSIRGLNKG

SEQ ID NO: 4279 - protein, 313 aa, unidentified
  source 1..313: note = Related to nan
MVTIIQDLSSLLSIDAERLRKYIATCPHRYKVYGIPKRNGSGIRTIAQPAKELKTLQKLVYEKYLESLPVHEACTAYRKNISIKDNALAHVKNNYLLKMDFLNYFPSITPKDLIKHIEKHLNWNEWEEDKFVIERLFFYVRNRGEGLRLSIGAPTSPFLSNTILYEFDSKITELCNLQNITYTRYADDIAFSTNKKDILFDFAGVVADILSQCEYPSISINPDKTVFLSRKGNMHITGLVLSNDRKVSIGRSKKRYIKSLVYRFLNNNLTEDEKLYLSGYLSFCVSVEPDFIEKLKSKYGANTINELMGRQSG

SEQ ID NO: 4280 - protein, 324 aa, Pseudomonas azotifigens
  source 1..324: note = Related to NZ_KE384408.1
MNIVSYLSQTLYIAENEVEKFINTAPHRYKQYQIPKRNNNGVRLIAQPAAELKIMQLLAIAQFQQFLPVHSSATAYCRGKGIMDNAKAHAKNSYLLKMDFKDFFHSIKPSDLIRHCSQHMGGIDDATAKQITKLFFWTPKRTSSLILSIGSPASPFISNTVMYQFDCLMSEICSEKGIVYTRYADDITFTTNVKGLLFQIPSLVIDICKKIDYPRLSVNSEKTVFSSKGNNRHVTGVTITNEGKLSLGRHKKRKIKSLVFDCLNNKLDSAERRSLSGLLAHAKHIEPSFFLSLTKKYGYSEIAKIASNKPTLEVVVANPLTICD

SEQ ID NO: 4281 - protein, 316 aa, Pseudomonas tolaasii
  source 1..316: note = Related to JACAOT010000014.1
MKIISFLSKTLYLPEHEVTAFINTAPYRYKEYSIPKRNGTGTRQIAQPSSEVKVLQTLAIEKIKNNLPIHSSAMAYREGLSIKDNASMHAKNKFLLKMDFENFFHSLLPHDLLLHTEKYYSSISEEDKKTLSKLFFWATKRDRKLKLSIGAPSSPFISNTLLYDFDEAVSNVCRPLDITYTRYADDLTFTTNTNKILFEIPDLIQKICETLTYPKLKINKGKTVFSSKKHNRHITGITITNEATLSLGRHRKRHIRSLVHQHMLGKLSSKQITELKGLLAFSKHIELTFYKTLVNKYGFKTLLDIQATQTKNSDTP

SEQ ID NO: 4282 - protein, 311 aa, Methylomonas albis
  source 1..311: note = Related to CAJHIV010000001.1
MILQFLSNLLNLEKREIIKFIASSPYRYKVYSIPKRKKGEFRLISQPSSQLKFIQKATLDHFFSDLPVHSSAMAYIKGKGIKDNALMHAGNAFMLKMDFQDYFPSIKPEDFVNHIKSSSQLRFSEEDEFVVCRLFFWSPVRGKPLVMSIGAPSSPFISNTVMYPFDEKVDSYCKNNGVIYSRYADDLVFSTCSPQILSLVPKFIEETIRLLSYPKLKINREKTVFSSKKHNRHITGLTITNESTVSIGRARKRYVSSLVHRYTLSQLDNAQIVYLKGYLAFCSDVEITFVKRLEKKYGESVISELLKNTGG

SEQ ID NO: 4283 - protein, 313 aa, unidentified
  source 1..313: note = Related to nan
MNILNKVSEMSGIPQDMCAKFIISAPMRYKRYEIPKRNGSGTRLIAQPSKIVKPLQKICIDQLRKTLPIHSAALAYEVGTSIKKNANKHRYNRYLLKMDFTNFFPSIKPDVLLRTFEEHGLVITEEDKFVLSSLLFWKPRRRAPNLELSIGAPSSPFISNAVMYFFDVAVTEHCSNRGIVYTRYADDLTFSTNIADTLFEIPNFLYDLVQQTNMSFLRFNTDKTVFASKKVNRHITGVTITNDGRLSLGRKRKRKISAMIHRFSLQQLRSNDEINELKGILGFAKHIEPIFVRRMCDKYGKDTIVKIQKFNSD

SEQ ID NO: 4284 - protein, 313 aa, Vibrio sp.
  source 1..313: note = Related to NZ_QLYY01000008.1
MNILDKISELSGIPQDMCARFVVSAPVRYKRYEIPKRNGGGTRLIAQPSKSVKPLQRVCISELRGVLPIHGSALAYEAGTGIKRNANKHRYNRYLLKMDFTNFFPSIKPDVLLSTFEQHNVALTEVDKFVLSSLLFWKPSRSESTLELSIGAPSSPFISNAVMYFFDVAVTEYCERKGITYTRYADDLAFSTNTADILFELPKFLNELVQQPSMSFLRFNTDKTVFASKKVNRHITGVTITNDGRLSLGRKRKRKISSLIHRFSLQQLRCDEEVNELKGMLGFAKHIEPIFVRRMCQKYGEEIILKIQKFNSD

SEQ ID NO: 4285 - protein, 313 aa, Vibrio hangzhouensis
  source 1..313: note = Related to JAHVKH010000015.1
MNILDKISEVSGMPRTMCLRFIVSAPIRYKRYEIPKRNGRGVRLIAQPSKSVKPLQKACIGELRDILPIHPAALAYEVGTGIKRNANKHRYNRYLLKMDFTDFFPSIKPDVLLSTLEQHNVELTEEDKSVLSSLLFWKPTRGDSNLELSIGAPSSPFISNAVMYFFDVTVEDYCKQRGIVYTRYADDLFFSTNASDILFDVPRFLSGLVQKPNLAFLRFNNDKTVFASKKVNRHITGITITNDGRLSLGRKRKRKISSLIHRFSLQQLTNPEEINELKGLLGFAKHIEPIFLIRMYNKYGRDTILKIQKFNSD

SEQ ID NO: 4286 - protein, 312 aa, Vibrio splendidus
  source 1..312: note = Related to MSCG01000002.1
MNILNQISEKTGMPKRLCASFIITAPKRYKRYEIPKRNGRGVRLIAQPAKSVKLLQRICVESLRKSLPIHQAATAYEVGTGIKMNANRHRFNKYLLKMDFADFFPSITPEVLFNTFESHGVELSDENQYILKNLLFWKPTRDSSLELSIGAPSSPFISNAVMHEFDSKVTEFCDSLGVRYTRYADDLVFSTNTPNVLFDLPEVLGSLLSEPSLSFLRFNSDKTVFASKRNNRHITGVTLTNDGRLSIGRKRKRRLSSLIHRYKLGQLTASKDIEELKGHLGFAKHIEPIFIARMTKKYGIETIQSLQKFKSE

SEQ ID NO: 4287 - protein, 315 aa, Vibrio ziniensis
  source 1..315: note = Related to NZ_CP049331.1
MELINKISTITGVPKGTCISLIVTAPRRYKRYEIPKRNGSGTRLIAQPAKSIKTLQRVCIEILRDYLPVHGVAMAYEVGVGIKRNANRHRYHRYVLKMDFSDFFPSITPEVLLNTISRHGVVLSDIDKMVLTNLLFWKPTRHNDNLQLSIGAPSSPFVSNAVMFFFDSMLNEKCRQLGITYTRYADDLIFSTNLKDVLFEVPSLLSRDVLANTEFNFLCINEGKTVFASKRNNRHITGVTITNDGRLSIGRKRKRVLSSLIHKFTTGELKDPIEIMKLKGLLGFAKHIEPIFIQRMAVKYGSEVIEQLKKYPTKI

SEQ ID NO: 4288 - protein, 310 aa, Vibrio cholerae
  source 1..310: note = Related to RHPA01000002.1
MSYLEQFTEITSLSSVEILNFVKSAPYRYKQYYIPKRSGRGVRLIAQPSKEVKYMQYIGKQLILDELPVHAAAYAYQKGASIKANASQHVSNKYLLKMDFSDFFPSIKPPLLLDVIQSKVGTLSTHDTTLIKRLFFWQRERISPLQLSIGAPSSPLISNVVMYDFDEFIHAYCSERGINYTRYADDLSFSTNERGLLFHIPELVSSYLTENEHLGLSINSGKTKFSSKKHNRHVTGLVLNNENQLSLGRERKRKIRTLVFLFSQSALDLDETYHLKGLLAFALNIEPNFILRLRSKYSSEMIDSIFRYQE

SEQ ID NO: 4289 - protein, 310 aa, Vibrio vulnificus
  source 1..310: note = Related to AAXPSE010000001.1
MSYLENFTEITSLGSQEILDFVKSAPHRYKQYTIPKRNGRGVRLIAQPSKEVKYMQYIGKQLILDELPVHSAAYAYQKRTSIKANASQHIANKYLLKMDFSDFFPSIKPPLLLGVIQRQVGELSADDITLIKRLFFWQRDRMSPLQLSIGAPSSPLISNVIMYAFDEYLYSYCAQRGISYTRYADDLSFSTNERGLLFHIPEVVSNYLSTNEHLGLSINTTKTKFSSKKHNRHVTGLVINNDDQLSLGRKRKRKIRTLVYLFTQSALETDEVFHLKGLLAFASNIEPEFILRLKSKFSNEVVDSIWRYQE

SEQ ID NO: 4290 - protein, 311 aa, Thalassospira xiamenensis
  source 1..311: note = Related to OBMM01000001.1
MQPSNLICKRFMMSKAELYHYANTCPHRYKTYSIDKRSGGKRKISQPSRDLKAVQRFVLSEYLEKRLVIHSSAKAYRVGVSIVDNAKEHVAQKYLLKMDFSNFFPSILSSDFMKLLRRDKIVDSEEEVKLLSKIFFMNDSGSLRLSIGSPGSPSISNAIMYDFDEVISKKSIDNSIFYTRYSDDITFSTNEKDILFSWPNVVSDVLRGIDFPKLKINTDKTKFSSKKFNRHVTGITLANQGYLSIGREKKRLIRARVHNAMNLDDEEILSLSGDISFACQVEPNILEKLWRKYPDQMNLILRRKEKTNQLE

SEQ ID NO: 4291 - protein, 304 aa, Ruegeria sp.
  source 1..304: note = Related to GG703517.1
MTVSDLIRRRFSFSPAELRVYAQTCPYRYKTYPIDKRNSQQKRWISQPSKDLKAVQRLVLSEFLGPKLTVHDSAKAYKSDTNILDNAGPHLKNRYLLKMDFRDFFPSIRAQDFVRYLLGSGIVQDEAEANLLARIFFKYCDGELCLSIGSPGSPVISNALLFPFDENISDICQKNIVAYTRYSDDLTFSTNTRDLLFSWPQKVEEALTALQSPKLELNREKTVFSSKKFNRHVTGITITNDDKASIGRDKKRALRTRIYNAPNLNEEELARLRGYISFVNQVESDMISKLWKKYPKQMGRILRQ

SEQ ID NO: 4292 - protein, 314 aa, Celeribacter baekdonensis
  source 1..314: note = Related to AMRK01000002.1
MSDIIQRIKRRFAFSDSEFNTYLNTAPFRYKNYTIPKRSGGVRLISQPSKDLKSIQRFILSEFLLPKLEIHECATAYREERNIADNARPHLQNQFLLKMDFKDFFPSIRAIDFSQYALRRSIVESEEEATMLGKIFFKSTNNGLRLSIGSPGSPPISNAVMINFDKQISSMCRDSGIAFTRYSDDLTFSSNSKGILFGIPNQVQEVLEVIQRPKLMINAEKTKFSSKKFNRHVTGITITNDGLMSLGRQTKRRVRSEVYNAPSMQPKERQRLRGYLSYAKQFEPSFVIKLWEKYPAQMALIKNSAFTKRNGDPQ

SEQ ID NO: 4293 - protein, 318 aa, Pseudovibrio sp.
  source 1..318: note = Related to LMCG01000004.1
MGAGERVVTIIDHIQHEFGFSRNELVAYAGTCPHRYKTYNIRKRNGDPRTISQPSKDLKAVQRFIVSRFFEDQFVIHEAATAYRKGVSIVDNAKPHLNSSYLLKMDFKNFFPSIKSDDFVTYLVEMGIYEDEARILSRIFFKKERDELVLSIGAPSSPIISNALLHEFDERVAQYSKERSLNFTRYSDDITISTNVENVLFDVPNYINELLGDIRLPRLRINEEKTVFSSKKFNRHVTGITISNEGQASLGRSKKRRLKAAVHSADKLTEIERFKLRGRLAFAKQVDPKFIELLHAKYPKQISLINSAQWAWDLSDFL

SEQ ID NO: 4294 - protein, 313 aa, Paenimaribius caenipelagi
  source 1..313: note = Related to NZ_VFSV01000069.1
MKPTQILKKELFLADIELKRYVSSCPRRYKRYPIDKRSGGKRIIAQPTPDLKAVQRLLVSQFLEKCLQVHECAMAYQVGKSIVDNAKIHSKNSYLLKMDFKDFFPSIRSKDLCHLLVAQGHLDQGDEIELRTISRVFFMLENDELVLSVGAPSSPFISNALLFEFDTIADEYCKEHGISFSRYSDDLTFSTNIKDALFAVPGFIKEALKAMEYPSLLVNDGKTVFSSRAHNRHVTGITLTNDGKLSIGRKKKRSIRTQVFLFSASRLSTQEARSLQGYISFARSVDAAFYSSLLSKYPVAMAQLEAANFGEIN

SEQ ID NO: 4295 - protein, 316 aa, Rhodovulum sulfidophilum
  source 1..316: note = Related to JAKCFH010000010.1
MRPKDVLRQNLFISGSELDRYLSSCPRRYKHYKIDKRGGEKDSKRPISQPTPELKGLQRTLLDEFLLERLPVHEAAMAYKKDTSIADNAKVHARNPYLLKMDFENFFPSIKSFDLCSLLIDTGKLDKDDQLDLRIISRVFFMREGPELVLSIGAPSSPFISNAMLFNFDSIVTEHCSSLNISYSRYSDDLTFSTKEKGILFDIPTFIRETLKLIKYPKLSVNEKKTVFSSKAHNRHVTGVTLSNSGEISLGRSKKRSLRTQVYLFSRGQLLPKEAAALQGYIAFSNSVEPKFVESLLEKYPEAMRALAAARFSLDD

SEQ ID NO: 4296 - protein, 306 aa, Marinobacter sp.
  source 1..306: note = Related to FONF01000022.1
MSLIEQLSKRTNLPLDSIQKYAKTCPVRYKVYSIPKRNGKGFRVIAQPSAPVKALQRELVSILEDYILVHECAMAYREGVSIFDNASKHKDNDYLLKMDFKDFFPSIDPATVLGLIMSQCPVAEKSDTLYLLSILCRKPRGSDRFIVSIGAPSSPFISNAYMYVFDDILSKLLVDKGISYTRYADDLTFSTRKKGALFEVPALVKKVLVDSGYRTIRVNEEKTVFSSKKHNRHVTGLVLTNDGRVSLGRSKKREIRTLIFKYLHGELSKPEVESLKGLASHARHIEPEFWERLKSKYGIDDSFFKL

SEQ ID NO: 4297 - protein, 320 aa, Desulfovibrio desulfuricans
  source 1..320: note = Related to NZ_CP072608.1
MLNSALITYFSVKTGLDKSVCLHVALSAPKRYKAYSIPKRNGEMRTIAQPTPVVKHLQRLALRLFDGKLPIHKAATAYRKGSSIVSNVSPHLGNSFILKTDFNSFFNSIKPQDLDLLDLGGTIGLKSEEVYILKHLFFWLPKGASDFCLSIGAPSSPMLSNYLLFQIDTKIYNYCIEHNIEYTRYSDDITLSTDKKFILKDAYDCINGICTRTSSPSLVINQRKTVFTSKKHKRFITGLVISNDEKISLGREKRRLIKSILFNFVNNKETTIQSLEQLNGLLAFAAHIEPEYVMRLCKQYEAHLSHLYDKGVFLIRYASK

SEQ ID NO: 4298 - protein, 311 aa, unidentified
  source 1..311: note = Related to JAFXQN010000116.1; note = Alphaproteobacteria bacterium
MVIDEILKKIIYPRPMLEYLILTAPRRYKVYDIPKRNGKGSRTIAQPTKLIKAIQRECIEYLSKLFPVHFTATAYVKGKSIRDNALKHKNNRFLLKMDFKNFFNNITEYDFRKYIQKHRTDYNISWTEKDCEDLCNIFFWCPKNTYKRILSVGAPSSPSLSNILMYDFDAIIYKYCSENDVVYTRYADDLTFSCNKAFKLKDVEKYVTDISKAIDSPTLVINEDKTVHTSKKKNRHVTGITITNDGQLSLGYKRKIVLKSLIHKYANNELDENSILYLKGMLNFATSIEPDFIQRMKNKYGEDTVSAILRY

SEQ ID NO: 4299 - protein, 303 aa, Vibrio alginolyticus
  source 1..303: note = Related to NZ_CP014041.1
MLLELISKSTLIEKDQVLDIANKASISYARFTIPKKDGSQRLIYQPSMAIRALQKVVYDEVLDKLPVHDACYAYRKKRSLKDHANVHKNNNYLLRIDLKDFFESITRSDIEKYCHESISKVFPHFNEEDFKLMTNIICRKDTITIGSVTSPSLSNSICYTLDERISRLAKSHGVKYTRYADDMFFSTSNKNVLCIIQKGVSGIIKGLEYPTLTINKKKTKHSSKKNRMSVTGVVITLDKKLSIGRGNKRFIREQVYKWSSLSSEDKSYLSGYLSFVKSIEPSYINRLCNKYSSQKIQEILRFS

SEQ ID NO: 4300 - protein, 303 aa, Vibrio caribbeanicus
  source 1..303: note = Related to NZ_AEIU01000111.1
MLLELISKNTLIEKDQVLDIANKASTLYARFTIPKKDGSERLIYQPSMAIRALQKVVYDGVLDKLPVHDACYAYRKGRGLKEHANIHRNSKYLLRIDLKDFFESITRSDIEKYCNEYVSKVFPIFNEGDFNLMIDIICRKNTITIGSVTSPSLSNSICYNLDEKISRLSDSYGVKYTRYADDMFFSTTNKNILKIIQKEVSSIIKKLDYPKLTINNKKTRHSSKKNRMSVTGVVITVDKKLSIGRDKKRFIRGQVYNWKNLSIEEKSYLSGYLSFVKSVEPSYINRLCDKYSSHVIQEILRFS

SEQ ID NO: 4301 - protein, 307 aa, Shewanella sp.
  source 1..307: note = Related to JAKEVJ010000129.1
MILEEIQKRTFLDIDYIRSIINRSNSLYSKFYIFKRDGSKRWIHHPKKELKLIQRVVNDNILDKLKIHPSSTAYRRGCSVKKNALLHVNNDFLLRMDFKSFFDSISYDDIENFLDKEFSISEPNWTYSDTKLLAKLLCYKNSLVMGAVTSPCISNAICYKLDKKLSGLCQNHNVIYSRYADDLYFSTSERNTLFFIEKEVLKIVANLELPSGLTINKNKTFHSSRKRKKQVTGLILTHDKKLSIGRNKKRTVKSKVHNWATLNENERSYLSGYISYIHSIEPQFINRLCLKYGADLVGEIISYNSKL

SEQ ID NO: 4302 - protein, 312 aa, Rheinheimera sp.
  source 1..312: note = Related to PBKZ01000009.1
MKLILDVIHSKTFLEVDYIIILLGKVNSLYSRFSIDKKNGSGRRTVYHPSKELKAVQRVINDHIITKLDTHDACKAYKLGCTTKKNAEPHLNSRFLLRMDFKSFFESIEYKDVHKFCQEFIKKHFIEWTDEDSEIFSKFVCYKGRLVMGSVTSPALTNAMCVGLDNLLYEKCESIGVKYSRYADDLYFSTDAPNILKKLEKDVYKIVSSLKIPSSLKINSDKTYHSSRKRRMIVTGLVITNSGTISVGRGKKREIKSLVFNWESLDEEFKKYTSGYLSYIKSVEPEFLNNLCLKYGAEKIRVVMTYNQSLKI

SEQ ID NO: 4303 - protein, 306 aa, Idiomarina loihiensis
  source 1..306: note = Related to QGUA01000011.1
MLLELIKAKTLLDEDYIKETCLNSNALYSSFYLPKKNGKLRKIYHPHKELKAFQRILHDNVLAYSKVHSASMAYSSGSSIKRNAERHSEKKFLLRMDFRSFFESISSKDVFQFCEKTLSNQFSGWDRFDSDMFTNFVCYKNSLVMGAVTSPSIANLILYEFDDSLSTFCSSIGVTYTRYADDMYFSTNTRNVLKEVERRVYKIVEKLQLPNDLKINTSKTYHSSKSRRRLVTGLVLTCEGSVSLGRKKKREVRSLIFKWDSLTDEEKQSLSGYLSYAKSIEPDFINRLCMKYGSNIVKNVLEYSPE

SEQ ID NO: 4304 - protein, 306 aa, Photobacterium phosphoreum
  source 1..306: note = Related to LZFG01000013.1
MLIKLISEKSLIDEDFILDFANKQQVNYFKFQIEKRTGGMRTIYHPSKELKYIQKILLDDVISSLPIHNCCYAYVKNRNIHTHAIQHKNAKYLLRLDFRNFFESISYKDIYEFCETTMGIYNKGWTSSDSEIFSKLVCYKDRLTIGSVTSPSLSNAICYDLDIKLSQLALSKSVKYTRYADDMFFSTKIKGVLYALQNDINNIISTNTLPSKLKLNLEKTHHTSKKRKMAITGLVITNDGNISLGRRKKREIKSKIYKWDTLSTDERTYLSGYLAYIKSVEPEFINNLCDKYDANLILEIIKFNTK

SEQ ID NO: 4305 - protein, 313 aa, Vibrio crassostreae
  source 1..313: note = Related to SMCU01000001.1
MLLELISSLTLLEEEYILNIAQTSSQRYKKFYITKKNGNLRAIYHPSKELKGIQRVIHNELLQKLPTHPASAAYKKGCSIKKHAEQHKKSKYLLRLDFKNFFESISEIDIRCFANNNIIGVIKGWSEEDTKLLVELATFKGGLTIGSITSPLLSDALCYQLDIALFSLSHELGVTYTRYADDLYFSTNHRNTLKKIPSNVDTIIKELEYPKKLKINYSKTNHSSKKNRMMVTGLTLTNDFKVSIGRSKKREIRSKIYKWSELNKDDKLHLSGYLSYIKSVEPSFINTLCGKYGATIIQSIIRFNSKKDPNLKS

SEQ ID NO: 4306 - protein, 308 aa, Photobacterium carnosum
  source 1..308: note = Related to NZ_WMDI01000001.1
MLLEMISNLTLLEKEYIQNIAKTASKRYKRFLIPKKSGGNRVIYHPSKELKGIQRVIHEELLQKLPIHLASAAYNKGCSIKKHAEQHRKAKYLLRLDFKNFFESITEIDINCFVNNKFIDIFDDWSEEDTKLLIDLTTFKGGLTIGSITSPLLSNAICYQLDIALFSLSHELEVTYTRYADDLYFSTFHRDVLKKIPSKVDIIIKELEYPKNLKVNNNKTNHSSKKNRMMVTGLTLTNDFKVSIGRSKKREIRSKIYKWVDLNQDDKLQLSGYLSYIKSVEPSFINTLCGKYGAKVIQQIIIFNSKNI

SEQ ID NO: 4307 - protein, 307 aa, Vibrio mimicus
  source 1..307: note = Related to NZ_ADAF01000002.1
MLLELLSRLTILEEEYILNIAQTSAQRYKKFHIKKRNGTLRAIFQPSKEVKGFQRIIHDEVLKRLPSHPASAAYKEGSSIKKHAELHKRSKYLLRLDFKDFFESISEHDIRKFASENLTGKIKGWTDEDTNLLVKLCTFKGGLTIGSITSPLLSDAICYNLDVALYSLSHELGITYTRYADDLYFSTNKSGVLKKIPERVEEIISRLECPNKLKINKSKTHHSSRKNKMKVTGLTITNDFKISIGREKKREIRSKVFNWDGLSPEEKAHLSGYLSYIKSVEPAFINNLCTKYGASIIKEITVFNSKK

SEQ ID NO: 4308 - protein, 307 aa, Vibrio harveyi
  source 1..307: note = Related to NZ_JPTQ01000476.1
MLLELISNITILEEDYILNVAQTSSQRYKKFYIPKRNGSLRAIFQPSKELKGIQRVIHDEVLKKLPSHTASSAYKEGSSVKKHAEQHRKSNYLLRLDFKDFFESISDHDIRKFANQNLVEKITGWTEDDTNLLIKLATFKEGLTIGSITSPLLSDAICYNLDVALFSFSHELGITYTRYADDLYFSTNNRGVLKTIPSKVEDVISNLDYPSQLTINRSKTYHSSKKNKMMVTGLTLTNDYKVSIGRTKKREIRSKIYNWSALDLEQKHHLSGYLSYIKSVEPAFINTLCTKYGANVIREISVFNSNK

SEQ ID NO: 4309 - protein, 309 aa, Vibrio vulnificus
  source 1..309: note = Related to NZ_CP046834.1
MLINLISKLVLLEKEYIVSIADTASRRYKRFFINKKNGKLRAIYHPAKELKAIQRVIHDEVLKKLPSHEASCAYKQGCSVKKHAEMHKGARYMLRIDFKNFFESIRTEDIRHFADKKMMSYIEGWTKADTELLVKLTSFQEGLTIGSITSPLLSDAICYDLDVSVFSLAHELGVKYTRYADDLYFSTNKKGVLKSIPPKIEAILLDLKCPHNLKINTAKTHHSSKKSRMMVTGLTITNDNNISIGRTRKREIRSQIYNWTSLNDEDKKYLSGYLSYVKSVEPEFINALCCKYGAYKIKEIIVFNSSGIN

SEQ ID NO: 4310 - protein, 305 aa, Aliivibrio logei
  source 1..305: note = Related to NZ_MAJU01000015.1
MILLKYLAKELLLDESYIEELANSASNHYKSFTIPKKSGGDRLINQPSRELKALQRTLHDNILSKLPIHDSAFAYRDGQSIDKHAKVHLSARYLLRLDFKDFFESIKAHDIYRFINKHGINLLDNWSELDTKLLVDIVCYKQKLTMGSVTSPILSNAICFALDKQLEKICYMHDVKYSRYADDLFFSTSKPNVLRKIEKDVFNVVAALNEPEKLKINRKKTYHSSKKNRMSVTGIILTTDGNISIGRDNKRKVRTMVFSWNKLDVVEKRYLQGYLSFCASIEPEFINSLCNKYGADKITEIQRYN

SEQ ID NO: 4311 - protein, 305 aa, Vibrio lentus
  source 1..305: note = Related to MCZC01000024.1
MILLEYLARELILDKGYIKDLAINSSLNYISFSIPKKSGGERIIHQPSRELKALQRALHDNLLKKLPIHESAFAYRKGKGIDQHAKVHLSARYLLRLDFKQFFESIKAKDITSFINKNKDLLLSGWTDSDTKLLVDIVCYKHKLTMGSVTSPILSNAICFLLDKELEKICYLNDVKYSRYADDLFFSTSKPNVLRKIQKEVFKIVSELDEPGQLKINVNKTYHSSKRNRMSVTGLILTNDGKVSVGRCNKRKVRTMVFNWDTLDEKDKFYLQGYLSFCSSIEPEFINSLCNKYGSEVIVKIQTYN

SEQ ID NO: 4312 - protein, 307 aa, Colwellia psychrerythraea
  source 1..307: note = Related to JQED01000055.1
MKLLDHLSSSLLLDKTYIMELAETASQRYKQFSIPKKTGGFRSILHPARELKTLQRIIHEDILVKLPIHNSAFAYRKKLNIFDHANVHIGASYLLRMDFKNFFESISSKNIAKFLDSKANYLLKDWKAEDTELLVKLVCYKSSLTIGSVSSPTLSNAICYELDEALHKLCYVRGIQYTRYADDLYFSTNEPNILNSIQNNVYEIVNSLSIPDKLRINSSKTHHSSRKNRMSITGLILTNSGDVSIGRDMKRKIRSLIFKWCSLDVKEKKYLAGYLSFCASIEPEFLNSLCKKYGADIIYEIQNFMNK

SEQ ID NO: 4313 - protein, 303 aa, Pantoea sp.
  source 1..303: note = Related to NZ_VWXD01000007.1
MLIEHLSDTLILTNDFINDLADTASKNYNKFSVPKKNGGTRVVYQPNKELKLLQRVIHDDFLKILPVHPACSAYLDGASVKENAERHKNNKYLLRIDFVDFFKSITHNDILSFLIENKIHPQWNDNDTELLLKLVCYNGRLTMGSVTSPMISNLVCNKLDKAIESICNIQDIIYSRYADDIYLSTNTPNILGMMPKKITNILRKIDYPKHLIINTSKTQHSSKKTRMTITGLKITNMGTISIGREKKREIRSLVHKWDTLPIEKKKYLQGYLSYCVSVEPLFINALCEKFSAKIIKKIQSYKF

SEQ ID NO: 4314 - protein, 303 aa, Raoultella planticola
  source 1..303: note = Related to NZ_CABDVS010000002.1
MLIDHLSDSLILTHNFINDLANTASKNYNKFSVPKKNGGTRVVYQPHKELKLLQRVIHDDFLYSLQVHPACTAYIDGSSVKKNAEKHRHNKYLLRLDFVDFFKSITHNDILLYLMENKIHPQWTDEDTEIFLKLVCYNGRLTMGAVTSPMISNLICIKLDKAIESICSPLNITYTRYADDIYLSTNTANILGLMPKKIIHILRTIEYPKNLIINTSKTQHSSKKTRMIITGLKITNDGEISIGRDKKREIRSLVYKWDSLSIEQKKYLQGYLSYCVSVEPLFINALCEKFSAKVIKKIQTYKL

SEQ ID NO: 4315 - protein, 303 aa, Pantoea agglomerans
  source 1..303: note = Related to CP077366.1
MLIEHLSDSLILTENFICELADTASKNYNKFSVPKKNGGTRVVYQPHKELKLLQRVIHDDFLVKMPVHPASTAYLKGASVKNNAEKHKNNKYLLRLDFVDFFKSITHNDILSFMMENKIHPDWNEYDKEIFLKLVCYNGRLTMGAVTSPMLSNLICNKLDRIIDSICSQQNITYTRYADDIYLSTNTAGILGSMPQRIINVLRLLEYPKHLIINSSKTKHSSKKSRMMVTGLTITNTGNISIGRDKKREIRSLVYKWDQLTIEKKKYLQGYLSYCVSVEPLFINSLCEKFSAKIIKKIQSSKL

SEQ ID NO: 4316 - protein, 303 aa, Pectobacterium parmentieri
  source 1..303: note = Related to CP026980.1
MLIEHLSENLILTKQFILNLADSSSDCYNKFSVPKKGGGTRVIYQPNKELKLLQRVLHDDFLTKMPVHNACTAYRDGSTVKLNAELHKDKKYLLRLDFVNFFKSITHNDIFLYLQENKLSPNWIDDDTELFLKLVCYKGRLTMGAVTSPMLSNLVCEKLDRAIEGICNHDALTYSRYADDIYLSTNTPNILSQVPKKVIAVLRNLEYPKNLIINTSKTLHSSQKRRMLVTGLTITNQGNISIGRDKKREIRSLIHKWEALPTDKRKYLQGYLSYCASVEPLFINSLCEKYSAKLIRKIQSYKF

SEQ ID NO: 4317 - protein, 303 aa, Enterobacter sp.
  source 1..303: note = Related to FVZI01000003.1
MLIEYLSKSLVLTPDFIKEIADTANERYNKFSIPKKNGGTRVIYQPQKELKVLQRSLHDHFLKKVPTHQAICAYQEGSSIKKHAELHSKNNYLLRLDFIDFFKSITSNDILHYLMEHKLHSEWTENDSQLLLKLVCFKGRLTIGSVTSPLLSNLVCNHLDRCISEIAISRGITYSRYADDIYLSTSSKDILFDMPKKIISVLRNINYPKNLILNSTKTIHSSRKKKMTVTGLIITNDKTVSIGRKKKREIRSLVHKWDVLTLEKKKYLQGYLSFCAGIEPLFINSLCEKFSARKIRDIQKQKL

SEQ ID NO: 4318 - protein, 305 aa, Enterobacter cloacae
  source 1..305: note = Related to BPMY01000001.1
MLLNYLSNNLVLTPEFISNIADTANERYNKFSISKDNGKNRVIYQPQKELKLLQRVLHDDFLRRIIPHPCCTAYKDGASTYKNAIQHIENRYLLRLDFVDFFKSITSNDIFLFLKENSSKLHPEWTEEDNELFLKIVCYKGRLTMGSVTAPGVSNLVCKALDYRISDLCAARGITYTRYSDDMYFSTNKENILLNLTPEIIAIIRNIDYPKHLIINSSKTKHSSRKRKMSVTGLVITNDKKISLGRDKKREIRSLVHKWDNLDSKRKKHLQGYLSYCASVEPLFINSLCIKFGAATISKIQKYIP

SEQ ID NO: 4319 - protein, 317 aa, Yersinia proxima
  source 1..317: note = Related to NZ_CABHYG010000014.1
MLIKYLSDNLVLTTDFIQELANTADDRYNKFSVPKKNGGTRVIYQPQKELKLIQRVLHDDFLKKIIAHPACSAYCDGSSVKKNAERHKSNKYLLRLDFVDFFKSITSNDVLHFLADNKLHNDWTTHDTELFLKLVCFKGRLTMGGVTSPILSNLVCNNLDVAINDISISLGITYSRYADDIYLSTNNPNILFCMPGKVISLLRSIEYPNYLILNTKKTNHSSKKNKMMITGLILTNDGEVSLGRKKKREIKTLVYIWETLSIERRKYLQGYLSYCASVEPLFINSLCEKFSAKKIKDIQSYKFQSSNSSVPSKILTK

SEQ ID NO: 4320 - protein, 304 aa, Proteus vulgaris
  source 1..304: note = Related to NZ_CP054157.1
MLIKYLSDNLVLTTAFIHELADTADNRYNKFSIPKKSGGTRVIYQPHKELKLIQRILHDDFLKKIPVHPACTAYSDGSSVKKNAEKHKHSKYLLRLDFVDFFKSITSNDIYYFLSENKLHSNWVKEDNELFLKLVCFKGRLTMGGVTSPILSNLICYELDIAINELSQSLGVIYSRYADDIYLSTNNPNILFNLPARIIKILRSVKYPKNLILNTKKTVHSSKKRKMIVTGLTITNDNQISIGRKKKREIKTLVYLWKGLTPEKKKYLQGYLSYCSGVEPSFINALCEKFSAKVIQDIQQYKIN

SEQ ID NO: 4321 - protein, 308 aa, Yersinia pekkanenii
  source 1..308: note = Related to CQAZ01000033.1
MLLKYLSESLILTADFITNLSNTADERYNKFGIPKKNGGTRVVYQPQKELKLLQRVLHDDFLKKINVHIACTAYCEGSSVLKNANIHKENKYLLRLDFVDFFKSITSNDIRLFLNEKKGEFSDSWDDLDSDLFLKLVCFKGRLTMGGVASPMISNLICYKLDLLINELCLSLGVTYSRYADDMYFSTNTPDILFTIPKRVISILRQLDYPKKLILNTNKTKHLSKKRKMIITGLVITNTGTVSLGREKKREIRSLVYKWNILDDKKKKYLQGYLSYCASVEPLFINALCEKFSSQAISEIQTYCPPST

SEQ ID NO: 4322 - protein, 304 aa, Pectobacterium peruviense
  source 1..304: note = Related to AODU01000021.1
MLTEYLASSLILTTDFIRDVADTADERYNKFGIPKKNGATRVVYQPQKELKILQRVLHSEFLVKLKVHSSSTAYSDGSSVIKNANLHKNKKFLLRLDFVDFFKSIRSSDIRLFLNERGSELSDQWTNDDSDVFLKLVCFKGRLTMGGVTSPAISNLICYKLDSALSEICLSLGVTYSRYADDMYFSTNVPNVLFSMPNRLIKILRSIDYPRSLYINTEKTKHSSKKRSMKITGLTLTNNGEVSLGREKKRRIRSLVFNWSNLTVDEKKYLQGYLSYCASVEPLFINSLCEKFSSKIITNIQKYK

SEQ ID NO: 4323 - protein, 305 aa, Serratia marcescens
  source 1..305: note = Related to JADUBR010000008.1
MLLDYLSSSLVLTNEFVSLIANTSDERYNKFSIPKKNGGTRVVYQPQKELKLLQRVLHDDFLSKIPLHSACTAYCRGSSVIKNANMHRGNKFLLRLDFVNFFKSITSNDIFNYLNENRDKLDGHWTNEDLELFLKIVCYKGRLTMGSVTSPVISNLVCSMLDSKLQAVCVPLGVTYSRYADDMYFSTNGKNILFDIPSRVIGIIRTLGYPKGLILNTSKTSHSSKKRKMSITGLVITNDGKISLGRDKKREIRTLVYMWDSLTVKKKKYLQGYLSYCASVEPLFINSLCVKFSSAVISKIQSFTP

SEQ ID NO: 4324 - protein, 309 aa, Escherichia coli
  source 1..309: note = Related to CP057980.1
MLIEYLAKVLLLEADFILKVANDANSHYGKFSVPKKGGGTRIVYQPSKELKVLQRLLHDNVLSKLPIHPNAVAYQQGSSVFKHASIHKAKRFMLKMDFEGFFDSIKKSDVERFINDNKHFFSDDWSKDDTDLLVKIVCFNGRLTMGAVSSPVVSNAICYELDHILNEFCLSKGITYTRYADDMYFSTNEENVLKQIPPFLRSNLKNLKYPSKLWINRKKTLHMSKKNKMMVTGVTLTTDGGVSLGRDKKRMVKSLIFKWEALDEKKRLFLQGYLSYCKSVEPLFINRLCAKYSSELIDEIQRYQPVVSE

SEQ ID NO: 4325 - protein, 325 aa, Geomesophilobacter sediminis
  source 1..325: note = Related to NZ_JAEMHM010000012.1
MLLEFIAQHLILTPEYILTVANTASKRYKEYYIDKRDGTKRLIHHPSKELKSIQRCINQGILPRLPVHHCAAAYKPGAKLIDHVTRHKNSKYLLRLDFKDFFHRLTDMDIMLCLDEYKHFLPSDWNVLDSDLLIKLVCRYHKLTIGAATSPSLSNILCFKLDTQIQTLCDHLGVEYTRYADDMYFSTIKPNILYDVRSSVYNIVNSLKYPSNLLFNNRKTKHTSKKHRRVITGLVVTPTAKISIGRDKKRDIRSKIYNWNGLSVAEKYSLKGYLSYCNSVEPSFINSLCDKYTAGTINLILKYDESAEAPKPKLLSPIEAIAASA

SEQ ID NO: 4326 - protein, 311 aa, unidentified
  source 1..311: note = Related to VFZY01000080.1; note = Acidobacteria bacterium
MIRERMASAIGVTIEYISGLANGASHAYKTYRIPKRDGRLRTIHHPSKQLKALQRWLLQNVIENLPVHSAAFAYKKSTSMFDNARAHSKNRFLLRIDLNDFFPSITDTDVRRFIQDRATMFEGWTNGDIDAFCKIICRNGHLTIGAPTSPAISNVLCFDLDSALSSLASKLGVTYTRYADDLFFSTNQAGVLRPLQESVEQTVRVATLPGNLAINHGKTRHSSKKRLRRVTGIVIGSDGKAHVGRGVKRKIRGMIHRFDSLNDQDRASLAGLIAYVIGFDPAFLNSLVTKYGHAAVSRARFPTRPSGVNVN

SEQ ID NO: 4327 - protein, 303 aa, unidentified
  source 1..303: note = Related to PSRJ01000392.1; note = Acidobacteriia bacterium
MMVDKMALDLGLTRKFVANFSRGASHAYKFYTIPKRNGGERPIHHPSKQLKSMQRWLLAYVIEPLPVHPAATAYRKHRSILDNARAHAASKFLLRMDCENFFPSITEDDVLLYIQQRPSLFPGWTAFDIEVFCKLICRNGRLTIGAPTSPGISNALCYEMDSALADLGLKRSVNYTRYADDLFFSASKPDVLRPLQSDIEQLITDLELPGGLKINPAKTRHSSKRGRRRATGIVLGSDGQPHIGRALKRKVRSLIHGVDSLDPAARQSLAGLVSYAIGFDPDFMNSLVIKYGHAVMQKVRFPT

SEQ ID NO: 4328 - protein, 312 aa, unidentified
  source 1..312: note = Related to JAIQGJ010000040.1; note = Acidobacteriia bacterium
MMLEQMANGIGIPVVFIENLANAASYEYKTYTIRKRSGGLRTIHHPSRRLKALQRWLLANVIQNFPVHLAATAYAPGRSIFKNASVHATSRYLLRMDFTDFFPSITQNDVRSYVNTNTRFFEGWNSTDVNAFCNLISRNGVLTIGAPTSPAISNALCYDLDARLELFCSKSGVTYTRYADDLFFSADRSGTLRQIEEGVLRIVSELEIPRCLVINRAKTRHSSKRGTRRVTGIVLGSDGKPHIGRTLKRKIRASIHQFAALDDAGKDSLAGLIAFAVGFDPDFLNSLIKKYGLAAVRIAMKKPSAKTGGKPL

SEQ ID NO: 4329 - protein, 341 aa, Edaphobacter lichenicola
  source 1..341: note = Related to JACHEB010000003.1
MTTELGLTWEFVANLAGSASYEYKKFIVRKKSGGLREIFHPSRKLKAVQIWLLRNLLGQLPVHESATAYRTGISIYDNATRHTKSRYLLRIDLENFFPSIRDSDFSAYVDSNQENFKGWTEIDKAIVTSLMFRNGELTIGAPTSPALSNALCFQLDVQLSKLANNRGLVYTRYADDLFFSSIKPGVLSSVLDEAQSIIDELPIPATLKINRAKTRHSSKKGRRQVTGIVLGSDGKPHISRTFKRSIRSMVHKFDLLREDQKVALPGMISFVAGEEPGFLNSLITKYGFELIARVTTIQSLAERQRIHLPKVKPSPPKKVRAKSSTQVLFDTLRNAGFDVDD

SEQ ID NO: 4330 - protein, 303 aa, Granulicella aggregans
  source 1..303: note = Related to NZ_JACHIP010000003.1
MIIEKMSAELSLPLKYVDFLALTASHQYKQYTIPKRTGGERIILHPSRKLKALQRWLLSNVIAVWPVHPAAMAYRPGVSIFDNANIHVQSQYLLRMDMTNFFPSIEVRDLVAFMAKRPTLFQDWTDRDKSYFARLVFRHGKLTVGAPTSPALSNALCFELDSALAGITSAQGVAYSRYADDLFFSANKKQVLISIEAEAKAVLGEIKIPANLSLNQAKTKHSSKRGARRVTGIVLGSDGKAYVSRDTKRTIRTLVHQLDTLKDEERIRLAGLISYVSGFEPAFLNNLILKYGADKVSSAKQHT

SEQ ID NO: 4331 - protein, 306 aa, unidentified
  source 1..306: note = Related to SHBB01000070.1; note = Sandaracinaceae bacterium
MSIVDSAAASLGVSRDKILTLADQANHSYVTYSIPKKSGGEREIHHPSKPLKAVQRWFLRRWISLLPVSPLATAYEPGSSVLKNALVHEGAKYAVRIDLQDFYWSISSDDFRSYLATVPAGAEIDFGDVETVAALLFRHGRLTVGSPTSPSLSNRMCRKLDTECEALAVKIDARYSRYADDMYFSATHPGILSAIESSLESILSGLDTPGSLRINKSKTQHFSQKTGIFVTGLVIGSDGKVYLGRRRKREIRALIHNLESLDLDARRRLAGKISFARSIEPAFVNALIKKYTVGRFRSASRPDSAG

SEQ ID NO: 4332 - protein, 308 aa, unidentified
  source 1..308: note = Related to QHPH01000062.1; note = Verrucomicrobia bacterium
MLIELLSQRLLLPEKYISNLAAGASHHYKTYYVSKRRGGARLIEHPSKQLKAVQRWLAANIICHFPVHAAATAYKSGVNIADNARRHASSSFLVRIDLQDFFPSLRAVDVKRLAETSLVFVPGGGQWSSDNIDVFVCLSCKDGRLTIGAPTSPPLCNALCYHLDLQLTAFAQQRELTYSRYADDLVFSARAPDQLRGVPAQVAATLENLEVPRGLKINTSKTWHASRRGRRKLTGVVITSDGKLSVGRQLKRRLRTLVYRHYTLDKTQKKNLARWLAHVRSIEPEFINSLILKYGADRVVDAMQPHSG

SEQ ID NO: 4333 - protein, 313 aa, Donghicola eburneus
  source 1..313: note = Related to NZ_FOXY01000012.1
MLIELLSKTSNVPESKLLSLSLTASRRYKVYTIPKRTGGDRLIEHPSRELKAIQRWIVQALFARFPVHEAATAYRKGTGIRENAERHRQSKFTNRYDFSNFFPSFSQDRVLHYVSEQSKNLGIDLTQRDLDFVGNIVCRHGRLTIGAPSSPAISNAMMFEFDSRMHEASQSRGLVFTRYADDIFLSSFEPGKLEGLEALILKSKRDIPHLRLRLNRQKTAYLSKKYSRKVTGIVITPQHTLSIGRERKREVKALIHQWIKGGIEPERFYYLKGLFAFAIDIEPQLEARLMEKYGKEKIQLLRSADFDFPIGLI

SEQ ID NO: 4334 - protein, 313 aa, Pseudorhodobacter aquimaris
  source 1..313: note = Related to NZ_LGHS01000039.1
MLIELLSRTAKIPEAKLVSLAESASRRYKVYTIPKRTGGERVIEHPSRELKAIQRWIVRALISRFPLHESATAYRKGTGIRENAERHRKTKFTNRYDFASFFPSFSQARVVQYIGEQAKAVGIDLSERDLEFIGNIVCRNGRLTIGAPSSPAITNAMMFEFDRRMHEDCHAKGLVYTRYADDLFVSSFEPGQLDGIEKVIVKNKRGISHLRLRLNHQKTAYLSKKYRRVITGVVITPQHTLSIGRERKREVKALIHKWIKGDIDPTNFYYMRGLFSFAIDIEPEFEKRLAEKYGAARIRQLRSADHDFPIGLI

SEQ ID NO: 4335 - protein, 313 aa, Oceanibaculum indicum
  source 1..313: note = Related to NZ_RBIG01000007.1
MLIELLSRTSGIPDERLLRISATASQQYKLYTVPKRTGGERLIEHPSRELKAIQRWVIRALINRFPVHDSATAYRIGSGIRENAERHRTSKYTNRYDFMNFFPSFRKEHISIFIKEQSDIIGIDLSERDIDFIANIVCRNGRLTIGAPSSPAITNAMMFAFDKKMHDACKSRDLIFTRYADDIFISASEARKLFNIENLIIDSKRDIHYLNLRINHKKTAMLSKKYHRSITGVVITPQHTLSIGRDRKREIKSLIHRWINGQIDAEKTEYLKGLFSYAIDIEPSFETRLIDKYGADIIKSLRSPENAINTNRS

SEQ ID NO: 4336 - protein, 325 aa, Pseudosulfitobacter pseudonitzschiae
  source 1..325: note = Related to CP069017.1
MLIDQIARSSQLEVDELVRLAQNASQHYKLYNIPKRNGEPRRIAHPSRELKAIQRWIVKVIIQRFPIHDAATAYRTGGGIRENAERHRISLYTNRYDFANFFPSFKREQVQSFIQSESEKVGLLLSDDDADFVGKIVCRYDRLTIGAPSSPSITNAMMFPFDQILFDYCVKRDLIYTRYADDIFISANKSDQLNNLEVRIADAKRKIPHLSIRLNRQKTAYLSKKYHRSITGVVITPDHKLSVGRSRKREIRALVHRWINGKLDPIEVSYMRGLIAFARDIEPKFEVALRAKYGPQRIEEILRRPDLTTTPGWPKEGNNDDDVPF

SEQ ID NO: 4337 - protein, 321 aa, Phaeobacter inhibens
  source 1..321: note = Related to NZ_CP010725.1
MLIQQIARTTKLDEQDLRHLAASADRRYKVYLIPKRGHGHRKIEHPSREIKALQRWITKVIIDRFPVHHAATAYRKGNGVRENAERHRTSKYTNRYDFANFFPSFGQAQVENFVKQEAEKLGMLFDNDDLRFVGNIVCRFGRLSIGAPSSPALTNAMMFDFDRTLFDWCQSKELIYTRYADDLFISANEPDRLNKLEPLIAKAKRDVAHLTLRLNRRKTAYLSKKYTRLITGVIITSDHKLSIGRERKREIKALVHRWLNGKLEAGEIYYMRGLLAFARDIEPEFEKNLRSKYGDAAINEVLRHPSLGKAPDPEFQLPPWL

SEQ ID NO: 4338 - protein, 309 aa, unidentified
  source 1..309: note = Related to JAGRDV010000235.1; note = Rhodobacteraceae bacterium
MLIEMLARTTSFDLDRLSRISMTASRRYKIYTIPKRTGGVRTIEHPSRELKAIQRWIIKALFAKFPVHESATAYRKGFGIRENALRHKQTSYTNRYDFADFFPSFQQSSVEKFLALQAKILQIDLSPLDIRFVGNVVCRNQRLTIGAPSSPAITNAMMFKFDENLNNSCESDKLIYTRYADDIFVSSNEPNKLFDVEVRIENAHRGIDYLSLELKNEKTAILSRKYARKVAGVVITPTHNLSIGRERKREIKALVHSWSVGALEKDRFAYLRGLLAFARDIEPDFERRLRAKYGDPTIDRLLFAPDLYA

SEQ ID NO: 4339 - protein, 315 aa, Ensifer sp.
  source 1..315: note = Related to NZ_MBST01000045.1
MLVELLVRASKISEAKLTSLAATASNRYKVYEIPKRSGGKRTIEHPSKELKAIQRWIAKAVFARFPIHSGATAYRQGFGIRENAERHRQSKFTNRYDFSNFFPSFTQAEVQNFLRSRSAAVGLVLTEKDIGFVGNIVCRNGRLTIGSPTSPIITNTMMFDFDVTLDNFCAERGLIFTRYADDMFVSSNKEGQLFSVEDGIHLAMNSIPNLNLEVNHKKTALLSKKYLRRVTGVVITSDHRLSIGRHRKREIKALIHKWRTGTLEVEKLHYMRGLVAFARDVEPNFEQRLRLKYGDQAIDEIVHSSDLSIVFDKNT

SEQ ID NO: 4340 - protein, 311 aa, Brevundimonas sp.
  source 1..311: note = Related to RHWX01000009.1
MLLERLEKHTGLPRSLLERYAETASKRYRVYTVEKRNGDRRTIEHPSREIKAIQRWLIRALIGNMPVHEASTAYSKGASIRKNAERHVRSRYTVRLDFEGFFPSFGGADVIAYLKKTHDDPIMVLSAEDLSFIRRIVCRHDALTIGAPTSPGLTNAMMFEFDSALADWCAARALIYTRYADDLFISASAPGALAGVEAKAAELAAAFPYAKLALNREKTAHLSRKYRRSITGLVITPEQTLSIGRDKKIRLKSDVYAYSKGNLQSEQRSRTAGLIAFVRDVEPAFYETLLRKYGRETIEGLQKGLRSSLKG

SEQ ID NO: 4341 - protein, 302 aa, unidentified
  source 1..302: note = Related to JADCLP010000001.1; note = Erythrobacteraceae bacterium E2-1 Yellow Sea
MLLDELSAETGLRPDRLEYYADSASRRYYSFTIKKRNGDPRWIRHPAKPLKSLQRWLNSNVISRMRVHQCAMAYQPGSNIRSNALRHASSNFTVRIDFEDFFPSFKRSGIVKFLKDQEKFGLKLGRRDITFLSKIVTRFDELTIGAPSSPLLTNAMMYSFDKEVSEFCERKGLTYTRYADDIYISSVAPNGLDGVLQRVAAAAKKFPYAKLRINSSKTSYTSRRYRRMITGLVITPDHKISLGRKRKREIHSLVHMASVDKLDLEKLSYLQGMLAFTKDVEPSFFETLVAKYGRKTVERILL

SEQ ID NO: 4342 - protein, 302 aa, Sphingopyxis sp.
  source 1..302: note = Related to NZ_CP033204.1
MLIDWLCAETGLQRERLIAFAASASKRYFVFRIKKRDGSERQIAHPAKPLKGIQRWLNSRVIKSWKVHDAATAYQRGASIRLNALRHAETNFTLRVDFKDFFPSFQAKGIEKFISDQPNGGKKFDKVDLKFITDIITRNGRLTIGSPSSPFITNAMMYSFDEEVSLFCDASGLVYTRYADDIFVSSHNPGNLAQAYDFLCSAANKFPYANLSINHNKTKFLSRKYRRTITGIVITSDRKISIGRPRKKEIKSLINSYIYGKLDDEKEMYLKGMVSFACDADNVFFLSLEKKYGKKVMGRLIG

SEQ ID NO: 4343 - protein, 303 aa, unidentified
  source 1..303: note = Related to VBWB01000009.1; note = Rhodospirillaceae bacterium
MLLERLRKQSGLTTAQIEMYAATASKRYKIYTIKKKNGGDRTIEHPSRALKSLQRWVNKSIISKLPTHVSATAYAKGCSIRKNAQHHLGSIFTLHVDFKSFFPSFKSDGISDFFRIKSKELGIELSEEDVNFITRIVCRNNCLTIGAPTSPSITNAIMFEFDDVVNEWCNQRRLVYTRYADDLYISAFEPGMLSDVIPFLISALDKQRFVRLKINHDKTAFLSKKYRRAITGIIITTEGKLSIGLKRKKLIKSMVLDFKYGRLPMEDKSRLHGLISFALDIEPAFHETLIRKYGENTIKSIST

SEQ ID NO: 4344 - protein, 309 aa, Blastochloris tepida
  source 1..309: note = Related to NZ_AP018907.1
MLLERLERQSRLSRGQLEQFAITASKRYKIYNIPKRNGGERQIEQPSRAIKAIQRWLNLNLIRKFPIHISSTAYNKGSSILRNAEFHKNTNFTVRIDFEDYFPSFRDNGIERFLQENRSVIGDPLDDNDISFIRNIVCRHGRLTIGAPSSPLLTNAIMFQFDGIVYQFCQSRGLVYTRYADDIFISATRANSLGDVADFVASVSTGYPYANLTINCRKTVFLSKKYRRVVTGMVITPQGSVSVGRNLKDEVRSGVYKFKNGIIDGDEIARIRGLVAYIYGVEPSFLGILERKYGDETIGRLLGGRPLVK

SEQ ID NO: 4345 - protein, 312 aa, Azospirillum sp.
  source 1..312: note = Related to NZ_BACU01000350.1
MLLEKLKDHSGLSERQLDRYAATASNRYKVYTIPKKPFGVRTIEHPSREIKAIQRWLNSNIIRKLPVHSSATAYHRGASIKENAIRHAGSNFTLHVDFQNFFPSFHGHHIEKFLRWWSEENKINLNDNDISFFRKIVCRNNALTIGAPSSPILTNAMMFDFDGTVALWCTSNGFIYTRYADDIFISSVLPGKLGNALEFLKETCPSFPYANLSINHNKTAFLSRRYKRSITGLIITPERKISIGRAKKEEIKSEVYKFSKGELTSEEIGRLRGKIAFTRDVEPSFYDRLLNKYGYSTIHTLEFLGEGDLLGK

SEQ ID NO: 4346 - protein, 310 aa, Oceaniglobus trochenteri
  source 1..310: note = Related to NZ_JACNMM010000013.1
MLREVLAEKSGISPKRLQFIQENASRMYKVYPISKRDGTDRIISQPTPELKALQRWLSRGIFQRLPVSSCAMAYKKGASIRENAKAHVKTSFTLHLDFEDFFPSFSTDHIIRYLSENTKLNSDDIQFCSDVVCRHGRLTIGAPSSPAVTNALMHSFDLQVDSWCSGRGLVYTRYADDINISSAGSGSLGDVEGFISATAKDFKYASLTINGKKTAYLSKKYRRSITGINVTPEGCISIGRARKREIKSLVHSFKLGSLEPELLWKLGGLIAFAHDVEPDFVVSLKKKYGSATVEAILHQKTPRGLRGPKE

SEQ ID NO: 4347 - protein, 309 aa, Cereibacter sphaeroides
  source 1..309: note = Related to NZ_CP033435.1
MLREVLAAKSGMSLSRIERLQCNASKMYKTYPIPKRDGSDRMISQPTPELKAVQRWLARGIFQRLPVSACATAYKKGASIRKNAEAHVASSFTIHLDFKDFFPSFSHGHVSRFLSEATRLSQEDILFCSDIVSRHGCLTIGAPSSPSVTNALMYSFDVSVERWCMKRGLIYTRYADDINISSKCPGALREVEDFVRDASGAFEYANLVINERKTAYLSRKYRRSITGVNVTPEGRLSIGRDRKREIKSLVHQCVMGTLQVDMLWRLGGLIAFSSDVEPHFVDALKNKYGADVIEKILHQKTPRGAWVAD

SEQ ID NO: 4348 - protein, 306 aa, Pannonibacter phragmitetus
  source 1..306: note = Related to NZ_LGSQ01000001.1
MLRDALSNLAGIPISRISRIQENASKLYKVYEIPKNNGKKRTISQPTPELKAIQRWLIRNVFAKLPVSTYATAYKKGASIRLNAEFHRNSLFTLHMDFENFFPSFTENNVFDFLKENTNLNQDDISFCVDLCCRFGALTVGSPSSPALTNAMMYAFDQQISDWCAERKLVYTRYADDINISSSSPDALGDAEGFIKDASKEFKFGNLKVNEVKTSYLSKKYRRSITGLNITPQGSISIGRDRKREIKSLVYKYKEELLPKELFWQVGGLIAFANDVEPTFVRSLIEKYGQKTIEELLHQRTPRGLK

SEQ ID NO: 4349 - protein, 304 aa, Pararhizobium antarcticum
  source 1..304: note = Related to NZ_LSRP01000113.1
MLIETLSKQSGVTIENLKWLAETASKRYKTYEIPKRTGGVRTIHHPSRGLKGIQRWVSKFLLARLPVHTAAQAYVRGASIRKNAELHAGSKFTLRIDFANFFPSFSSEHVEVFLATAERDRSIGLTDQDISFVSRIVSRHGQLTIGAPSSPILTNAMMHFFDGQIAEFAERQNLTYTRYADDLFFSSSKPDNLTDALEIVQQVSVAYPYANLRVNPDKTAFLSRRYSRRVTGLVITTDGKVSIGRERKRMVKAQVHKFLQGQLDIFEVPKLRGYLAFVQDVEPEFWEGLKRKYGADAMITVTGG

SEQ ID NO: 4350 - protein, 311 aa, Rhizobium sp.
  source 1..311: note = Related to FMVA01000017.1
MLIEALIKQSGMNDVSLEWLALTASKRYKTYDIPKRNGATRTIHHPSKSIKSIQRWVSKFLLRRLPVHVAAQAYVRGASIRKNAELHAGSKFTLRIDFSDFFPSFSREHVELFLAAVERDRSIGLTNRDISFLSRIVSRHGQLTIGAPSSPILTNAMMHFFDSQIAEFADRKNLIYTRYADDLFFSSNKPDNLTDVLAIVQQVSATYPYANLRINPDKTVFLSRRYSRRVTGLVLTTDGKVSIGRARKRAVKAQVHKLIQGEFDNFELPTLRGYLAFIQDVEPEFWESLKSKYGADAMLTVVGKQHFSNLL

SEQ ID NO: 4351 - protein, 311 aa, Rhizobium wuzhouense
  source 1..311: note = Related to NZ_QJRY01000001.1
MLKETLSKQSGVTIENLEWLAETASKRYKTYEIPKRNGGLRTIHHPSRGLKGIQRWVSKFLLRRLPVHVAAQAYVRGASIRKNAGLHANSKFTLRIDFADFFPSFSKEHVEVFLAAVERERQIGLVQQDISFVSRIVSRHGRLTIGAPSSPMLTNAMMHLFDSQISEFAERQKLIYSRYADDLFFSSNGPDNLSDVVATVRQIADSYPYANLRLNPDKTVFLSRRYSRRVTGLVLTTDGKVSIGRERKRAVKAQVYKFIQGELDNFEVPTLRGYLAFIQDVEPEFWESLNRKYGADTMLTVRGKQHFAALL

SEQ ID NO: 4352 - protein, 312 aa, unidentified
  source 1..312: note = Related to JACZKU010000431.1; note = Proteobacteria bacterium
MLVEALQKQSGLPTSVIMRIAETASKRYKAYKIPKRSGGWRDISHPSRELKAIQRWINRTLFMKLPIHESATAYAKGSGIRRNAEIHAWSSYTLRLDFENFFPSFDIHGISEFIAAQSDEREWGLTKQDVLFVGMVVTRYGRMTIGAPSSPILTNAMMYMLDSELAEISEKRKLSYTRYADDIFLSAYAPDSLADMIPIAKEIVGRQKFVRLKFADEKTAHLSKRYKRSITGLVVTPDQKISIGRERKRTIKSLVFRFINGELGDVELMRLSGTIAFVYDVERAFYDSLVRKYGEDVIGKIQKPHLADAEST

SEQ ID NO: 4353 - protein, 324 aa, unidentified
  source 1..324: note = Related to JAIUNO010000183.1; note = Proteobacteria bacterium
MLLEKLQIQSNQSLERLERFATSASKRYKVFQIPKRSGGFRIIEQPSKEIKAIQRWLIEALFDEFPIHHSATAYIRGKNIRSNAEVHAESNFTLKLDFENFFPSFTERHLIKFLRNYPLIEKKQINDRDINFISRICLRNGRLTIGAPSSPTITNAMMYQFDTLMSARCAEDNFSYTRYADDVFVSSRSYINVGEIILFVENLLSKYEYASLRLNKDKTAILSRKGRRSITGCVITPQRGISIGRKLKKSIKHKIYESINGRLSSLEATKLMGYLGFLKDIEPNYFESLKKKYGADAIKTITSGNYDEIKLVPLILDDLDDTPF

SEQ ID NO: 4354 - protein, 307 aa, Thalassospira sp.
  source 1..307: note = Related to NZME01000040.1
MILEWIAKETGVGAAQIATIVRSANNRYCTYSIPKRDGTPRQISQPSKKLKFVQRWLAKRVFVNLPVHKSATAYLPGVGIRKNALEHASSKYLLKMDMSDFFPSIREEDIVKLMLLNSEKWAGFEDADANFIGKAVSYRGALTIGAPSSPVLSNAILFEFDELVHEYCINNELVYSRYADDISISSKGRIDLHAVSGVVEEFVQKLETPKLNINREKTVIVSKKHQRFITGLNLTSDGNVSVGRLRKREIRTLIFKFKSADLDFSEIGYLKGWMAYLNAVEPSFVERARLKYGDRTVQKIFEYDVDG

SEQ ID NO: 4355 - protein, 326 aa, Rubrivivax sp.
  source 1..326: note = Related to JAEUOZ010000023.1
MNYAELLQAWCRLLRATPQDVTVLLMRGPYQYKHYQIEKRTGGKRDIFHPTPNLKAVQRWLVNEHLQTLPVHDSVYSYRVGRGIRQHADAHVHSNFLLRLDFKDFFPSITQDWLLQFLLQSAHEGSLSLDDRAIAACMRVLCRFNKFDGSLALSIGAPSSPAISNAILFPADVDAHSRCAELGCLYTRYADDIYVSSREKNVLVEAERQVKAAFSQHAPRLQFNADKRINVSKKAKRVVTGLTLTPDRKLSIGRELKRSIKTLVYLHVSGKLDPVERPRLCGLVSYVRDVEPAFYNSLVLKFGHVTMEELFRCGPGEALYLPNEGL

SEQ ID NO: 4356 - protein, 316 aa, Limnohabitans sp.
  source 1..316: note = Related to NESB01000001.1
MTRNDLIFALAKLLRASHEDIQKLILTAPYQYKHYKIKKRTGGYRDIYHPTASLKAVQRWLVSNCFLHLMIHPSVFSYREGVGIRQHASQHLHSNFLLRIDFKDFFPSIDQSWVLDFFYQEVNAGRLPIQLETVPTLARLVCRFAKEEKTMALSIGAPSSPLLSNAMLFALDQDMDEYCRAHDCVYTRYADDIYISTKHPNILSGIRDLLTSKILEFTPKLVINDKKTINVSKKIKRVVTGLILTPDRQVSLGRNLKRSIKTKIYLFTHGQLPVDEVEHLRGLVAYASDAEAVFYDALIHKFGSASIDRLLNRKKN

SEQ ID NO: 4357 - protein, 321 aa, Pseudoxanthomonas daejeonensis
  source 1..321: note = Related to NZ_CP093331.1
MNYSDLLSSAAKLLRTSSIEAERIIITAPYRYKHYKIEKRNGGQRDIHHPTPALKAIQRWLVSTPLANLPVHDCVYSYRKGRNIAMHAAMHVESNYITRFDFSDFFPSITATTIRRFLLEETMKGTIDLDTAAINAIVRLVCRAEDKSGKLVLSIGAPSSPHLSNAVLHDFDHVMESSARIAGGMYTRYADDIYVSGRTKETVALLEKAFIRETSKLLPYLKINERKTQRLSRKRRMAVTGINVTPQRKLSVGRDLKRSLKTKVHLALLGQIAPEELSALRGMIAHVASVEPAFMDSLSKKFGVERLESFLTSREIEEVSR

SEQ ID NO: 4358 - protein, 314 aa, unidentified
  source 1..314: note = Related to JAFLDZ010000021.1; note = Xanthomonadales bacterium
MKNADLERALSAYLRIKPPDLRQIVRTAPYRYKHYQIDKRNGGKRDIFHPSPELKAIQRWLVENVLLNIPVSPSAMGYEKGCSIRDHARQHLQSNYFTKLDFSNFFPSIQLDWITRFLLESLPDYDNEAIHSIARLACRWADAGMPLALSIGAPSSPALSNRIMFALDTALSEVASANDVTYSRYADDIYFSCAKANTLHDLEREARKIIIEMTPALRLNEQKTLHTSRKRKVLISGVGITSTRKLSIGRNLKRSIRTQVFLWSMGSLPAENFPKLRGLLNFANDIEPEFLASLHRKFGDDLIKRFLAGDFERN

SEQ ID NO: 4359 - protein, 316 aa, unidentified
  source 1..316: note = Related to JAFECW010000526.1; note = Proteobacteria bacterium
MNRNQLIAELAAQLRVSPANIERVIASAHRRYKRYTLIKRTGGSREIFHPTPELKAIQRWLIKNVFDQLPTHPSVHAYEPNCSIARHAAAHRRSNFFLRMDFSDFFPSISAQWVKNFLLESIQAGLVDLDKDSVDSICRLVCRRGRLEVESKLTIGSPSSPSISNRILYTFDSKLFEACHERGVIYTRYADDIYFSTREPDVLHEIEQIVTDLVRATVPELSLNRKKTQRASRKRRVLITGLVITSDRKISVGRDLKRSVRTQIHLWKQGNLPLEDIPRLRGLVSFIAGTEPEFLSSISRKYGAESIERLLNPAIN

SEQ ID NO: 4360 - protein, 326 aa, unidentified
  source 1..326: note = Related to DNQH01000067.1; note = Candidatus Andersenbacteria bacterium
MMNNDNLITAWSGLLRSSSEDVIRFIFTAPHRYKHYKIPKKTGGFRDIYHPTPELKAVQRWLNANIFSSLRIHDAVYSYRNGRSIKDHASIHLSSNYFLRLDFKDFFPSIELSWVEEFLRFNSNNNIIPCDLTTISTISHVVCRYSEKEKTNALSIGAPTSPILSNAILYDLDQAVSRLCSENDVIYSRYADDIYLSTKHKNSLDRIGSDVLELVGKLVPMLQINQKKTIYSSRKRKVNITGLNISTERNVSVGRELKRSVKTEFHLWCIGKLPNEKLTRLRGMISYVKGVEPSFFDALRNKFGAEKMESFLSLNIAPIEFVEIPF

SEQ ID NO: 4361 - protein, 322 aa, Pseudoxanthomonas spadix
  source 1..322: note = Related to QFOJ01000011.1
MNKNELLIKLATHLDILPEEVEHILKSAPYRYKHYTLKKRGGGARDIYHPTPEMKAIQTWLVANIFAALPVHESVYSYRSGLSIADHARVHVKSKFVTKLDLQSFFPSIAGIQVRAMLRAANAAKKVALTDDAIATIVRFCCRGDRGGGDLRLSIGSPSSPAISNAILYGLDENLKKASHHVGVTYTRYADDLYFSTSDRDVLAGVERAARSIIARYGFLKVNEDKTQRTSKKRRVVITGLTATSAGGVSIGRGRKRKIKTELYLHFSERLPLDKIGTLRGLVSFSMGVEPNFYHSLCLKFGENRMRAFIAEGGNGGQSAPF

SEQ ID NO: 4362 - protein, 321 aa, unidentified
  source 1..321: note = Related to JACPTK010000096.1; note = Betaproteobacteria bacterium
MTLLSRMAADMGLSSAYIHKIAVSASHRYKVYSVRKRTGGRRVIEHPARELKLLQTWLLDKLFSHFRASDSVYSYRIGKSIRGHANNHRRNSFLLKIDLKDFFPSITSEDVYKFLKDRQNDLSSPLTPTDCRLIAAIVCRRGRLTIGAPSSPAISNSILYRFDLAIATFCRQRGVTYTRYADDLFFSTNTPNLLTEINKEVRRCLSALPYPRLKINPEKTVFTSRKRLRLVTGVVLTSDKRLSVGRAKKRMLRTLVYLFSTDRLDEKKTAYLRGNLAYVASIEPTFIGSLEKKFGKRVLDRLHKQPLINLKPKSRSAEGFK

SEQ ID NO: 4363 - protein, 305 aa, Nitrospira sp.
  source 1..305: note = Related to DMQK01000160.1
MFLQQLVKITGLSEAYIIKLARTASHRYRTYQIPKRKSGVRTIDHPSRHLKFLQRWLVRNIFSYAPVHPSVYSYKEGVSIRQHASLHVKSKYTLRIDFRDFFPSIKSADVQKLLDKNVERFPFQLTDRDIHIILSLSSKDGKLTIGAPCSPAVSNAIMYDFDKHWSQRSKRLNVIYSRYADDIYFSTNRSGVLSKILSELKEHLATRDSPRLILNNAKTVFASRKRRRVVTGIVITPTRKLSLGREKKRQLRTLTFLFGKGQLDRDRAKSLQGFLSYASTIEPIFISRLRKKFGDELISKIVQMP

SEQ ID NO: 4364 - protein, 337 aa, Parvibaculum sp.
  source 1..337: note = Related to NZ_WESC01000006.1
MILERIARETGIGVDHLRVIVKTASRRYKTYTIPKRTGGRRTISHPTPEVKFLQRWLVRNMFSALPVHHAVASYREGVGIADNAQAHVRKNYLLKIDFKNFFPSIRAADIRHLLEKNSSRFSDILTDDDVQVITDIVCKNGALSIGAPSSPILSNAILIDFDEFVFQASKDREVIYTRYADDLFLSTDKPNCLSVMMELIRIRLSSGGQPSLSINEEKSVFTSRKRNRTVTGLVLTSDRTLSVGRKKKRQIRTMIHLYQEDKLSAESISYLRGYLAFVHAAEPDLLVRLQQKFGQETMDQLMCYPLVPRKGHGRGAQRPAIPLGAHKTGSPQNSSDS

SEQ ID NO: 4365 - protein, 309 aa, unidentified
  source 1..309: note = Related to CP053449.1; note = Proteobacteria bacterium
MRIAQIIAKQTSAVTAAHLIALANSANHRYKTYKISKRNGQHRTIEHPSRQLKFVQRWLGRKLFSKFPIHSKAFAYVRGKSIAHHAEIHVSNNYLLRIDFKNFFPSITAENIKHKLNDFRYKDGSNLEPAEIDFITKIVTKSGQLTIGAPSSPIISNILMYEFDHYWDQYSSERGITYSRYADDIYFSTNVPNLLNQCLIDVREYLRENPNPRLFINDNKVVHTSKKRNRTVTGLTLTSDRKVSIGRDRKRQIRSLIFKHKNGLLNEQQIGQLSGILSYVRSVEPEFITSIEQKYGGAFINSISGVNQT

SEQ ID NO: 4366 - protein, 317 aa, unidentified
  source 1..317: note = Related to JACQAP010000013.1; note = Betaproteobacteria bacterium
MILRSMAADMRVPVAYIELIATTASHRYKIYRIRKRTGGTREISHPSKELKGLQRWLVLHVFSQLPIHDSVYSYRNGLSIRDHAEVHKRNNYLVRIDFKDFFPSITAKDVARLLLANRQNLPLTITAADLKAICWIACRNGRLTIGAPSSPVISNAVLYPLDEYWFNTCEQRGISYSRYADDIYLSTNAPNVLATIYKEIRKDLEEREWPKLQINQRKVVFTSRKHNRNVTGLILTSDRRVSIGHKKKRWLRSQVFKFMEGQLPAEQVSYLRGYLSFAKSVEPSFLTRLRKKYGASVIHQIANIQPMQLKLVKVRKK

SEQ ID NO: 4367 - protein, 317 aa, unidentified
  source 1..317: note = Related to SCTX01000106.1; note = Betaproteobacteria bacterium
MILRKMAEDMRVPLAHIELLATTANHRYKIYRIPKRTGGTREISHPSKELKSLQRWLALHLFSRLPIHDSVYSYRIGVGIRDHAEIHKRGNYLVRIDLKDFFPSITSKDVARLLIENRQKLGQIITATDLKAICWIVCRNGRLTIGAPSSPVISNAVLYAVDEYWSVTCEQRGITYSRYADDIYLSTNRPNILAGTYDEMRKDLENREWPKLQINRRKVVFTSRKHNRNVTGLILTSDRRVSIGHEKKRQIRSQVFKFTQDQLSAEQVSYLRGYLSFAKSVEPSFLTRLRKKFGVSVIHQIANTQSIQIKKVKARKQ

SEQ ID NO: 4368 - protein, 306 aa, unidentified
  source 1..306: note = Related to JAIQGJ010000086.1; note = Acidobacteriia bacterium
MILERISAQLALPTPFLGKLARTASHRYKEYPIKKKSGGTRTIHHPARELKLIQTWLLHNVLIRLPVHAAATAYRQGFSIKRNAEMHVSHNYLLRIDFQNFFPSLTGIDVVGILQANRQKLADVEVTDQDIIFITQIVCRYNSLTIGAPTSPQLSNAIMFKFDETWSRMAQALEVTYSRYADNLYFSTNRPDTLREILGRLRESLNEVGHPALKINEDKTIFSSRKRRRLAAGLVLTSDRKISIGREKKRWIKSLVNRFKYKQLKPEEVASLRGWISYLRSIEPTFVLSLERKYGLDLAANSTWEV

SEQ ID NO: 4369 - protein, 314 aa, Arcobacter sp.
  source 1..314: note = Related to DQSS01000385.1
MNIFQEEISSHFSKSYRDIFRYALSASRRYKSYTIPKRTGGSRDIVQPSKELKEYQRYIVSTLFNKLPVHYAVYSYQKEKNIKQMATKHINARFLLRIDFKEFFPSIKGEHIRSFLKSNVDYLETSINDYDLTLINLLVCKSNKLTIGAPSSPVISNTILYELDNFLFDKCNVEGIVYTRYADDLYFSTIHPNKLKTILPLLKQYLKTFFIRLVINEDKNIYTSKKRRQQITGLTLTTDKKLSVGRKKKRYIKSLIYKYSQQNIVPEEINYLKGYMSYLYSIEPDYIEKLRKKYSSELVGELLPLRHKEENDEE

SEQ ID NO: 4370 - protein, 309 aa, Sulfurovum sp.
  source 1..309: note = Related to JAIZOJ010000089.1
MNIFQEEISRHFEKSYRDIFQYASRASRRYKSYTIPKKTGGSRKIIQPSKELKEYQRYLIETIFNKLPVHDAVYSYREGRSIKQMAEKHIDARYLLRIDFKEFFPSIRGEHIREFLTSNIHHIELSISDYDLTLINLLVCKSNKLTIGAPSSPIISNTILYELDKFLFDTCHAENIIYTRYADDLYFSTMCPNKLQTLLPILKQYLKTFFIRLAINEDKNIYTSKKRKQQVTGLTLTTDKKISVGRKKKRYIRSLIHKYSQQNITGEEANYLKGYMSYLYSIEPDYIENLVRKYSKETIAELLPLKNNN

SEQ ID NO: 4371 - protein, 309 aa, Sulfurimonas sp.
  source 1..309: note = Related to NZ_CP041235.1
MNTFQKQLSEKFEKPFLEIYQFAYSASRRYKTYNIPKRTGGNRIISQPSKELKEYQRYLITKVFSKFPIHESVYSYQDGKNIKGMALNHVNKRFLLRVDFKSFFPSIKGEYIRGFLVKNIELYELSLSKNDITLINMFVCKSNQLSIGAPSSPIISNILLYELDSYLSEICTNLNIIYTRYADDMYFSTNQTNQLEKILPLLKEYLKSFYIKLVVNEDKNIFTSKKRRQIVTGLILTTDGNISVGKNKKREIKSLIYQYIKQTISSADLNYLKGYLPYLYSIEPSYIDILKRKYTEKIICKLLPLKQDI

SEQ ID NO: 4372 - protein, 308 aa, Arcobacter caeni
  source 1..308: note = Related to MUXE01000017.1
MLKFNELLKKEDDIDFFKLYLFSLDASRKYKTYSIKKRKGGLRTINHPSKELKKYQRILSKLIFSKLPIHESVFSYKKRISIKNLAEQHKNNRFLLRIDFKDFFPSLTSKNIRELLEKNLSLFDFELSKDDITLINNIVCKSNKLTIGAPTSPIISNALLYDFDCEMNNFSKKIKYSRYADDLYFSSNIPNLLQNIIPYIKTFLLNYKIKLQINEDKNIYTSKKRKRCVTGLVLTTDNEISIGREKKKYLKSLIFKYIKKTITSEELIYLKGYLSFVKSVEESFLNNLIKKYNPVIIKEIQELKNIVI

SEQ ID NO: 4373 - protein, 307 aa, Aliarcobacter cryaerophilus
  source 1..307: note = Related to CP021072.1
MIFLESICKRFEKNLNQIVDFSTTANKRYKTYKIKKRTSGTRTIEQPSQELKLYQKFISEKIFLNLPVHEAVFSYKKNISIKNLADKHKNNRYLLRIDFKDFFPSIKGDNIRLFLKNSNLKLSDLEITLINLFVCKNNKLTIGASSSPSITNAILFSFDDDVYKFCLEQNIIYSRYADDLYFSTNEEGILSSILEYVKNYIFSYKIDLHINYDKNIYTSKKHRRIITGLTITTDGNISVGRKQKQYIKSLINSYKYKCLEDEQINYLKGYLNFLVYIEPTYIDNLKNKYGEVIINELFINKFNNKCN

SEQ ID NO: 4374 - protein, 310 aa, unidentified
  source 1..310: note = Related to CP053451.1; note = Proteobacteria bacterium
MIVKRIAQETGLDSAYLDKVVRTASHRYKTYKIAKKNGGLRIISHPAKELKFLQRWLVSNLFCHLPIHSAVFSYREGRNIKQLAETHIANNFLLRIDFEGFFPSILVRDVSNLLKNSIDVLPFQLSRSDVNKIGMIVCKDGRITIGAPSSPMLSNAILFNIDTEIADACVKKGVVYTRYADDLYFSTNEPMVLQEVFEGVKGVLRKNKSPKIRINAEKTIFTSRKHKKMVTGLYITPDRRVSIGRQKKRAIKALVYSYINQSIAEEDMSYLRGYLSYIKSVEPGFLRSLEKKYGQEVLQKIMIHEYVKRK

SEQ ID NO: 4375 - protein, 331 aa, Chromobacterium violaceum
  source 1..331: note = Related to JAFBBB010000001.1
MNLIKVMADKFGLSPDFVQKTISFAPRSYKRFEISKKNGQKRTVYQPARKVKLLQSFVSDEIIKRFPLHPAVFSYREGLSIRDNAEQHRRNNYLLRLDFRNFFESIEIKDVIQFFIRNVKNAPFVLSHDDILLLSQLCCFRADDGKLRVVIGAPSSPSIANAILYDFDVEVFDHCKSQGIIYTRYADDLYFSTNHQNLLSKIPEFVSRVLSQTSSPRLMINEKKTYHTSKKHRRIVTGLTITSENRISIGRDRKREIRTLVFKCISNSIDIDKKEYLRGLLSYVSSVDPDFFFSLLRKFGEDAIYSIQKNQPQSDRNVLSTEESDSGEFPF

SEQ ID NO: 4376 - protein, 305 aa, unidentified
  source 1..305: note = Related to JACRMO010000001.1; note = Gammaproteobacteria bacterium
MIIQQIAKSSGIEASYLRTIVSTASHRYKIYKIPKKTGGEREIHHPSRELKYLQRWLVDNVFAYLPVHEAVFSYRDGKSIRDLAKKHANSRYMLRLDFASFFPSIVGSDVVRLLKNNVGSVPISLTTHDLMDIRNIVCRFGRLTIGAPSSPVISNAILFEFDNYIYSKCKQIGIRYTRYADDLIFSSQKTGVLSRVEADVIAALKHLPGPKLAINDKKTVFSSGKNRRKVVGLVITSEKKISIGRDKKRYVKSLVYKYINGILSADELVYLRGYLAFVNSVEPEFLAMLSAKYGSDKIRLITHPV

SEQ ID NO: 4377 - protein, 324 aa, unidentified
  source 1..324: note = Related to PAHM01000018.1; note = Bdellovibrionaceae bacterium
MTLNEIAKNLGVRISTLQSIARQANYLYISYRVKKYDGSYRTINHPSRRLKAIQREILKQVFSKAPVHVNVYSYKKGISIGDLARYHAGASYLTRFDFTKFFESILQSDIDLLIEKLIDSGSIDLLKSDIQTISKLVTLKGALTIGAPSSPMISNCIMYSFDVFCADYCRSKGVKYSRYADDIYLSSSSPNVLKPLGAFLITNFSKHTSLKLSLNRDKSLFTSKKHGMKVTGLTLTSDGKVSLGREKKRKIRSMLHHFSHGRLDERQAESLRGYLNFALNMEPTFITSMKAKFGKEIKQLSISPPKPKRWPFYSRQSIGIRGSY

SEQ ID NO: 4378 - protein, 333 aa, unidentified
  source 1..333: note = Related to JAFGUG010000057.1; note = Thiotrichales bacterium
MSIVKKIAEENGVPEHLINRIVNSSNHAYKTYEIAKKNGDTRTICHPSKKVKALQYWLNQNVFCHLPVHSSVYSYRSGLSILDVAKEHVGKKYFLKLDFKAFFPSITADDLRRHLHKHNNLVELDRDDIEVALKIVSYQEALTIGSPSSPILSNSILYDFDDKLTLFCIDKGVTYTRYADDLTFSTNDSNVLTEINSFTRELLQGFDGVKLKINEDKTQFLSKKGRVRILGLILTSDGKISVGREKKREIRSLVNRFKYDAIEPDHDSNGNVLSTIEEKKRSLQGYISFIESIEPDFISSLKNKYDENVIEAIKKFSYEEAIQSRTVIDRTPS

SEQ ID NO: 4379 - protein, 315 aa, unidentified
  source 1..315: note = Related to WGNH01000025.1; note = Alphaproteobacteria bacterium
MMIYPRTLTGTIDIENFLRKRPMLIDKFSKEIGLPRPSVQKIAASANYLYKHYTIPKRSGGERDIYHPTPRLKLVQRWITRHVIRDLPVSDAAMAYRKGKSITDNARLHAGKRFLLKMDFTDFFPSIKARDLQPILTSRGYDPEDVNFILTICFKSGSLTIGAPSSPAVSNIVMFALDQEFKGIADRRKLTYSRYADDLTFAGNVRGNLIEAKKDVERLIGTWASPNLTLNQRKTVLVSSAHRQKVTGITLTTDGEISIGREKKRELRAIVHRSTYQKLEPEVEAYVQGWLAYANSIEPKFVDSLRKKFDTYLDF

SEQ ID NO: 4380 - protein, 313 aa, Duganella sp.
  source 1..313: note = Related to FNEQ01000013.1
MSLRDRLEKSLPFSRKEIDLLVLSAPLRYKTYQIPKKTLGKFREVSQPTPEVKLLQRWLISNVFGDFAVHDAAKAYRNGIGLLQNVAPHKNHRYLLKLDFSNFFPSISSGHFFEFMDGKGYDHDDLIVMSRVFFKNYRKTASLRLAIGAPSSPALSNILLYDLDVAISNFCRNLDITYTRYADDLSFSTNTAEVLSEVEKNISKIIKENCIINLTLNEEKTVHASKKNGRKITGLTITSDNKISIGLQQKKLLRAKIDRYQKGLLTQDAIDSLKGYIAFVDSVEPEHLVRLTKRYGIEIMRQLYTRINLENNI

SEQ ID NO: 4381 - protein, 312 aa, Massilia guangdongensis
  source 1..312: note = Related to NZ_WWCJ01000015.1
MSLRDQLLRALPFNATELDLLIWSAPLRYKTYYIKKRQPGLFREVSQPTPEVKLLQRWLVANVLSNFPVHTSAKAYKRGTGLIENVQPHVQHRFLLKVDFENFFPSIKADHFIRFASDAGIDDLDSNLMKQVLFKRTKGTGSLALAIGAPSSPHLSNLMLHSLDCALALTASRENIAYTRYADDLSFSTSTPGVLSEFEKKLPLIIRENCDIPLKLNAEKTIHASKKSGRRITGLTITPQGTISVGLEQKKLLRSQIHRFSKNELNAESIQSLTGYIAYLASIEPAHLVRLARYYGIDVMRALYPPISDLLV

SEQ ID NO: 4382 - protein, 305 aa, Janthinobacterium sp.
  source 1..305: note = Related to JABXFH010000020.1
MSLKKILEKSLPFSSKEIDFFVMSAPLRYKVYKIKKKEPGKFREVSQPSAEVKLLQRWLMLNVLVKFKVHDSAKAYKAGVGLLDNVSPHVNNRFLLKMDFENFFPSITSGDFFDFMVGKGYDYEDIVVMVSILFKKDRADDSLRLAIGAPSSPLLSNILLYNFDVALDDYCQTLGVVYTRYADDLSFSTKNSGVLNGVEKALGGIIESSCSISLKVNRDKTIHSSKKNGRKITGLVIGSDNKVSIGLERKRLLRSQVYRFKKGFLDPEQVGSLKGYIAFLQSVEPEHVKRLINIYGRETMFLLLS

SEQ ID NO: 4383 - protein, 306 aa, Cupriavidus basilensis
  source 1..306: note = Related to AHJE01000051.1
MSLKDRLLRALPFSRQELELLISTAPFRYKEYKIPKRKEGAFRLIAQPTPEVKLVQRWLVKNELSTLPIHSAAKAYKADTGLIENVIPHKNHRFLLKLDFENFFPSITASDFHQFMEDNGFSNTDIPTLINLLFKRDHATKSLRLAIGAPSSPTISNILLYPLDRALDNHCSDLAVSYTRYADDLSFSTNLPGILKDIEQSVPALIKASCSLNLRINKNKTTHTSKKRGRRVTGLVITSENEISVGRFRKRLLRAQIHHFGAGKLPPEETEALRGYLSFLNSVEPDQIDRLRIFYGKELMSRLMSR

SEQ ID NO: 4384 - protein, 305 aa, Undibacterium flavidum
  source 1..305: note = Related to NZ_JACOGA010000020.1
MSLRTRLLANLPFSKNELNLLIASAPIRYKEYSIPKRQPNKRREVSQPTPEIKLIQRWVVENELNKFPIHESARAYKKNVGLIANVLPHKNNRYLLKVDFKDFFPSITNHDFRKFMIGTEFSDDDLHDLSQILFKADHKTKTLRLAIGAPSSPLLSNILLYSLDSVIHDHCKEIEVTYTRYADDLSFSTNRPNLLTSLYENLPILISSGTDIHLTVNIEKTVHTSKGNGRRITGLTITEKNEISIGRERKRILNAQVFRFKNNLLSIEDIEKLKGYISFLRSVEPEHINRLIQKYGESTILALQR

SEQ ID NO: 4385 - protein, 305 aa, Herbaspirillum sp.
  source 1..305: note = Related to JABFMQ010000002.1
MLLKELMLESLPFSSGELEVLIGTAPFRYKEYKIPKRDSDKFRQISQPTPEVKLLQRWVVVNVLSQFPVHPAATAYRSGRGLLENVRPHQKNRFLLKVDFKDFFPSITSENFKVFLKESSYSDAEIRILCNILFKLDRRTEQLRLAIGAPSSPALSNILMYRFDEVISKFCDRLYVVYTRYADDLTFSTNERDVLCKVEKALPEVIAEFGLIALTVNQEKTRHASKKTGRQITGLNISSEGEVSIGRDRKRLLRVQIFKFSKGELTADEIDSLRGYIAFLQYAEPAHVTRLRSSFGDDLISRLCS

SEQ ID NO: 4386 - protein, 305 aa, Advenella sp.
  source 1..305: note = Related to NZ_JABUXU010000010.1
MSLKTDLLQALPFTEHELTMLIATAPRRYKEYTIEKRRRPERRNIAQPTPEIKTLQRWLSKNVLSKFPIHASATAYRKDVGLSANVSPHLGNRFLLKIDFKNFFPSIESDDLVAYLEKKAELTNDDCYILTQILFKKNVEKGKLTLAVGAPSSPQVSNILLFQFDEAVSNYCLAHNIAYTRYADDLSFSTSTPVILRDCLSVVRKIIQDLPYPKLVINEEKTVETSKKRGRRITGLTITNDDTISIGRLQKRKLRVLIHRFKTGNLDACEQESLRGYLAFLNSVEPKHVERLKISFGVDTLALLL

SEQ ID NO: 4387 - protein, 305 aa, Paralcaligenes sp.
  source 1..305: note = Related to NZ_CP089848.1
MSLKVDLLQALPFTAQELDVLIATAPRRYKEYTIEKRNKTGRRNIAQPTPEIKTLQRWLSKNVLSNFPIHASATAYRTGVGLAQNISPHLNNRFLLKIDFQNFFPSITSDDLLAYLEKRKEFTDDDRYVLTQILFKRDAERRKLTLAVGAPSSPQLSNILLFQFDEDISAFCIENKIAYTRYADDLSFSTSTPEILRGCLNTVRQILRDLQHPRLLINDGKTVETSKKRGRRITGLTITNEGAISVGRLQKRELRVLIHRFLNGHLDACEQESLRGYLAFLYSVEPTHIERLKASFGASTLASLL

SEQ ID NO: 4388 - protein, 304 aa, Achromobacter marplatensis
  source 1..304: note = Related to ALJE01000030.1
MSLRSKILMDLPFTERELSLLIISAPRRYKEYWIPKRNGRQRLIAQPTPEIKLLQRWLVQNYLSGFPVHAAATAYRQGIGLKENVLPHLRNRYMLKLDFENFFPSLKSSDLLNFLKDAPLDQVDINMLAQLLFRKADLGLELAVGAPSSPHLSNVLMYKLDDRINGFCTANGIAYTRYADDLTFSTSKPHVLRECLQFVTSALAETASPKLRLNAEKTVETSKKRGRRVTGLSISTESKISIGRDKKRDLRVLVHRFTKGDLNAEEIQKLRGYCAFLRSVEPEHLDRLAKSFGVEVLLALTEGY

SEQ ID NO: 4389 - protein, 306 aa, Burkholderia stagnalis
  source 1..306: note = Related to QTOY01000016.1
MALKDLMLESLPFTSTELDRLIETAPLRYKEYEIPKRNSDDKRPIAQPTPEVKLMQRWLMDEVLRKFKIHHAATAYRKGVQLVDNVRPHANNRFMLKLDFRNFFPSIIAKDFASYLVKSGWRNRDDIHLLCNVIFKFNRRRKLLELSIGAPSSPMVSNFLMFDIDQEIYQYCKDNEITYTRYADDLTFSTNRTEILRDCKDFVVDVLDNTDSPLLRLNVDKIVETSVKRGRRVTGLGITSDNKVSIGREKKRALRLEIYRYINGYLSATDSEALRGYLAFLKSVEPEHIQRLQKSFDDDRLGGLLP

SEQ ID NO: 4390 - protein, 315 aa, unidentified
  source 1..315: note = Related to CAKMAA020000066.1; note = Candidatus Nitrotoga sp. HW29
MSIFDRMLRELPFSASELKYLIATAQYRYKVYKIPKRQSNQFRTIAQPSPEIKLLQRWLMSDILSTFPINKAATAYREGRSIADHASLHAKKKFLLKMDFKNFFPSISAEDVHRYLIEYRKVSPEDTRLIGLLVCWRNKTDGKLCLSIGAPSSPLLSNAMLYTFDKVVTKLCRDQKVTYSRYADDLAFSTNKKEVLSVITTNIYDICNNLVYPRLVINEQKTVSISRSYRRVLVGLVLTPTGKVSLGREKKRRLRSELYRFSQGRLNLADVPKLRGELAFAWSVESDFIFTLLRQFSEGVFRQLDLPFSLPNEIN

SEQ ID NO: 4391 - protein, 315 aa, Noviherbaspirillum sp.
  source 1..315: note = Related to NZ_QYUN01000002.1
MSLLQKMLIDLPFSGDELKALISTAPYRYKVYQIPKRQPNQFRTIAQPSAEIKVIQRWLIKNVLSSLPIHKAATAYRLGESISDHAVIHADKRFLLKMDFEDFFPSISAADIQMHLIQSGKLSQDDARLVRQIVCWFDKIKGGFCLSIGAPSSPLLSNALLYTFDKKITQLLKGKKVSYSRYADDLAFSTNRTDVLSTIPAQVQSICDELEYPQLRINHSKTVSTSRAFRRTLVGLVLTPTGEVSLGREKKRRMRSELYRFSKGLLAVTETPRLRGELAFAWSVERAFINSLVRQFGIEVFRILDLPFGEEYDLN

SEQ ID NO: 4392 - protein, 312 aa, Solimonas sp.
  source 1..312: note = Related to NZ_CP031704.1
MNLLDRMIDELPFSKEELLEIIATASYRYKVFQIPKRQPGQWRTIAQPTPEVKLLQRWLVDNVLSQLPVHRAATAYREGVSIYAHAEKHVDKKYLLKMDFQDFFPSISADAVQQHLLGVGKIKEKDATLIRALVTWRNKVSGKRCLSIGAPSSPILSNTMMYRFDTEISIIAKRYGAVYSRYADDMAFSTNRKGVLTELSREVESLCGKLPYPRLTLNKQKTVYTSRAYKRVLVGLVLTPDRKVSLGREKKRELRSKLYRLLKGAPGVDSASLRGELAFANSVEPEFISSLVRQFGTDAFLQLGLPFGSSKA

SEQ ID NO: 4393 - protein, 312 aa, Methylotenera sp.
  source 1..312: note = Related to NZ_ARWF01000001.1
MSIFNRMLTELPYSKDELLNLIATAQFRYKVYKIPKRKPNQFRTIAQPSPEIKLIQRWLVKSVLADLPLHKVATAYRKGKSIADHANLHKKYQFLLKMDFKDFFPSINVLDVRNYLIETANMSEDDARLVSSLVCWKDKEKNRLCLSIGAPSSPHLSNIIMYEFDEQVSIMCKELNVSYSRYADDLAFSTSQKNVLEKIPNIIKNICLALEYPKLIINDSKTVSTSRAKGRVVVGLVLTSEGNISLGREKKRQLRYELYKFSKGVLDHESISKLRGDLAFVWSVEERFIHTLLRQFGNEVFTNLELPFQKAD

SEQ ID NO: 4394 - protein, 313 aa, Acidovorax sp.
  source 1..313: note = Related to JAGKSE010000017.1
MKLLQLLLREVPFEKQELLTIIATASRRYKVYQIPKKDGKSVRTIAQPAPEVKLLQRILHEKLIGKWPIHKAATAYISEQSIADHVRRHVNSKYLLKLDFKNFFPSITAADIRQHARRHSKLGEDDLDIFVNIVAWRNNLDHSFCLSIGAPSSPAISNSMMFEFDESISAFCKKKEVTYSRYADDLAFSTTHRDTLKEVEAEVHRLTLSIQSPKLTINEKKTVNVSKKYNRSLVGLTITPDQKVSLGRERKRDIRAKLYLYGRGYLNGEDVAHLRGLLAYAWSIEPTFILSLAEKQGNELFAKLELPFRNLKD

SEQ ID NO: 4395 - protein, 308 aa, unidentified
  source 1..308: note = Related to JAGOGO010000002.1; note = Deltaproteobacteria bacterium
MVVSLLAKLSKDLLLPKERLEYLIRSAPYRYKVYEVPKRSGTGMRTIAQPAKEVKRLQYWVIENLFPRLPIHPSATAYIKAKNILNNSELHVAKPYLLKLDFVDFFPSIKGDDFIQYIRELNNLDLDELDLQLLVRILFWYPKRIHNLQLSVGAPSSPYLSNAIMHRFDSEIESYCCQRSITYTRYADDMTFSMMEKAARSEVLNRVLQVIQQLPFPKLQINQKKTIFGSKAHRRMVTGLVLSNAGRVSLGREKKRRIRAQIHHLITGHLTPQEKSSLRGMLAFARSIEPNFVERMEQKYGKRVLSNI

SEQ ID NO: 4396 - protein, 311 aa, unidentified
  source 1..311: note = Related to JACRDD010000019.1; note = Desulfobacterales bacterium
MISSLLGSMSADLLIPKDRLDYLLRSAPYRYKVYQIPKRSGSGTRTIAQPAKEVKSLQYWVIKNIYPFFPIHPSATAYTIGKSILKNSEAHATKPYLLKLDFKDFFPSITGNDFLQYSKNIKQLALSDRDLRLLMRLLFWLSERNYDFRLSIGAPTSPFLSNAIMYQFDQVVFDYCNERNISYTRYADDMAFSMHNIKMRSEVLEMVQNTLTSLPFPKLQLNHKKTIFGSKAHRRIVTGLVLSNNDTVSLGREKKRRIRAQIHHLLLGRLDNKEISKLKGMLAFAHDIEPAFVERMVEKYGEKVIKSLRSA

SEQ ID NO: 4397 - protein, 306 aa, unidentified
  source 1..306: note = Related to VRUF01000040.1; note = Planctomycetes bacterium
MTLLGQMSKDLLVPKGGLVYLMRSAPHRYKVFPIPKHSGKGQRIIAQPAREVKRLQYWVIKNLFPRLEIHPAATAYIHGRNIRYNTEIHSQLPYILKLDLKDYFPSLKGDDFKRYASNHSGLSLSDEEVDHLVRLLFWQRDKDSQLQLSIGAPSSPGLSNALMYSFDSEIFSFCNANGINYTRYADDMAFSMREKEKRGDALRKVTEILEVMESPKLHINDGKTVFGSKAHRRMLTGLILTNDGRVSLGREKKRRIRSQIYHFIKGDLSDTKRQYLQGMLSFSKDVEPEFIRRMEKKYGIETLNSI

SEQ ID NO: 4398 - protein, 309 aa, unidentified
  source 1..309: note = Related to PHBJ01000028.1; note = Deltaproteobacteria bacterium HGW-Deltaproteobacteria-13
MKDVLLEKMSYDLLLKKEQIIHLILSAPHRYKVYQIPKKSGAGMRTIAQPAKEVKILQYWVIENCFPLMPIHRAATAYVKDKNIRDNCEPHIKNPYFLKLDFKDFFPSIKSDDFIQYMKNIGNITFDDIDIQRLARILFWCPKEYTGLQLSIGAPSSPYLSNAIMYRFDNEIDLYCTQHNISYTRYADDMTFSMLDKTLRENVQQKVIELLQSIPFPQLELNNKKTIWGSKAHRRMITGLIISNDEKISLGRERKRRIRAQLNYAINGKLTPEQKKSLSGMLAFVRNIEPDFVLRLEKKYGRELISNLR

SEQ ID NO: 4399 - protein, 305 aa, unidentified
  source 1..305: note = Related to MVRX01000406.1; note = Syntrophaceae bacterium PtaU1.Bin231
MLADRIADDLLLPMEMLQYLVRSAPHRYRVYRIPKHSGSGFRTIAQPAREVRMLQYWVMKNIFPELPVHSAATAYCAGKNIRDNCAPHAANPYLLKLDFRNFFPSIKAGDFIQYAAEARHLPFDPPELRMLACILFRRPKGKKEMVLSVGAPSSPYLSNALLYGFDDEMSRYCESRGIVYTRYADDMAFSMQDKAKRLEVLHKVRDVLRQMPFPRLTLNDRKTVFASKAHRRSITGLTLANDGRISLGRERKRQISAQLHHFVNGKLPQEERGKLRGLLSYVKDIEPAFFTRMAEKYGREKIAGI

SEQ ID NO: 4400 - protein, 306 aa, unidentified
  source 1..306: note = Related to VGGK01000004.1; note = Chlorobi bacterium
MANELLISQMSNDFMLPEKKLKKLILSAPYRYKVYSIPKRSGKGYRVIAQPAKEVKILQYWIVRNVLCKFVVHDAARAYVKGCGLLSNVSPHCYSKYLMKLDFKDFFYSIKAGDFLSYFSLYKDFGYSDMDIQEMVKILFYARNKGDYCLSIGAPSSPLLSNIIMSDFDKRVVEFCSSRSIVYTRYSDDMTFSMSDSLLRREVFFEIKRLLDIIPYPRLKLNEDKTLFLSKANKRMVTGLVLSNDGRISIGHDKKRMLRSKIYKYTKGHLDVDEVNQLKGMLAYVNSVEPDFICKMKIRYGDLIIF

SEQ ID NO: 4401 - protein, 309 aa, Pseudodesulfovibrio profundus
  source 1..309: note = Related to NZ_LT907975.1
MGSKSVSFSLISKISSDLLIPVENLRYIIRTSPYRYKKYSIPKRRGRGVRSIAQPAKEVKKLQYWVIKNVLSKYPVHPAATAYKKESSILQNAEIHLDSRCLLKLDFEDFFPSILATDIVHFFEKGSLEFDEEEVNALASILSWARTRTAERVVAIGAPSSPMLTNIMLYDFDSVVRRWCDETKINYTRYADDISLSGDSKESLAEAKRKIAELLEEMNSPRLSLNNDKTVFAMKPFRRFVTGLYLSNEDKISLGRDKKRAIRAKVHHFVNGKFNQDQIQHLRGVIAFARSVEPEFVERLENKFGKLFQ

SEQ ID NO: 4402 - protein, 307 aa, unidentified
  source 1..307: note = Related to MEKZ01000132.1; note = Acidobacteria bacterium RIFCSPLOWO2_12_FULL_60_22
MLKNLGAALLLSQQELSRLISSAPHRYKTYLIEKRNRGQYRTIAQPAKEVKALQYWVIQNVLNMFHVHPAAIGYQRGKNIADNARSHVNSRFLLKLDFKDFFPSIRSADFDLYIRKQQIQITDQEVAALSRILFWNPKGTKDMCLAIGAPSSPGLSNILMFEFDSAVEAFCSEAGVSYTRYADDLSFSANLSDELRRVEEWVTHLCDNLESPRLSLNREKTVRVSKKRARRVTGLVLTNDSKVSIGRDQKRRIRASVHHFATGRLPEDQSRKLRGLLAYINSVEPSFLNRLRHKYGADTIKRLQSAT

SEQ ID NO: 4403 - protein, 316 aa, Burkholderia sp.
  source 1..316: note = Related to FUZY01000002.1
MDLIDRLQSAFPLSRPEVELIIRTAPLRYKLHFIEKRNGRGQRQIAQPTAELKLVQRWLVSEFVNNLPVHPAAVAYRPQLGIKDHARKHAAKRYLLKLDFKDFFPSIQARDFHAHLARYTELSLPDKHALTRLLFRLDRETKEMVLSIGAPSSPAVSNTVMYRFDSMVSDYCKDLRVEYTRYADDLAFSTDQPHVLDEIQNHVRQLCRAMEYPSLTLNEGKSVFTSKKHQRQLTGLILTNEGKVSLGREKKREIRAMAHRFSNGDLSAEDVSRLRGLLAFAMSIEPQYVESLVRMIGQQSYHSLMRPGRRTHSSDQ

SEQ ID NO: 4404 - protein, 314 aa, Variovorax sp.
  source 1..314: note = Related to NZ_LMEK01000025.1
MNLIERLQIAFPFSRREVELLIHTAPRRYKIHSIEKRNGRGLRMIAQPTAELKLVQRWLVSNYLQSLPVHSAATAYRPSLGIKDHAQLHASGKYLLKLDFEDFFPSIRGEDFRQHVARFSDVTLPDQTAMVRLLFRADVDAKRLILSIGAPSSPAVSNTVMYSFDLAVKEYCEQAGVRYSRYADDLAFSTNVPHILEAVKTRVVEICRTLEYPRLRLNEGKTVFTSKKHQRQLTGLILSNDGRASLGREKKRKIRATAHHFAQGVLSPEEVGKLRGLIAFAMSIDAEFVASINNMLGEQIFKELMRGNGEVAEG

SEQ ID NO: 4405 - protein, 308 aa, Burkholderia contaminans
  source 1..308: note = Related to JAIZPW010000002.1
MNLIDRLQAAFPLSRAEAASMIETAPRRYKIHLIEKRNGRGLRQIAQPTAELKLVQRWIVANYINALPVHQAAMAYRPDLGIKDHAKEHATKKYLLKLDFRDFFPSIKANDFKQHLTRHTEISEADKVAITRLLFRYDRENQDMRLSIGAPSSPSVSNTVMFHFDTIASDYCNAAGVQYTRYADDLAFSTNTPHILDELQNFVRETCRQLDYPRLTLNEEKSVFTSKKFQRQLTGLILTNEGSVSLGREKKRLMRAMAHRFNLGTLSLDDTKKLRGLLAFAISIEPEYVNSIIRMIGEPSYKSLMRGN

SEQ ID NO: 4406 - protein, 310 aa, Burkholderia gladioli
  source 1..310: note = Related to NZ_CADFAD010000001.1
MDLIDRLQAAFPLSRAEVELLIKTAPRRYKIHTIEKRNGRGLREIAQPTAELKLVQRWIVSTYINELPVHSAAIAYRPGLGIKDHAKKHAARKYLLKLDFKDFFPSIRAGDLRAHLTHHTDLSTADKSALMRLLFRLDSENGAMVLSIGAPSSPAISNTVMYPFDIAIADYCRENDIAYTRYADDLAFSTDTPHVLDALQDFIRKTCRGLIYPSLTLNEKKTVFTSKKFQRQLTGLILTNDGTVSLGREKKRDLRAMAHHFSRGALSNEEMSRLRGLLAFAMSIEPQFVHSIIRMIGKEAYAQLMHASGT

SEQ ID NO: 4407 - protein, 305 aa, Alcaligenes faecalis
  source 1..305: note = Related to DOIE01000002.1
MNIIENLQKAYPLSKEEVEFFIQSAPRRYKVHHIEKRNGRGLRVIAQPTAELKIIQRWVTKKFINKLPVHDSAMAYRLGKGIKNHANSHAQQKYLLKLDFKDFFPSIKPRDLKLHLANYTDLHKDDISVILKLLFRYDKSKGLSLSIGAPSSPAVSNTIMYPFDEMVSDYCKKRKIKYTRYADDLAFSTNHPHILDVLQNFIRELCESLKYPKLKLNEEKSVFTSKKFQRQLTGLILTNDGKISLGRDKKRLIRAMAHNYKIDKLDPKEVSRLRGWLAFALSVEPEYVESIKRMLDKDIYEKLMK

SEQ ID NO: 4408 - protein, 327 aa, Massilia sp.
  source 1..327: note = Related to CP063848.1
MDATNSELLELLCDEHPLTRAEAWELILTAPRRYKIHYIEKRNGRGRRLIAQPTAELKAIQRWIISKYIAAMPVHEAATAYRPHKNISDHARVHAKNKYLLKVDFKDFFPSIRDRDFVQHAVKHLGISTRLASELSFLLFRRDENKGLSLSIGAPSSPSVSNSLMYEFDLKLSEYCDANEIVYTRYADDLALSTNKPHELDKANEFIRELLGCIRYPRIEINPEKTVFTSKKFQRQLTGLILSNEGKVSLGRDRKRSIRAMADHYRKGKLAPELHTKLKGWLAFSLSVEPDFVRSIRTMMGEFHYFKLVSVNEKMEAEGIIPSGDEW

SEQ ID NO: 4409 - protein, 327 aa, Duganella margarita
  source 1..327: note = Related to NZ_WWCS01000001.1
MDATNSQLLELLCEEHPFTRAEAWELIRSAPKRYKVHFIEKRNGRGRRLIAQPTAELKTIQRWIVNKFIAPLPVHDVAMAYRPGKNIADHARSHAGNKYLLKIDFKDFFPSIRARDFTRHIVKHLGVNTRLASELALLLFRKDENKRLSLSIGAPSSPSISNTLMYEFDCKLSEYCKENEITYTRYADDLALSTNKPHQLDKANEYIRELLNCVKYPRIMINPEKTVFTSKKFQRQLTGLILSSEGKVSLGRERKRLIRVMADHYRKEKLDPNLHTQLKGWLAFSLSVEPDFVRNIRALMGEEYYSKLISIDVKVATEQLIPADDET

SEQ ID NO: 4410 - protein, 338 aa, Duganella radicis
  source 1..338: note = Related to WNKY01000030.1
MTRSAAKPMRRSMDATNSQLLNLLCDELPFTRTEAWELIRSAPRRYKVHFIEKRNGRGKRLIAQPTAELKAVQRWVVTRFISQMPIHDAASAYRTNRSIGDHARLHARNKYLLKIDFKDFFPSIGARDFKRHAIKYLAIDARLASELALLLFRRDEHKRFTLSIGAPSSPVLSNTLMYEFDSKLSEFCEPKGITYSRYADDLALSTNKPHELDTAFKFINELLNDLAYPRLTINQEKTVFASKKHQRKLTGLTLTNAGDISLGRERKREIRAMADHYRKGKLEGNRHGQLKGWLAFALSVEPEFVRTIRKLLGEEMYAALLSFGDVSAPLVTQLDDRE

SEQ ID NO: 4411 - protein, 323 aa, Janthinobacterium sp.
  source 1..323: note = Related to PEFN01000001.1
MVDNNSELVDMLCDELPFTRTEAAVFIDSACRMYKIHFIEKRNGKGKRLIAQPTAEVKEIQRWIIKKYIKNLPIHNAATAYREGRNIFDHARPHVKNKYLLKVDFKDFFPSIRAHNFSKHIRKHLGISKPLAIDLARVLFRQDEKRRLSLAIGAPSSPSVSNTLLYEFDSQLSIFCQANNIQYTRYADDLALSTDTPKILDEALKFIEKLIKDIPYPKLSINNEKTVFTSKKFKRELTGLILSNDGSVSLGREKKRMIRTMAHKYSSGELHDSLIGRLKGFLAFAHSIEPIFAAKIREKIGEEKYNSLTNFQETNHQKKVQDF

SEQ ID NO: 4412 - protein, 307 aa, unidentified
  source 1..307: note = Related to JACPYR010000019.1; note = Nitrosomonadales bacterium
MNLIEHIQKDFSLSLHDARVLIFTASRRYKLHYIEKRHGRGKRLIAQPTAEIKLLQRWAIESYLSKLPIHRAATAYRPGRGIKDHAEVHADNRYLLKLDFQDFFPSILGRHFLMHLKSHASIADDDAKFLMRLLFRFDRDSQDYVLSIGAPSSPAVSNTIMYDFDNALTDYCKTHDIIYSRYADDLALSTSKPKVLDDAFNFVKQLCKDVPYPRLQLNDTKTVFTSKKHRRQLTGLILTNEGKPSLGREKKRLIRSMAHRFSLSELPDDQILHLRGLLAFAYSIEPLFFSSINRMIGGEAFQRLMKG

SEQ ID NO: 4413 - protein, 307 aa, unidentified
  source 1..307: note = Related to MGWP01000046.1; note = Gallionellales bacterium GWA2_55_18
MNIIERIQSDFSLSLHDARVLIFTAAYRYKLHYIEKRHGRGKRLIAQPTAEIKLLQRWAVEKYVGQLPIHKAATAYRSGTSIKDHAALHAENCYLLKLDFQDFFPSILGRHFLMHLKSYMKISDDDANLLMRLLFRFDRESQDYVLSIGAPSSPAVSNTVMYDFDNKLTNYCRTHDIVYSRYADDLALSTSKPKVLNNAFDFVKKLCGDMPYPRLQLNDAKTVFTSKKHRRQLTGLVLANDGKPSLGREKKRLIRSMAHHFSLGELPQDQVLHLRGLLAFSFSIEPLFFSSINRMIGEEAFQRLIKG

SEQ ID NO: 4414 - protein, 309 aa, Ferriphaselus sp.
  source 1..309: note = Related to NZ_JQKP01000004.1
MGLIERIQQDFTLTRREVQLLLLTAASRYKLHYIEKRHGRGRRLIAQPTAEIKILQKWAVANYVNLLPIHNAATAYRPGRSIKDHAVAHAGNRYLLKLDFENFFPSITGNNFFDHLKSYLEVSDEDANLLVRLLFRYELVSRNYVLSIGAPSSPAVSNTIMFKFDTALAEYCDANQIAYTRYADDLALSTNTPKVLNDAYNFVRQLCRETQYPRVSLNEKKTVFVSNKFRRELTGLVLSNEGRPSLGREKKRQIRSMAHHFSLGQIPPEDVPHLRGLIAFAISIEPEFIESIKRMISIELFQSLMSGQA

SEQ ID NO: 4415 - protein, 308 aa, Methylotenera sp.
  source 1..308: note = Related to NZ_ARWC01000001.1
MKLITAIQNDLPLSISEIQLLLLSAPHRYKVHEIQKRHNRGTRVIAQPTSEIKVLQRWATTNILAKLPIHSAATAYVAESNTKKHAQAHAKNRYLLKLDFKDFFPSIKADDYLQHLIKYAKIDIDDARLLCRLLFWRDRVSNSLKLSIGAPSSPMVSNTVMYDFDTFVSEFCLKIEVVYTRYADDLAFSTDNPKVLESVHEFIITLCKNLPYPNLQLNEEKTVFVSKKHKRYLTGLVLTNDGKPSVGRDKKRQIRAMVNTYANGNMPDDELNRLRGLIAYAHGIDEKFIDSLIRMVGTENYNKLISGR

SEQ ID NO: 4416 - protein, 323 aa, unidentified
  source 1..323: note = Related to SSDX01000104.1; note = Rhodocyclaceae bacterium
MCQGQERITKFIRSNDMNVIRTIVNAYPLSLREAAVLIQTAPARYKVHQIEKRHGRGTRTIAQPTAEIKLLQKLLVREVIEKLPVNDAAKAYRSGQSIADHARPHASNRFLLKLDFKDFFPSIRGADFLKHLHKHSEIGTEDSKHLVKLFFWRPRGTRSLVLSIGAPSSPAISNTIMFDFDSALSDFCTREHVVYTRYADDLAFSTNGPEVLHRVHEHVINLCRTLKYPRLTLNDAKTVYTSKKHHRSLTGLVLSNDGKASLGREKKRQLRAMVHRLKYDLLNQEERAKLKGWIAFALSIDEEFVRSLKRIMGDQTFESLMRG

SEQ ID NO: 4417 - protein, 307 aa, Methylomonas paludis
  source 1..307: note = Related to NZ_CP073754.1
MNVIEIILHEFPLGRQEVERLIRTAPSRYKVHEIEKRNGRGKRTIAQPTAEIKLLQRYLVDRYISNLPVNDAAKAYRLNHNILDHASPHAKNQYLLKLDFKDFFPSIRAVDFIKHLRKYSALSREDMKTLSRVFFWRPKGQRDLILSIGAPSSPAISNTILFDFDSAVIEHCIKNEITYTRYADDLALSTNQPNILNDAYIFVEMLCRSLKTPKLTLNADKTVFTSKKHHRQLTGLVLSNAGTASIGREKKRTIRAMAHHYKQGILSQEEHGRLRGWLAFMMSIDREFVTTIEKMIGEVAFQKLMQD

SEQ ID NO: 4418 - protein, 309 aa, Macromonas sp.
  source 1..309: note = Related to NZ_NWMV01000032.1
MNVLELLQKKLPLSRSELLLLIATAPNRYKVHTIDKRHNRGKRVIAQPTAEVKALQKLLLGILRGKLPVHSCAKAYQPGTSIRDHALPHAPNRYLLKLDFKDFFLSIKGGDFSSHIKRHLDIPDVEIEIFTHAFFWTPKKTMDFVLAIGAPSSPWISNTILFEFDELLTDYCDSKNVKYTRYADDLAFSTNTPHVLKDVHAFVQDICKEIAYPRLNINESKTVFTSKKNSRSLTGLILSNEGSVSIGRAKKREIRAMAHKYQIGALDLESTLHLQGLLAFMQSIDPDFNQSIARMVGNDRYLTLTKQLQ

SEQ ID NO: 4419 - protein, 307 aa, Collimonas arenae
  source 1..307: note = Related to NZ_CP009962.1
MKVLDQLFTDFPMSPQQLRILMLTAPYRYKFFHIPKRSGGRRLISQPAKEVKWLQRYVIEIIRKKIPVHRCATAYEPGSSIFANAEAHVQNRFLLKMDFKNFFPSITDMDVSHLIKSAYPDIEDGELELIVRLLVMSDKKNEKFVLAAGAPSSPFISNALLNQFDTELHLHCLSQNVVYTRYADDIALSTNAPLLLSELHKFIRVLVNEMKHPVLKINEEKTVYTSKKHNRKVTGLTLNSQKQVSLGRDMKRELRAAVDKFRKNELSQEAVSTLRGKLAFALAVEPEFVLRLRTHYTDEVITRLFQS

SEQ ID NO: 4420 - protein, 310 aa, Pusillimonas sp.
  source 1..310: note = Related to NIQA01000002.1
MNMKSLISLLVDELPFSEREIRELLNSAPSRYKVHYIEKRKGRGLRQIAQPTAEIKLLQRWAINQYRDQLPVHPTAKAYISDSGIRQHAAAHVKNSYLLKLDFKDFFPSIKGIDVRRHLAKHLGAPSEDLSLLMKLFCWKGKPVGGLRLSIGAPSSPFISNSIMFEMDEKIQKKCSDYDATYTRYADDLAISTNQKDALSAIYEHILELCDSSKYPSLKINPGKTVFTSKKHNRHLTGLTLSSDGKVSLGRDRKRLIRAMTHAYTTGKLNPDELGKLRGWIAFAYSIEPDFVESLERMIGLQALNRIRRT

SEQ ID NO: 4421 - protein, 300 aa, Cardiobacterium sp.
  source 1..300: note = Related to NZ_OU745373.1
MSLLQELSDKFQLHEQLMESFIKSAPYRYKFHKIDKRHGGKREIAQPVKSLKIVQRWLVKHYLSKYPTHSKSAIAYIKNKNIKDFAEPHRNNIFLLKLDFKDFFNSIKISDFYIFCEKLSIPEEDKIFLGLLLFCKNKQDEPYLSIGAPSSPTLSNVLMFNFDNEVFNLCKKDGIIYTRYADDLAFSTNQPNVLRQLLSNIKELCAKLNYPRNLQINTQKTIFTSKKYNRTLTGLVISNDGNVGIGREKKRKLRAIAHQAKLGRLSQDKVGSLLGKIAFLKGIDPSFAKQLEDKYLKHIS

SEQ ID NO: 4422 - protein, 300 aa, Haemophilus influenzae
  source 1..300: note = Related to CP005967.1
MLINDLKEKFSLNEKEILSFINSSPSRYKSYNIKKRHGGTREIAEPTRSLKILQSWALNKYLSKYKIHPSAIAYVKNKNIKDFVLPHSNNKYLLKIDFKNFFNSIKGIDFLHFLEDKKSDLSNEERHLLTNIFFCKNKTSESKELYLSIGAPSSPFISNIIMIDFDDQISQLCANIGVTYTRYADDLAFSTNNPNILDELLEEIEIICKNLNYPKKLEINSEKTVFTSRKHNRTLTGLVISNDGKISIGREKKRKLRVIAHKASLRLLDQESLDKFKGTLAFLLSIDPDFSNYLKQKANI

SEQ ID NO: 4423 - protein, 302 aa, Neisseria sp.
  source 1..302: note = Related to LUAO01000054.1
MLSVLENFKKTFSFSTVSAIIFIQTAPNRYKFHTIQKRHGGEREIAQPTKSLKIVQRWVINQYFQNSPIHKAATAYIKGKGILDHAEQHKSNKYLLKLDFKNFFNSINIQDFYEFINRSMPQFSEEDRDILGLLLFCKNKDDNYYLSIGAPSSPHVSNIILYKFDCLIQEICSKKGVVYTRYADDLAFSTNIPHILKGILCDIEHILSNLEYPKNLKLNQEKTVFLSRKHNRTLTGLVISNTGKISIGRDKKRKLRAAIHNAIHGKLTDEEIQTLKGRIAFLKGIDKEFAIKLEQELQSANL

SEQ ID NO: 4424 - protein, 306 aa, Eikenella corrodens
  source 1..306: note = Related to NZ_LXSJ01000026.1
MSTIFDKICETFSLNPHEAEIFIKTAPERYKLHSISKRHGGVRYIHQPTKNLKFIQRWLVNSYFSSMPIHSCAHAYVKNRNILSNAKPHSHNKYLMKLDFSDFFTSITIRDFLIFAHDNLREFSYEEHHILASLLFCRHKINGDFVLSIGAPSSPIISNIMLYHFDQVLYDFCRTKYVYYTRYADDLSFSTNQPRILKEEVFPFVEGLCKTISYPNYLKLNKNKVVHVSKKFNRRITGLVLSNEGNISIGRDKKRQLRAMAHQMSLNKLPPEKINKLLGYINFLKGKIDPEFAEQLIQKLNNKHNK

SEQ ID NO: 4425 - protein, 319 aa, Burkholderia ubonensis
  source 1..319: note = Related to NZ_LPEB01000197.1
MNIINAPLFERLLALSPFSARELGILIATAPHRYKDHYIEKRNGRGKRLISQPTAELKFLQRLIVKHEFSSLPIHGAATAYRSGSSIKAHALPHAHSRYLLKLDFSDFFPSLKANALRYRLSRDASYTEQELWILCQLLCRQPRRDAGLQLSIGAPSSPCVSNYLMWEFDSRLAEFCAACGTAYTRYADDIAVSTTFADVLDVVEAEVRRLLGELGYLGLSLNEGKTVNVSTKSRRTLVGLVLANDGTVSIGREEKRRLRATMHRLTQGGLSGDEVARFRGQLAFAHSIDASFVDLLCARHNFPNVASIGSPDGGDLTD

SEQ ID NO: 4426 - protein, 319 aa, Burkholderia lata
  source 1..319: note = Related to CABVPW010000018.1
MSIANEPLFERLLALSPFSARELGTLVATAPYRYKDHYIEKRNGRGKRLISQPTAELKFLQRLIVRHEFSSLPIHEAATAYRPHRSIKAHALPHASARYLLKLDFRDYFPSLKASALRYRLSRDATYTEQELWILCQLLCRKPKRDAELQLSIGAPSSPHVSNYLMGEFDSRLTDFCGACGAEYTRYADDIAVSTSFPHVLDAVEGEIRRLLGELSYLGLSLNEGKTVNVSKKNRRVLVGLVLANNGVVSIGREEKRRLRATMHRLVQGALPADEVAHFRGQLAFVYSIDPAFVTSLCARYDFPNVGSIGAPSGGDSTD

SEQ ID NO: 4427 - protein, 319 aa, Paraburkholderia sp.
  source 1..319: note = Related to NZ_JAELTS010000025.1
MSIINEPLFERLLTLSPFSARELGILIATAPYRYKSHYIEKRNGRGKRLISQPTAELKFLQRLVVKHEMSSLQIHNAATAYRPNRSIKEHALPHARARYLLKLDFRDFFPSLKATALRHRLLADANYSAQELWMLCQILCRRPRRDAELQLSIGAPSSPYVSNYLMYEFDSKLARSCEACGAEYTRYADDIAISTSFPQILDIIEVEVRRLLGELDYLGLSLNEGKTVNVSTKNRRTLVGLVLANDGNVSIGREEKRRLRAAMHKLTQGKLPVEETARLRGQLAFAYSIDPDFVNDLCARSNFASVAAISQPDNGKQTD

SEQ ID NO: 4428 - protein, 315 aa, Paraburkholderia dipogonis
  source 1..315: note = Related to NZ_SNVI01000005.1
MSIVNEPLFDRLLALSPFSARELGVLIATAPHRYKNHYIEKRNGRGKRLISQPTAELKFLQRLIVKHEMSSLPIHDAATAYRSQRSIKEHALPHARARYLLKLDFRDFFPSLKATALRHRLLLDANYTEPELWMLCQILFRKAGRHTDLQLSIGAPSSPHISNYLMWEFDKKLAQFCELLGAEYTRYADDIAVSTSFPHLLDAVEAEIRRLLGELDYLGLSLNEGKTVNVSTKSRRTLVGLVLANDGTVSIGREEKRRLRATMHRLVQGLLAGEEVARLRGQLAFVYSIDRAFVDSLCARHGFTSVGSIGQPTSD

SEQ ID NO: 4429 - protein, 317 aa, Burkholderia cenocepacia
  source 1..317: note = Related to CP007783.1
MNIISTPLFSRVLENSPFSERELLMLVLTAPERYKDHYIEKRHGRGKRLISQPTAEIKYLQRLIVARELSELPIHPAATAYRVGCSIKDHALLHASNRYLLKLDFTDFFHSIKQDAVLSCLSRDTSYSVNEQWMLVQLLCHRPRGAGDLQLSIGAPSSPFMSNYVMHEFDNKVDRMCRASGAVYSRYADDMAISSSLPRVLDAVEHQIRALLLEMKSPKLRLNESKTVNVSKKNRRTLVGLTLSNEGSVSIGRDEKRRLRAMMHALTEGRLDVTSVSLLRGKLAFAQSIDSVFVSQLCRRHGFSSVKDIRPPISSIG

SEQ ID NO: 4430 - protein, 316 aa, Nitrosomonas sp.
  source 1..316: note = Related to QWIC01000028.1
MSFAREPLFVRLLDLTPFSERDLAILIATAPRRYKDHYIEKRNGRGKRLISQPTAELKFVQRLLIKHELTHLQLHEASVAYRSGSSIMDHASPHASARYLLKLDFKDFFPSLKASTLQYRFTKDSDYSENEKWILCQLLCRGSLITGDLQLSIGAPSSPYISNYLMWEFDTKLTEFCKKYSAEYTRYADDLAISTSQPHALDKIESEVRRLLMELSYLKLTLNEDKKVNVSKKNRRTLVSLRLANDGNVSVGRQRKRQLRAAMNALIHGRLSTAEISRFRGMMAFVYSIDPNFVDQLCSKNGFATISAIDAVKIKK

SEQ ID NO: 4431 - protein, 315 aa, Acidithiobacillus ferrooxidans
  source 1..315: note = Related to CP001132.1
MSIVTEPLFQRLLAWSPFSEHELVVLIATAPSRYKAYYIEKRGGRGQREISQPTKEIKFLQRLLASKELRELPIHDVAVGYRSGRSILDHAQPHASARYLLKLDFTNFFPSLKSKALDHRLSRDTAYSTAERWILRNLLCRRTPGTGNYQLSIGAPSSPHISNYLLCEFDQLMSDYCGIRVVRYTRYADDLAFSTSIPSVLNDIETEVRRLIQELDYLGLSLNEAKTINVSTKHRRTLVGLTLSNDGRASIGRIAKRELRQAIHSLRHGLLSQSEIANLRGRLAFTYAIDPEFIEHLLHRYGFESISTIDGPQTD

SEQ ID NO: 4432 - protein, 330 aa, Chromobacterium amazonense
  source 1..330: note = Related to NZ_MKCR01000001.1
MIPEYESLFARILAQSPFSSKELVTLLGTAPDRYKDHFIQKRNGRGLRQISQPTAELKFLQRLLVNFEFCNLPVHNAATAYRAEKSIKSHAVEHAKNSYLLKLDFKDFFPSIGSDAIKHRLRLDMNYSETELWMLCQILCRRDRLTNRLQLSIGAPSSPFLSNYIMWEFDCRIQSYCDQLGVSYTRYADDLAFSTSVPHILDVVHEYVERLLRELSYLGISLNKEKTVNVSKKNRRSLVGLVLSNSGNVSIGRAEKRNLRAAMHALINNKLTQDEAGKLRGKMAFLLAIDPDFVNGLCVKYNFTRVADIQATNYDSSQPQKNDGTDDLPF

SEQ ID NO: 4433 - protein, 312 aa, Acidithiobacillus thiooxidans
  source 1..312: note = Related to CP045571.1
MNFRSANLFTRLLEMSPLSARELSRVIATAPHRYKSHFIEKRHGRGKRLISQPTAELKYFQRWLVDNELNQLPVHDAATAYRKGRSILDHATPHAKQRYLLKLDFKDFFPSLNEHALRHCLERDCNYSEEEIEILCNLLLKSASIEGGPLQLSIGAPSSPFISNYLMWEFDIAMQQYCEVMGVMYSRYADDLAFSTDTPRLLDKVFDTVQKILASISYLPLILHPDKTVNVSKKRRRLLVGLTLANDGNVSIGREEKRRLRAALHAYTQGRLPCDEVARLAGMLSFVWSIDPKFVENLCQRHGFSRISDLLR

SEQ ID NO: 4434 - protein, 316 aa, Nitrosospira briensis
  source 1..316: note = Related to NZ_CP012371.1
MRISDASLFERIIENTPFSEAELVLLILTGPTRYKDHWINKRHGRGKRLISQPTAELKLVQRWLVSSELSSLPVDVHATAYRKGLSIRDHVSPHTRSHFLLKLDFKDFFPSLTDSALRYRLEHDANYTELEVLILTKLLFRKKQSEETYRLSIGAPSSPFISNYLLLDFDRRLADYCESNYLHYTRYADDIAISVNRAGTLDFAKVFVERLISELPYLGLRLNEEKTVNVSKKFRRQLVGLVISNQGKVSLGREEKRRLRAAVHSLALGKLDVRQSVQLRGQLAFCLSIDRDFVITLCNRHGFQRVCDLPSGSDAS

SEQ ID NO: 4435 - protein, 315 aa, Methylotenera sp.
  source 1..315: note = Related to JABFSF010000055.1
MKLSSTPLFLRLLELTPYSEYELATLILTAPTRYKEHYIVKRHGRGKRLISQPTAELKLLQHTTINKELNKLEIHNSATAYRCGSSILHHAQPHANSNFLLKLDFKDFFPSLTDKALKHKLRADTNYSELEIDILRNILLKKDRKSGNFNLSIGAPSSPYVSNYLMNEFDMLVSIYCKTKKLAYSRYADDIAISSTKPYLLDEAKSYIDDVLLKLDYLGLILNQEKTVNVSKKHHRELVGLVLSNDGQVSLGRDGKRNLRAGVNALINGKLDEIAASKLKGQLAFYMAIDRDFVLNMCKKYGFNSIVELSKKSKP

SEQ ID NO: 4436 - protein, 326 aa, unidentified
  source 1..326: note = Related to JACPOI010000036.1; note = Burkholderiales bacterium
MSFLETNMFARMVERSPFSYTDLAILILTAPKRYKEHHIKKRSGGLRLIAQPTKELKFVQRLLISNELSHLKVSEAAAAYVKERSIKEHAEKHAGNRYLLKLDFKDFFPSITKDAINRLLIQQTDLSADERYIACQLLLRSPKKEETLRLSIGAPSSPFISNCVMYEFDEKLLGYCQANGITYSRYADDIALSTQNPRTLDPAKAFVEGLLSQLDYLKLSLNPAKTVNVSTKNRRTLTGLVLSNEGTASIGRDKKRLIRAQVHSMIKGQLSTEEAVSLKGHLSFLYSVDKSFVVNLARRYGLDAKSLMTYRTSSTDSLPPQPDKSS

SEQ ID NO: 4437 - protein, 341 aa, Malikia spinosa
  source 1..341: note = Related to NZ_PVLR01000019.1
MAEFDNNNLFLTLLNQSPFSSGELKTLISTAPQRYKNHFIEKRNGRGRRLISQPTRELKGLQRSLLSIIDEVIAPSAVAVAYRKGKSIKDHAAPHAKNSYLLKLDFKDFFPSIDWFTISHCFKETGKFSDDEIKIMNFILCRYDSEPISLRGSFKLSIGAPSSPPISNFIMRDFDETLENFCKNESVTYTRYADDLALSCSIPRKLDEVKNFIASILDEKKYLNLFLNEGKTVNVSKKNKRSLVGIVLSNEGVISIGRDKKRLIRATLHKASQGLLTEKQLEKLKGHLSYYINIDRDFVYSLVGKYGFGSVSQVSFETIKYPEVFSARDNLFFGRDDGIPF

SEQ ID NO: 4438 - protein, 311 aa, Sphingomonas sp.
  source 1..311: note = Related to NZ_AP022673.1
MSQLLPLFVAESGMDPHDIVRIIRTAPRRYKVFFIPKRSGEPREIAQPARELKVLQRILVDKVLCKLPVHDAATAYRKGLSILDNSDPHSGSTPILKLDFENFFPSITESDWLRYCRENSILREDDREIAARILFRRAKGERTLKLSIGAPSSPMLSNILLYRFDSLVEAAALKRGLKYTRYADDMSFSGQRAGMLKDMIKEVAEAARIARYPRLKLNKSKTTFVTTATRRSVTGVILSNDGTVGIGHGRKRLISSKVHHAMLNKLSVDEVRQLAGELAFVNVVEPIFLAWLRNKYGEQTIDNIKRLILPI

SEQ ID NO: 4439 - protein, 309 aa, Sphingobium sp.
  source 1..309: note = Related to NZ_CP016456.1
MSDLVNLFVAESGMAHDDVLRIIRSAPQRYKVFSIPKRSGGTREIAQPARELKVLQRVLVDSILCNLPVHSAATAYRKGRSILDNAIPHKGGLPILKLDFENFFPSIVADDWINYCNDHDIFDNNDRLMSAKILFRRAKGERILKLSIGAPSSPIVSNILMFEFDTLVTESANKRRLNYTRYADDMTFSGQRAGMLKDMVKEVASAARSVSYPRLNLNRSKTTFVTAATRRSVTGVVLSNDGEVGIGHQRKRIISAKVHYSTQGKLNIDQLRTLAGELAFINVVEPAFLSWLSAKYGEPAIEKIKHLEI

SEQ ID NO: 4440 - protein, 312 aa, unidentified
  source 1..312: note = Related to JADKHG010000002.1; note = Sphingomonadales bacterium
MLSKFLKQLSVHTGLSEADLLKIWTNAPDRYKVFRIRKRSGGWREIAQPARELKLVQRALVEILLSQLPVHDAATAYVRGRSILDNATPHRGDTPILKLDFRDFFPSILAEDWEAYCAAHDVIQGSDVHLTSRMLFRRPRSSTKLRLSIGAPSSPMLSNVLMYEFDDAIDKIAKDKGIAYTRYADDLTFSGQRIGMLQDMVRAVKKTLRNQSSPKLRLNQSKTVFVTMASKRTVTGVVLANDGTAGIGRGRKRELSAAVHHAKMGKLEKSELKELCGHLAFANAIDPDFLKFLAKKYGSEVIRAIQSAVELK

SEQ ID NO: 4441 - protein, 310 aa, Caulobacter vibrioides
  source 1..310: note = Related to APMP01000001.1
MSDLIRLLSAETGLSNSDLIRIIRTAPRRYKVFYIPKRTGGMREIAQPARELKVLQRVLVGRLLGALPVHDAARAYRTGMSIRDNAAPHAGSGPILKMDFRDFFPSIRSTDWQRYCRDHDILSEEDREITSLIFFRRNKGEKIFRLSIGAPSSPVLSNVLMYDFDTQVSAEAERRGIAYTRYADDLTFSGQRAGMLKDMVGEVEKAARKVKYPRLQVHGEKTTYITASRRRTVTGVTLANDGALSLGRDKKRLLSAGVHHASLGKLSAEQMEELAGQLAFANVVEPEFLDRLRAKYGEAVDLVRRSVRSS

SEQ ID NO: 4442 - protein, 311 aa, Bradyrhizobium sp.
  source 1..311: note = Related to JADPJG010000026.1
MSRVVSLIAVETGLPTDDIHRLIRSAPRRYKVFHIPKRSGGTREIAQPAREVKLLQRVLVTHVLSSLPVHDAAMAYRTGRSILTNATCHAGHGPILKMDFKDFFPSIRAEDWMVFCRNAQLFDESDAELSAQILFRKAKHEHVLKLSIGAPSSPVLSNVLLVPFDVMVAAEASKRGIKYTRYADDLTFSGQRIGMLKDMIDVVRLTTKQIRRPKLTINSEKTTFVTAKHCRVVTGVTLANDGALSLGRDRKRMLSARVHHAVLGKLNPDELLRLSGDLAFANVAEPSFIDRLSNKYGSEAIQTIRHAPRSS

SEQ ID NO: 4443 - protein, 311 aa, unidentified
  source 1..311: note = Related to nan
MSKLVDLIVSETGLPPSDVLRLIRSAPRRYKVYRIPKRSGGEREIAQPAREIKLLQRVLVDKVLSSLPVHRAATAYMKGCSIAANASYHAGSGPILKMDFRDFFPSIRAEDWVLFCRNTHVFDENDAELSAQILFRRAKHEHVLKLSIGAPSSPILSNILLMPFDTMVMAEASKRHIRYTRYADDLTFSGQRIGMLKDMIDVVRLTVRQVQRPKLTVNLDKTTFVTAKHRRVVTGVTLANDGLLSLGHDKKRRLSAAVHRAIHGGLDSKELLSLSGDLAFAKVIEPSFLDRLARKYGPEAVQMIRHAPRQS

SEQ ID NO: 4444 - protein, 311 aa, Loktanella sp.
  source 1..311: note = Related to JAFWCE010000141.1
MGNLINTLSVQTGLSPSDVRLILRTAPRRYKVYTIPKKTGGERVIAQPAREVKLLQRALMSALLEKLPVHENAKAYKMGTSLLGNAQPHSGQSPILKMDFADFFPSIHGIDWLRYCAQSAILDREDSIFSANLLFRLAKHERTLKLSIGSPSSPLISNILMYGFDEIILREATKRKISYTRYADDLTFSGQRVGMLKDMPSIVEKAIREAKGPRLSINKSKTTYVTSRFQRRVTGLVLANDGTVGIGRDKKRLIRSKVHRAINGKLDVKQASELAGYLAYVNSVDPELILSLESTYGIKIFGELIPKLLSK

SEQ ID NO: 4445 - protein, 306 aa, Cereibacter azotoformans
  source 1..306: note = Related to NZ_PHSI01000091.1
MNSLTSLLASQSGLSHADVLRILNTAPKRYKIYSIPKRGGGMREIAQPSREVKLLQRIFVDEVLTKLPVHSAATAYRKGCSIRQNAEAHLGATPILKMDFKDFFPSLHGVDWLRYCRHNRILNESDAALSANLLFRKAKKDRTLKLSIGAPSSPALCNVLLFDFDSYVAEAASRRNIVYTRYADDLTFSGQRFGLLKDMPEIVRTAIREAKGPRLRVNEDKTVFVSSKFQRRVTGLVLTNTGTVSIGREQKRKIRASVHRALLNKLEPNEVASLKGYLAYIKSVEPEFLQVISRTYSDFDTEWLLP

SEQ ID NO: 4446 - protein, 315 aa, Brevundimonas sp.
  source 1..315: note = Related to NZ_CP039435.1
MIDDLIGLLSRMTGLPPSAVRRIILSAPRRYKVYYIDKRSGGKREIAHPARELKLLQRAFLDAVLEDLPVHVSATAYIKGKSLKDNALPHVGAGPILKMDFRDFFPSIRAKDWIAYAREHRVFSNDHDAELSALLLFRRPKGESVLRLSVGAPTSPALSNILMYNFDQAVWASVGERFVTYTRYADDMTFSAARTGFLQGVQTRVSAIIREMSYPKLELNHQKTRFVTEKYHRDVTGLTLSLDNRVTIGQLRKRNIRAGLHQAKLGQLSREELQTLSGHIAFAADIEPEYIGKMKERYGEDLLDWITKGRQSDDR

SEQ ID NO: 4447 - protein, 315 aa, Sphingomonas populi
  source 1..315: note = Related to NZ_SGIS01000054.1
MRSKLVDLLIRELRIGERELAALIATAPDRYKTYFIPKRSGGRREIAHPAFELKIAQRAIISGFLNELPVHHCATAYKKGSSIRQNAERHCHNRAILKYDFKDFFPSITEQAWLSYCDRRKVMDRSDAVLAGRLLFRRPKGGRILRLSIGAPSSPILSNVLLYDFDCQVHERVTAHKITYTRYADDMTFSSERTWNLREVDKILRSVINSLGTPSLTINGSKTTLVTPKYHRQVTGLVLTLDGRVSLGRDRKRLIRARVHHAVSGKLSKAALVNLAGTLAFAKDVEPEFYNRLELTYGRENLETIKYSVRDYHRE

SEQ ID NO: 4448 - protein, 315 aa, Sphingomonas sp.
  source 1..315: note = Related to NZ_JAKRET010000004.1
MTSKLVEFLTRELRIGERELAALISSAPDRYKTYFIPKRSGGKREIAHPAFELKIAQRAMINGFLKDLPVHPCATAYRKGSSIRQNAERHCHNRAILKYDFKEFFPSITERAWLTYCDRHSVLDRSDAISAGRILFRRPKGGRILRLSIGAPSSPILSNILLNDFDREVHQRVSAHKITYTRYADDMTFSAERTWNLREVDGILRSVIRLIGTPSLTINSAKTTLVTPKFHRQVTGLVLTLDGRVSLGRERKKLIRARVHYAINGKLDRHAMAHLAGTLAFAKDVEPEFYTRLERIYGRDNMELIKHSVRGYSRS

SEQ ID NO: 4449 - protein, 315 aa, Novosphingobium sp.
  source 1..315: note = Related to JALHLF010000113.1
MTSPLVELLIRELRISEREVLHLIATAPERYKVYTIPKRNGGRREIAHPAKELKVAQRAVVNSYLNNLPIHDAAMAYKIGRSIKDNAAYHAGSGSILKYDFVEFFPSITEFAWIAYCDRHAVMDRADAIRSGRILFRRPKGGRILRLSIGAPSSPILSNILMHDFDEEVTQLVAEHKIKYTRYADDLTFSAERTGYLTAVDKILRGVIARSKAPKLKINDSKTVLATPKVHRQVTGLILTLDGKVSIGKNKKREIRVKLDYFRKGLLGEREVAPLAGYMSYIWDVERDFYIKMQRHYGEEVLARLQKQGQHKISP

SEQ ID NO: 4450 - protein, 326 aa, Sandarakinorhabdus rubra
  source 1..326: note = Related to NZ_WMHO01000038.1
MTSPLITFLMNELHLGEREVVRLILTAPERYKVYQISKRNGGKREIAQPAPEVKAAQRAIVRAYLLSLPVHPSATAYSPGSSIIKNASAHSDAGPILKYDFKDFFPSITEKAWISYCLRVGLFSKEDAVRSGRLLFRRPKGGRILRLSIGAPSSPIVSNLLMYDFDERLSKLLEGHKIVYTRYADDLTFSAPRTGNLLEVPKAIRAAMNSMSHPKLALNSQKTVLVTKRYQRNITGLILTLDGNISVGRSRKRLIRAGIDHFIRGKLDVDQTVKLAGIIAFTKGVEPTFFAKLTTRYGNDVMGKIMASTKDYKRPRPETVNRTKRR

SEQ ID NO: 4451 - protein, 318 aa, Sphingopyxis panaciterrulae
  source 1..318: note = Related to NZ_JACIJH010000001.1
MTSKLIEFLVSEVGLSARNIERLIQTAPERYKVYHIRKRSGGWREIAQPATELKIVQRAIVEKYLKHLPIHPAATAYVPGSSIRRNAAIHSVNGPILKYDFKEFFPSITERAWLRYCEIHGIFDRVEAIQFGRLLFRRPHGGTILRLSIGAPSSPILSNVLMYEFDKMLHERVAQHSVTYTRYADDLTFSARRTGYLNSVNRILRSTISQVQLPKIKINEEKTVVATEKYRRQVTGLILTNDKRVSLGRERKRNLRAALHHFREGKLDIDQSVKLAGLMAFARDVEPEFYTRMELTYGKDLLSQLKYLVKGYRRPEYR

SEQ ID NO: 4452 - protein, 316 aa, Erythrobacter sp.
  source 1..316: note = Related to DPST01000077.1
MSALISVLQQSLGIDAMSVRRIIATAPERYKVYSIPKRGGAGRRIIAQPAKEVKALQRILLKTFLSDLPVHPSAFAYVPGKSIRTNAVTHVANGPILKMDFQNFFPSIRSYDWLSYCHDNGVFDSEADARMASKILFRREKGESILRLSIGAPSSPHVSNLLMYEFDRAISDKVAEDYVTYTRYADDLTFSAERTGYLTRVEKDVRKTLRDLRYPRLFINDRKTVLATTKYRREVTGLILTNDHRVSLGRHKKRLLRAQIHRYSKGELNNIATAKLAGNMAFASDVEPTFYTRMERVFTKEVMDRLKDSVNRQDQS

SEQ ID NO: 4453 - protein, 314 aa, Sphingomonas sp.
  source 1..314: note = Related to JABFWP010000009.1
MSRLLAVLTEATGLSGYDLARVIATAPHRYKQFTIPKRQGGTRLIAQPAREVKAMQRAIVRAYLSDLPIHPAVTAYEPGTSIRENASRHATNGPILKLDIADFFPSIRADDFLSYCAEHSLFDDESERIAATKILFHRPKGARVLRLAIGAPSSPHISNLLMYHFDRAVASEVGDQFVTYTRYADDLTFSAKRTGYLNPVEKIVRKVLREIGYPRLKLNDSKKVVATKKYHRQVTGLVLSNDGRVSLGRKRKRELRAALHHFAGGKLEPKAQKHLHGMMAFAKDAEPDFYARMQARYGRNVFEALSEALREADE

SEQ ID NO: 4454 - protein, 332 aa, Phenylobacterium sp.
  source 1..332: note = Related to JADCAE010000108.1
MSELLPVLIGATGLSDSDIRRIVSNAPSRYKHFTIKKRNGKDRHISQPSRELKALQRALMEFKLSQLPVHPAAMAYKHDVSILENATAHAGNGPILKYDFVDFFPSIRSKDWQRYCDYYSIFEKSEDKWISERILFQRDKGSRILKLSIGAPSSPILSNIIMNEFDTVISQKVASDNVVYTRYADDITFSAPRVGYLNRIDRIIRRTIKEVPWPRLKINEEKTVLATSKYRRQVTGLVLANDGSVSIGRDRKRSVRAALHRAQHDRLTDQETAYLCGMLAFINSVEPEFLARMENHYGVELLQRLRRHASIGRRPTERSRAKGEDLRIDGSD

SEQ ID NO: 4455 - protein, 314 aa, unidentified
  source 1..314: note = Related to JAGRQC010000004.1; note = Sphingomonadaceae bacterium LXI357
MSKLISILIESTGLTERDVMKIISNAPRRYKHFRIKKRNGSLRDIAQPARELKALQKVIVEKYLLELPVHQAAMAYRKGRSIRENALAHVDNGPILKMDFKEFFPSIRVRDWQAYCEDRSLFMDGDDLHHTSKILFHQSKGESYLKLAIGAPSSPHLSNLLMYKFDALVSQLVQKDYVAYTRYADDLTFSAKRTGYLTGVEKAVRRAIKEVPWPRLSINENKTVVATPRYHRQVTGLVLTNDQEVSLGRDRKRKISAAVHHAKHGELTVEAAARLSGTLAFVNSVEPEFLLRLERKYGREVIDNLKQFPWKLEK

SEQ ID NO: 4456 - protein, 324 aa, Agrobacterium vaccinii
  source 1..324: note = Related to NZ_CP054151.1
MSEILKALSTATGLSDRDLRAIISNSPDRYKVYSIAKRRGGRREIAQPARELKVLQRALNDIVLSKLPVHPAAMAYRPGIGLKQNAQAHSHNGPILKFDFQDFFPSLRAEDWQEYCHRHKVFNDEEDVELSSKIMFRRKNRHSTVLRLAIGAPSSPPLSNILMFDFDIAMQAYCASQKVTYTRYADDITFSAQRTGFLTGVPKALERIVKDLRSPRLKINHDKTVLATKKYKRMVTGLILTNDGSVSLGQQRKRNIRAGVHRWTLGVLSNADICRLAGHLSFAEDIEPAFISRLANKYGAQAIADIKRAYLQQGSDSSQNPVKI

SEQ ID NO: 4457 - protein, 316 aa, Rhizobium sp.
  source 1..316: note = Related to FTMQ01000001.1
MSEILRALSEATGLSDWDLRAIISNAPDRYKVYHIDKRRGGRREIAQPARELKVLQRALHDIFLAKLPVHPAAMAYRPGIGLRQNALAHSHNGPILKFDFQDFFPSLRAEDWEAYCRRHNVFINEEDVNLSSKIIFRRKSRHSSVFRLAIGAPSSPAVSNILMFDFDKTVQSYCESQSVIYTRYADDLTFSAQRTGYLTGVPKALERIIKDQKSPRLKINSEKTVLATKKYKRMVTGLILTNDGDVSLGQLRKRSIRAGVHRWTLGGLSPADTCRLAGHLSFAEDIEPAFVARLARRYGAQAIADIKNAYRQSGAP

SEQ ID NO: 4458 - protein, 315 aa, Rhizobium wenxiniae
  source 1..315: note = Related to NZ_JACHEG010000009.1
MSELISVLSQATGLSDFDLRAIISNAPDRYKVYYIAKRKGGRREIAQPARELKVLQRALNDSILSKLPVHPAAMAYRPGVSLRRNAQAHSHNGPILKFDFQDFFPSLRAEDWEDYCRRHGVFKDDEDIELSSKIMFRRKNRRSSVLRLAIGAPSSPLLSNILLFDFDENLAKYCDSQKITYTRYADDLTFSAKRTGFLNGVEKFLVKLIKDADHPRIKLNLNKTVLATKKYKRMVTGLILTNDGKVSLGQLRKRNMRAGVHQWILGNLSEADTCRLAGHLAFAEDIEPDFVARLTVKYGAQVIAEIKMAYRRRVL

SEQ ID NO: 4459 - protein, 314 aa, Rhizobium chutanense
  source 1..314: note = Related to NZ_NWSV01000001.1
MSELLRMLSEDTGLSEIDLRTIIATAPNRYKTYEIDKRRGGKREISQPARELKVLQRAMVQRILSGLAIHSAAMAYRPGISIRNNAAYHAGDGPILKFDFKDFFPNIQAVDWEKYCEKHSIFDHQEDVKLSSRILFRKSSRYSPVLRLAIGAPSSPMLSNILMFEFDEYMQSYAESQKAKYTRYADDLTFSAPRTGYLNGVEKVLRQAIHKIKNPKLQLNEDKTVLATRKYKRMVTGLILANDGSVSLGHQRKRNMRSAVHHWLLGKLSSAEQANLAGLLAFAEDVEPSFVFALARKYGTSTLKDIKKLADIES

SEQ ID NO: 4460 - protein, 341 aa, Methylosinus sp.
  source 1..341: note = Related to NZ_JADNQW010000005.1
MPQSSKQLKGCNVSDVVQALVAASGLSERDVRTIIATAPSRYKTYSIPKRRGGERIISQPAREVKFLQRIIVEEILSRLPVHDAAMAYREGRSIRDNAAVHAGGGAILKFDFADFFPSIKADDWAAYCRRHSVFKDVDDIRLSANLLFRRTKYGSVLRLAIGAPSSPHLSNILMREFDQRVTEAVAKEKVKYTRYADDLTFSAKRAHNLIGIERVLRRIIREVASPHLRLNEDKTVLATRKYRRVVTGLVLADDGKVSLGRDRKRDIRAALHHYALGQLNGHETARLSGLLAFVNAIEPEFLERLVDKYGPAVIERIKARLPPTANCQQPHDPIIEFKFRE

SEQ ID NO: 4461 - protein, 302 aa, Azospirillum sp.
  source 1..302: note = Related to NZ_JAEPIV010000062.1
MSESDVRLIVLTAPSRYKTYTIPKRNGGERIISQPAREVKFLQRVLVNDVLSQLPVHSAAMAYREGRSIKDNAAAHAGGGAILKFDFSDFFPSIVASDWRAYCERHGVFDNEEDIRLTANLLFHRTKRSSKLRLAIGAPSSPTLSNVLMFDFDQCIAGLVAKDKVRYTRYADDMTFSSKRAGNLSNVERVLRKVLKDLVSPRLRINEKKTVLATKKYRRVVTGLVLSDDGKVSLGRDRKRIIRAMLHHYTLGRLNGEETARLSGLLAFVNAVEPMFLKRLIDNYGVEIVDRLKASLHPNSIF

SEQ ID NO: 4462 - protein, 337 aa, Bradyrhizobium hipponense
  source 1..337: note = Related to NZ_VSTH01000095.1
MSKLLPLLVAGTGLSEPDIIRIVSNAPLRYKSYRIPKRRGGNRTISQPARELKVLQRILTEEFLSKLPVHQSATAYRAGTSIKHNALAHALNGPILKFDFANFFPSIGARDWTVYCEREGLMLEARDIWISSNIFFHRWSRQGRLSLAIGAPSSPCLSNVLMNEFDEKIANAVASDQVTYTRYADDLAFSAKRTGYLNQVEKILRRTIKEIKFPNLTLNESKTILATKKYKRFVTGLTLTNDGKVSLGRERKRKIRAALKHYADDRLNIHEQAKLAGLISFAHDVERDFVLRMERTYGSELLQALKLVRLPSTRGGGGGGVEFDSDVSDASDPDDDF

SEQ ID NO: 4463 - protein, 318 aa, unidentified
  source 1..318: note = Related to RXJE01000056.1; note = Bradyrhizobiaceae bacterium
MSKLLPLFISDTGLSEHDVLRIVRDAPIRYKTYRIPKRTEGTRVISQPARELKALQRILTAELLSKLPVHPAATAYRPGVSIRANAAAHAPNGPILKYDFKDFFPSITSKDWRNYCENNHVFDNDEDLWISTNILFQKRRGESRLTLAIGAPSSPSISNILMRDFDSTVSALVAKDYVTYTRYADDLTFSARRTGYLTVVDKILKKTLRDMKSPSLTLNPSKTAIATTKYKRFVTGLVLTNDGAVSLGHDRKRKIRATVHHVTLGKLSERQLAELAGMLAFVNDVEPQFLAKLERTYGVDLIQKIKTGRGSSKNFDLD

SEQ ID NO: 4464 - protein, 318 aa, unidentified
  source 1..318: note = Related to nan
MSKIIQILMEETALNEPALRRIIYTAPSRYKTFYIPKRNGKNRRIEQPARELKAIQRVLVQKLLSTLPVHPSATAYRPGLSVRDNAARHAHNGPVLKFDFEDFFPSIRARDWRVYCEKKGLLETEEDIYLTQQIFFRREKGSSVLRLAIGAPSSPALSNILMWDIDAAIAEMIDGEQVSYTRYADDLTFSARRTGYLNGIEKGLRAILRSAGGPRLKINEEKTVLATKKFRRQVTGLILANDGHVSLGRDKKRLIRAAVHRETLGLLETSEREQLAGMLAYVNVAEPLFLARLKKKYGVEAIEELKKAVRPGNEPERP

SEQ ID NO: 4465 - protein, 304 aa, Sphingobium sp.
  source 1..304: note = Related to NC_015976.1
MIEHTGLSRSDILSIARNAPQRYKTYTISKRNGGKRTISQPAREVKVLQKILLEHVLYKLPVHSAATAYRQGISLKENATRHVHNESIKKFDFKDFFPSIKGRDWIKYCGDHGVFADTVDVGLSTHILFHQPANSTILRLAIGAPSSPALSNVLMFEFDKIITDEVAKDEVIYTRYADDLTFSASRMWNMIDVPKVIARAIKNNHYPRLNINPDKTISATKKYKRQVTGLILTNDGKVSLGRKRKREIRAEVHRALIGQLTNDQLMHVQGILAFVEDVEPDYLRRLESYYGAEFIRNLRKRVRE

SEQ ID NO: 4466 - protein, 311 aa, Novosphingobium sp.
  source 1..311: note = Related to NZ_SMBO01000002.1
MSKIIRLLTAETGLPTHDVRAIINRAPISYKHYTIKKRSGADRPIAQPAREVKRLQKILMGFLSDLPVHSAATAYAPGASIKDNAERHAKNGPILKFDFTNFFTSIRERDWKNYCAKYNLFDDPDDVTLSTKLFFCRVPGSTLLRLAIGAPSSPWLSNVLMYEFDDLISRRVRQDQVTYTRYADDLTFSARRTGYLTRVEKILNRTLSEMENPRLTLNQEKTVLATMKYRRVVTGLVLANDGRVTLGRERKRRIRAALHSAFAGKLDAEAMTRLAGMLAFVKSVEPEFFEQIAARYGENVISKLAGSQSQL

SEQ ID NO: 4467 - protein, 309 aa, Novosphingobium sp.
  source 1..309: note = Related to NZ_CP039695.1
MGHLIEQLASGSGLLENDVRKIVATAHRRYKHYTIKKRNGEDRPISQPAKEVKLLQRLFQKQFLQNLPVHPSATAYEKGLSIKENAGRHMHNGPILKLDFKNFFPSIKASDWVAYTEAHGLLDDLEDRELSARLLFKSTRTSAGMRLAIGAPTSPHISNLLMYDFDRLMAERAAREMVTYTRYADDLTFSAKRTGYLQPIEKIVRTTLREINRPRLTLNDEKTVFATTKYRRVVTGLTLTNDGTISIGRERKKLIRAMIHHYEKGLLDAENLRKLVGLLAFANDAEPAFVLRMKLKYGEKLMAEILDLS

SEQ ID NO: 4468 - protein, 316 aa, Sphingopyxis sp.
  source 1..316: note = Related to JAFVHE010000060.1
MSKLIRLLSIQTGLTEQDVERIINRAPDTYKSYTIPKRNGKGNRVISQPAREVKVLQRVLTERLRSLPIHDAAMAYRKGISIRANALKHAQNGPIRKYDFESFFPSIKGLDWEQYCLQNPVFSDPEDILRSINLFFHRAKRHNVLRLAIGAPSSPWLSNVVMFEFDDAVSRAVAKDRVTYTRYADDLTFSAPRTGHLTVVDDIVRKAIRNIQCPRLKLNEAKTTVATKKYRRVVTGLILADDGEVSIGRDKKRLVRAEVHHALTIGVGWEKADKLLGYIAHVRSVEPSFYYRLLAHYGEDFEARVRAKNGPPVFDL

SEQ ID NO: 4469 - protein, 313 aa, Aurantiacibacter atlanticus
  source 1..313: note = Related to NZ_CP011310.1
MSDLIKHLSSETGLSDADVERIIARAPRSYKFYTIDKRTRGKRLISQPAREVKALQRALVKYLDALPIHESATAYRKGKSILDNAAPHSQSGPIKKYDFKDFFHSIRARDWETYCAEKGVFEDQEDVALTARLMFHVTPGSSILRLAMGAPSSPWLSNVLLHDFDKRLADELAKEKIIYTRYADDLTFSAPRTGHLNSVDGILKDIIRDTDAPELTINALKTVVATTKYRRTVTGLVLANDGRVTIGRDRKRYIRSAIYHALKGANTAEENQMLLGYIAFIGSVEPDFVEKLKAKYGPNFVERLSEAHIANNQ

SEQ ID NO: 4470 - protein, 338 aa, Gluconobacter frateurii
  source 1..338: note = Related to NZ_CP092689.1
MMKEHLVTEGEPAVRFPDVLQILSEETGLLISDIRHIISSAEVSYKTYTIPKRSGGMRVISQPSRQVKILQQAIINRILLNLPIHESATAYRKGKSILDNAHPHQGAGRTILKIDFSQFFPSIKSADWVHFCKKNKLMNDIDQYYTSKILFKKEPNMRGLRLAIGAPSSPLISNILMYDFDNAVNELIVSEEVVYTRYADDLTFSAPRTGYLVDVESKLRKIIRKNVHPRLKINEEKTVYATSKYRRSVTGIILTNNGNTSIGRQKKRIISSCVHHAKCGLLSAEDLKKLSGYLAYISSVEPDFLQYLRKKYGDEIIELLKKIGNPNTKVELIPKISV

SEQ ID NO: 4471 - protein, 330 aa, Gluconobacter cerinus
  source 1..330: note = Related to NZ_JAERLO010000011.1
MSEENFVTAQEYRFDNILQILSEETGLLLNDINYIISSAPKSYKTYNIPKRSGGTRTISQPARQVKILQKALIKNVLLNLPVHPAATAYQKGKSILNNAQPHQGEGRSILKIDFSEFFPSIKHFDWIDYCKKNRILNEQDQHYTSRILFKKEVGMRGLRLAIGAPSSPLLSNILMFDFDSAVNDLIVTDKIAYTRYADDLTFSAPRAGYFGEIEKKLRTIIRGMSHPKLKIKEEKTVRATPKFKRSVTGLILTNQGKTSIGRDKKRIISASVHHAKNNNLSQEQMKKLSGYLAYIKSIEPSFLDYLRRKYGEAIMDSLRKMGHPDYRVEN

SEQ ID NO: 4472 - protein, 336 aa, Gluconobacter sphaericus
  source 1..336: note = Related to NZ_CP068419.1
MKNQAPHSITDRFNRSAIENFDLIQILSEETGFLSSDIKRIIHSAPKSYKTYEIPKRTGGKRIISQPAREVKILQRVIIEKVLSHLPIHQFATAYRPGISILNNALPHKGAGRSILKMDFENFFPSIKSHDWITYCEELEILSNEDRALTASLFFKSQPPKRGLRLAIGAPSSPILSNILMYEFDKKIEKEIYGKEIIYTRYADDLTFSSERTGYLLDVRSIVRKALMEIKYPKLKINKEKTKYFTSKYRRSVTGLVLTNQGEVSLGRDKKRSISAGIHNALNGKLNDEEMKSLSGYLAYANSVEPNFLKKMSEKYGDDIMKTLKKFGNPEVNIKI

SEQ ID NO: 4473 - protein, 315 aa, Altererythrobacter sp.
  source 1..315: note = Related to JAEULJ010000003.1
MSDLIALFVHETGLGEHDIRKIVATAPARYKTYAIKKRNGIDRRIISQPARELKLLQRTLIDAVLKNLPVHRSATAYRTGMSIIDNVRPHINSGAILKLDFSDFFPSLRESDWREYCVRNEIFRSEEDIEVSGLVLFKKERQRRELRLSIGAPSSPIVSNILMFDIDSEIESKIVSEEVVYTRYADDMTFSARRTGFLNKVEKNVREILRGSQSLRLQLNDDKTVYATKKYKRQVTGLIITNDATVSVGRERKRNLMAAIHAALSGKLSGDQVRETLGMVSFVISVEPDFKKRIERKNGEDALALLSKLASTKGT

SEQ ID NO: 4474 - protein, 310 aa, unidentified
  source 1..310: note = Related to NZ_JAINWL010000001.1; note = Proposed Citromicrobium bathyomarinum
MGSLYDLLKRETALPDRDLQKIIATAPARYKTYKIPKRNSEKMRVISQPAKEVKLMQRVLMREFLSNFPIHKAATAYKSGSSIRDNAAAHVGRGPILKFDFKDFFPSITENDWRKYAEGRGIAELDIEISTKIFFKKEFNRSLLRLSIGAPSSPILSNILMFGIDERISAEIASDEVSYTRYADDITFSAPRTGYFNGLERHLRMILREIEYPALKINSEKTVYATSKFRRQVTGLVLTNDGQISVGRDRKRNLFAAVHHALNGRLNDEQIEEVLGLIAFVSSIEHDFKDRLEKKYGPEVVRRLYRCKQN

SEQ ID NO: 4475 - protein, 325 aa, Azospirillum brasilense
  source 1..325: note = Related to QFOF01000021.1
MMSWITRMLALHTGLQESAIHRIMVTAPVRYKTFFIPKRNGELRQISQPAREVKLVQRAFSEIILKKLPVHPCATAYIDRKSILHNAQPHAGHGQIVKMDFKNFFPSIRRVDWIHYCQENSIFDSQIDADLSSSLLFQKNKNSGLMRLAIGAPSSPILSNILMYNFDYLVSKAVLKDHVTYTRYADDMTFSAPRTGHLVNVVRIVKSVCRSLNYPRVEINENKTVYATAKYKRAVTGLILTNDGRVTIGRDQKRLIRAMVHHAINTNLTKEALERLAGNLAYINSVEPAFMETLTRKYGAENIQRIRCIWRKDSPKNSTSKKSLT

SEQ ID NO: 4476 - protein, 317 aa, Roseomonas deserti
  source 1..317: note = Related to NZ_MLCO01000142.1
MSELVRKLAQETGVPEPLVREIMLTAPVRYKEFHIVKKSGGLRKISQPAREVKLLQRIATKILLNQLPVHPCATAYRINSGLLNNVKPHAKNSQILKLDLKEFFPSLRLVDWYQYCRRNFMNISSEDITLAGRLFFRKTPKKVSLRLAIGAPSSPSMSNILMYEFDTLVHKYCLTENIVYTRYADDMTFSAPRTGYLVGVIKNVSRIIRKLKSPNLEINSGKTVYATQKYKRSITGLILANNGSITIGRDAKRLTRARVHHAIKGRLTEDEIIKLSGYLSFIMSVEPSFVYTLQVKYGAHQINQILHASLTPKERIE

SEQ ID NO: 4477 - protein, 317 aa, unidentified
  source 1..317: note = Related to JACKJE010000004.1; note = Methylobacteriaceae bacterium
MDLLILETGLGERDVRAIAATAPIRYKTYEIEKRNGGKRLISQPARELKALQRVIVNEVLDKLPVHPAATAYRPSLSIKDNAKPHTVSGAILKLDFKDFFPSLREVDWESYCKQHNIFETPEDIHLSSRILFHRKKTASTLRLAIGAPSSPTLSNVLMFELDTHISKLVASDGITYTRYADDMTFSAPRAWNLVGTLRKVRKLLRDTASPRLQLNTDKTVLVTKKYRRVVTGLVISDDQRVSLGHERKRLLRAAVYRFIQGKLSIREQARLAGNLAFAYSIEPEFIQRLEDRYGTSTITDIKRAPRLLQSSGDNQNR

SEQ ID NO: 4478 - protein, 304 aa, Bradyrhizobium sp.
  source 1..304: note = Related to NZ_CP088280.1
MKLSPWKQGWMWHLSRALCEVHPLDIEPIAFPNVSQPAVEVKALQRGLIEILLRDLPMHHAATAYRVGISIKDNAMRHAGNGPILKMDFKDFFPSIKPRDWSAYCKRTGVLSDSVDIHLTSLLLFQRPKGSSVLRLAIGAPSSPFLSNALMFDFDQAIAEAVAKDHVIYTRYADDLTFSAPRTGHLVNVEKIVRATLRALQYPRLTVNDDKTTRVTRKYGRKVTGLTLTNDGKISIGHKRKRLIHAAVHHASLGKLSPASLGELKGLLGFANSAEPQFINTLRQRYGAALIQRIQTFDIPKRAR

SEQ ID NO: 4479 - protein, 315 aa, unidentified
  source 1..315: note = Related to JAFKKC010000005.1; note = Hyphomicrobiales bacterium
MAAIIERLALATGMDVGLVGRVLRSAPVRYKTYLIPKRTNGFREISQPAVEVKALQRGLIEILLRDLPVHEAATAYRVGMSIKDNAQRHAGNGPILKMDFKDFFPSIKPRDWISYCTETGVLIDQTDIHLTTLLLFHRPKGTSGMRLAIGAPSSPFLSNALMFNFDKAIAEAVAKDHVRYTRYADDLTFSAPRTGHLVNVEKIVRSVLRGLEYPRLLVNQDKTTRVTRKYGRKVTGLTLTNDGRVSIGHGRKRQIRAAVHHASLGKLDERSLAELKGLLGFANSAEPQFVITLIEKYGADIIHQIQKSPNRPRKI

SEQ ID NO: 4480 - protein, 316 aa, Rhizobium pisi
  source 1..316: note = Related to RJJT01000004.1
MMGKIVEALAIETGMDVGLVERIMRSAPARYKTYRIPKRTKGFREISQPAVEVKALQRGLIEVLLRNLPMHEAATAYRVGMSIKDNALRHAGDGPILKMDFKDFFPSIKPRDWSAYCKQTGVLMDPVEIQLTSLLLFQRPKDSSVLRLAIGAPSSPFLSNALMFEFDKAITEAVAKDHVVYSRYADDLTFSAPRTGHLVNVEKIVRATLRALEYPTLTVNDDKTTRVTRKYGRKVTGLTLTNDGKVSIGHERKRFIRAAVHHASLGKLSTASLGELKGLLGFANSAEPQFIGTLKERYGAELIQFIQTFDIPKREQ

SEQ ID NO: 4481 - protein, 318 aa, Paracoccus alcaliphilus
  source 1..318: note = Related to NZ_FODE01000022.1
MSSNIVKALSLQTGMDVLLVERIIQTAPIRYKTYRIPKQAGGFREISQPAIEVKALQRGLIEILLRNLPLHEAATAYRTGMSIRDNALRHAGDGPILKMDFKDFFPSIRPADWSAYCEKTGVLTEADDVKATSLILFHRPKGSSIHRLAIGAPSSPFLSNALMFDFDKLVTDAVGRDHVRYTRYADDLTFSAPRTGHLVNVDRIVRAAIKSIDRPRLKINDDKTTRVTRKYGRKVTGLTLTNDGSVSIGRERKRLIHAAVYRASKGELDLPSLAELKGLLGFANSAEPAFIMTLRERYGDEVIKYIQRYRIPKRIPQQ

SEQ ID NO: 4482 - protein, 319 aa, Mesorhizobium sp.
  source 1..319: note = Related to SRUN01000004.1
MVGIIELLAINTGMDTGLVERIMVTAPVRYKTYFIPKRHGGLRKISQPALEVKVLQRALIEVLLNELPVHDAATAYRTGMSIKDNALRHAGHGPIMKMDFKEFFPSIFARDWDQYCETTEVLTEPREIYLTTRLMFQRPRDSSLLRLAIGAPSSPVLSNALLFEFDEMLTAEVAKDHVVYTRYADDLTFSAPRTGHLVNVEKAVRTVIKAIRRPKLTINEDKTQRITTKFGRHVTGLTLTNDGEVSVGHERKRQLHAAVHRALHGKLDVIELGKLKGILGFVNSAEPEFIVTLRKKYGSKIIDSIQKTPVPLRPRPFKK

SEQ ID NO: 4483 - protein, 319 aa, Rhizobium leguminosarum
  source 1..319: note = Related to WUFV01000007.1
MVGIVEILAIESAMDVGLVERIIRTAPVRYKTYQIPKRAGGNRTISQPAKEVKLLQRSLIDVLLRNLPVHDTATAYREGLSIKDNALRHAGDGPILKMDFKNFFPSITPFDWAEYCKESGTLTDPQDIHMTSLLMFQRPKGSSALRLGIGAPSSPFVSNALLYEFDKRVTAAVAKDHVKYTRYADDLTFSAPRTGHLVNVEKMVRSTLEGLKYPKLAINDEKTTRVTRKYGRKVTGLTLTNDGQVSIGHKRKRLLHSQVHKASLNQLDVDEMVALKGMLGFVNSAEPQFLKVLTRRYGEGVLTRIRRFETEPAGRGTFN

SEQ ID NO: 4484 - protein, 316 aa, Sinorhizobium medicae
  source 1..316: note = Related to RPJK01000002.1
MAGIIEMLAIETAMDTSLVERIIRTAPIRYKTYQIPKRSGGYRTISQPAKEVKLLQRALIDVLLRKLPVHDTATAYREGLSIKDNALRHVGDGPILKMDFKDFFPSIRPGDWAEYCKETGALTDAQDIKLTSFLMFQRPKGSSTLRLAIGAPSSPFVSNALLYDFDNRITAAVAKDHVRYTRYADDLTFSAPRTGHLVNVEKLVRSTIHGLKYPKLMINAEKTTRITRKYGRKVTGLTLTNDGQVSIGHDRKRLLHAQVHRASLNHLDADELLNLKGMLGFVNSAEPHFLEVLRRRYGDAVLTRIQRYEVEPPQKP

SEQ ID NO: 4485 - protein, 315 aa, Mesorhizobium ciceri
  source 1..315: note = Related to NZ_KI912610.1
MSDIVRILAIETGMEMSLVERIIRTAPVRYKTYQIPKRSGGHRTISQPAREVKLLQRALIEVLLRRLPVHEAATAYREGMSIRDNALRHVGGGPILKMDFKDFFPSIRPHDWVEFCKETGAISDLVDIQLTSLLMFQRPKRSSTLRLAIGAPSSPFVSNALLFEFDKRISEAVAKDHVIYTRYADDLTFSAPRTGHLVNVEKMVRSTLRGLGYPKLTVNNEKTTRVTRKYGRKVTGLTLTNDGKVSVGHARKRLLHATVHRASQDKLNSTELGVLKGMLGFVNSVEPQFIEKLRERYGSALIGRIQAYDIPKRKW

SEQ ID NO: 4486 - protein, 318 aa, Mesorhizobium sp.
  source 1..318: note = Related to NZ_WOAC01000018.1
MSIIDILSFESGLEATTVERIIRNAPLRYKTYQIPKRSGGSRTISQPAREVKVLQRALSDVLLRVLPVHEAATAYRPEMSIKDNALRHAGDGPILKMDFKDFFPSIKPRDWTLYCKETGALTDPVDVRQTALLLFQRPKGSAVMRLAIGAPSSPFVSNALLYEFDKRIAAEVARDHVTYTRYADDLTFSAPRTGYLVNVEKMVRTTLAGLEYPKLLINGQKTTRITRKYGRRVTGLTLTNDGRVSIGHERKRILHAQVHSATKDLLDNDQIAELKGMLGFVNSVEPQFLDVLRRRYGHSIITFIQRFESNPPTLDLLE

SEQ ID NO: 4487 - protein, 356 aa, Aurantimonas sp.
  source 1..356: note = Related to JAJAVB010000031.1
MAGDGNRLLERERPGQVQQHPSGFEGRNAMSGIIETLAVETGIEPGLVDRIVRTAPSRYKTYPIDKRGGGTRLISQPAKEVKILQRALNDVLLKHLPVHASATAYRESLSIRENALPHAGIGPILKLDFAEFFPSIKLHDWKKYCEKTGCLTDVHDVEMSGRLIFHRPKGRSTLQLAIGSPCSPFVSNALMHEFDFLVVEAVAADKVVYTRYADDLTFSAPRLGHLRDVEKIVRRILRGLSFPRLRLNINKTTYVTSKFGRRVTGLTLTNAGGVSIGHARKRKLHTAVYRASQNNLNADELAELKGMLGFAHSVEPEFIEILRRRFGNDIVSFIQSYPIERKRSAKVIAVEPDETR

SEQ ID NO: 4488 - protein, 327 aa, Rhizobium taibaishanense
  source 1..327: note = Related to NZ_MKIN01000018.1
MTNLLRSMAIETGLSEVIVQRIMQSAPNRYKHYSIEKRSGGKRLISQPAIEVKLLQRAFVSLYLSKLPVHAAAIAYRPNKSILDNALPHVSSGSILKMDFKDFFPSIRKAHWMNYCAEFGIFETQSERELAASLLFHRPKGSSVMQLAIGAPSSPTLSNVLMYKFDEIISSEVATDKVIYTRYADDLTFSADRSWNLVDVERIVKKTLQNISYPKLQLHPSKTIHVTKKFSRSVTGLILANDGRVTIGKKRKRIIHAATHAASLGRLDDRQLQKLAGMLAFVHSVEPSFIALLERKYGFETIKGLQKIGANDRRNLRAAVGEADFGT

SEQ ID NO: 4489 - protein, 321 aa, Neorhizobium sp.
  source 1..321: note = Related to JALBGV010000046.1
MVSLLRAMAIETGLSEVVVQRIMQSAPHRYKQYKIDKRSGGKRLISQPATEVKLLQRAFVELYLSKLPVHPAAMAYRPNLSIFDNATAHAGSGSILKMDFKDFFPSIRKANWMSYCAEFSILENHSERELAASLLFQRPRSSNAMQLAIGAPSSPALSNVLMFQFDEIISAGVAKDKVIYTRYADDLTFSADRSWNLVDVEKTVKRALREIAYPRLQLHPDKTTHVTKKFSRSVTGLILANDGRVTIGKRRKRAIHAATHAASQGRLDDRQLQKLAGMLAFVHSVEPGFIDVLERRYGLETIMRLQTIGAKDRRNLRPPDA

SEQ ID NO: 4490 - protein, 326 aa, Agrobacterium rosae
  source 1..326: note = Related to JAFJZW010000005.1
MASFLRTMAVETGLSEVVVQRIMQSAPHRYKHYEIDKRSGGKRQISQPATEVKLLQRVFVELYLSKLPVHPAAMAYLPNKSILDNANAHAEAGSILKMDFKDFFPSIRKASWMSYCAEFSILENHAERDLAASLLFQRSKGSGAMQLAIGAPSSPALSNILMFQFDEVISSEVSKDKVVYTRYADDLTFSADRSWNLVDVEKTVKRALREIAYPRLQLHPDKTIHVTKKFSRTVTGLVLANDGRVTIGKRRKRAIHAATHSASLGRLDDRQMQKLAGMLAFVHSVEPAFMGVLERRYGSETIMRLQTVGSRDRRNLRPINETLDKK

SEQ ID NO: 4491 - protein, 328 aa, Devosia epidermidihirudinis
  source 1..328: note = Related to NZ_LANJ01000022.1
MVTLLRAMAIETGLSEVIVHRIMQTAPHRYKQYTISKRSGGKRLISQPATEVKLLQRAFVDLYLSKLPVHPAAMAYRTSLSISDNAKAHAGSGSILKMDFRDFFPSIRKASWMTYCAEFSILDNSFERELSASLLFQRPTGSHGMQLAIGAPSSPALSNLLLFQFDEIISAEAAKDKVKYTRYADDLTFSADRSWNLVDIERTVKRVLREIAYPRLRLNPDKTIHVTKKFCRNVTGLILANDGRVTIGKKRKRTIHAATHAASQGRLDDRQLQKLGGMLAFVKSVEPAFLDVLRRRYGFETIMKLQTIGAKDRRNLRPQIDAVEISGG

SEQ ID NO: 4492 - protein, 328 aa, Pannonibacter phragmitetus
  source 1..328: note = Related to NZ_CP013068.1
MVSLLRTMAVETGLSEAVVQRIMQSAQHRYKQYYIDKRSGGKRLISQPATEVKLLQRAFVDLYLSKLPVHPAAMAYRPGRSILDNASAHADSGSILKMDFKDFFPSIRKASWMAYCANHSLFDSQSERELSASLLFQRPKGASSLQLAIGAPSSPALSNVLMFQFDEIVTGEVSKDNVTYTRYADDLTFSAERSWNLVDVEKTVKRALREIAYPRLVLNTDKTTHLTKKFGRSVTGLVLANDGRVTIGKRRKREIQAATHAASLDRLDARQMQQLAGMLAFVNSVEPDFLGVLERRYGIETIMRLQKVGAKDRRNLRPQTLEEDAGHL

SEQ ID NO: 4493 - protein, 315 aa, Methylobacterium sp.
  source 1..315: note = Related to VRUZ01000039.1
MSALVAKLVLATGIDQSSVRRIMLSAPRRYKSYYIAKRNGGLRKISQPAREVKVLQRALIDLLLSDLPVHRTAMAYRVGTSIKDNANAHKTSGPIIKIDFTNFFPSIKRSDWADYCQKTGCLNDPTEIGLTSSLLFQYQKEHASQRLAIGAPSSPMLSNILMYEFDSEIESRLQGTRIVYTRYADDLTFSAPRTGYLHDVMKIVRETMRAIPYPRLKINPDKTTYVTTKYRRSVTGLTLSNDGRVTIGWRKKRELHAAVHNAKLDKLNAKGLQALAGYLAFVQSVEPSFLSVLRNKYGTEIIMKIKAANVKKALR

SEQ ID NO: 4494 - protein, 325 aa, Parvibaculum sp.
  source 1..325: note = Related to NZNS01000009.1
MSQLLDKLSFETGMRANELRRIMYTAPNRYKIYSIPKRVGGFRSIAQPAREVKLLQRTLAKTFLTTLPTHAAATAYKPETSLRSNALPHAGRGPVLKLDFRDFFPSIRDRDWIAYCRQTGCLTEDEDIYLTSRLLFHRRKGESHLRLAIGAPTSPILSNILMYEFDVRVVETVVADGVTYTRYADDMTFSAQRTGNLTHVIRDVGRVLRDIQYPRLALNPEKTTLVTAKYGRRVTGLTLANDGRVTVGRDSKRKIRAAVYQAVNGRLDPEQMQVLTGMLAYVNAVEPEYLDVLRRKFGTQAILKIQRAPRGEKIRRRSPALAQNR

SEQ ID NO: 4495 - protein, 328 aa, Rhizobium anhuiense
  source 1..328: note = Related to NZ_LWMO01000047.1
MTELLRQLSTETGLAESAVRRIIANAPERYKVYHILKKNGGKRKIAQPARELKLLQRALVELLLSKLPVHPAATAYVKGRSIRDNAERHCHSGPVLKMDFKDFFPSITDRDWAAYCSQTGCLTDAEDIRLTSLLLFHRPVGGRVLRLAIGAPSSPIVSNLIMFPFDAMISEVVAVDHVIYSRYADDLTFSGPRTGHLTGVARSVKRALREIPFPTLKINAEKTTYVTMKYHRQITGLTLANDGRVTIGRDNKRALRAQLDHYSKGTMPKADVPRLAGRLAFVKSAEPSFFLNLLENHGWERIQEILRQSNQKARRAKPLASDENDFAG

SEQ ID NO: 4496 - protein, 325 aa, Rhizobium sp.
  source 1..325: note = Related to JACHZB010000001.1
MTELLKQLSIETGLVESTVRQIIANAPERYKTYHISKKNGGTRKIAQPAREVKLLQRALTALLLSKLPVHPAATAYVKGRNIRDNAELHCHSGPILKMDFKDFFPSITARDWAAYCTRTNCLADPEDIRLTSLLLFHRPAGGRVLRLAIGAPSSPIVSNLIMFPFDQMISEAVAVDHVIYSRYADDLTFSGPRTGHLTVVAKAVKNALKEIQYPSLKLNPEKTTYATMKYHRQVTGLTLANDGRVTIGRDRKRALRAQLDHYYKGILPLKEIPRLAGNLAFVRSAEPSFFFKLVERHGYQKIHDILRQSNRKNKKLPSGRNESPI

SEQ ID NO: 4497 - protein, 326 aa, Agrobacterium salinitolerans
  source 1..326: note = Related to SGNZ01000005.1
MREMTDLLKRLSVETGLPESTVKSIISNAPERYKEYLIHKKNGGYRKIAQPARELKLIQRAFIDIVLSKLPIHSAASAYRRGKNIRDNAMPHSHSGPILKMDFKDFFPSITERDWSAYCQQTGCLTDPGDIRLSSLLLFHKPSGGRILRLAIGAPSSPILSNVIMFQFDEAISNAIAKHQVIYTRYADDLTFSAPRTGHLNSVAKAVKNALKEIPYPQLKINHEKTTHVTMKYHRQVTGLTLANDGRVTIGRDHKRSLRAQLHYFINGKLDEAETAHLAGKIAFVKSVEPEFYFSLLEKLGAEKINFLLSKSNRKKLSLKKSPKLN

SEQ ID NO: 4498 - protein, 326 aa, Rhizobium multihospitium
  source 1..326: note = Related to NZ_FMAG01000002.1
MTDLLKQLSIETGLPEYTVKSIISNAPDRYKEYYIKKKNGGSRLIAQPARELKLIQRAFVDILLSKLPVHSAATAYRKGKSIRDNALPHSHSGPILKLDFKDFFPSITESDWVAYCKHTKCLTDPNDVRLSSLLLFHRPSGGRLLRLAIGAPSSPVLSNIIMFPFDEAISAAVAHDHVIYSRYADDLTFSGPRTGHLTGVSKAVKKALREIPYPTLKINHEKTTHVTMKYHRKVTGLTLSNDGRVTIGRDNKRTLRAQLHHYLSGKLNESEVAHLAGRIAFVKSVEPSFYFTLIERHSDRVIQMLLTKSNQKHAKEKRQPISFEGG

SEQ ID NO: 4499 - protein, 315 aa, Ensifer sp.
  source 1..315: note = Related to JACVBP010000001.1
MSEIIEKLVAASGLNPFVVRRILATAPRRYKEFSVPKRNGGKRKIAQPAKELKILQRAFVDEFLSELPIHPAATAYRAETSIKDNAERHAGFGPILKMDFKDFFPCITDRDWEHYCQRNNLFEDPLERRLSTLLLFHRPKGGSKLRLAIGAPSSPTLSNVLLFEFDRYISELVAPDKVLYTRYADDLTFSAPRTGHLTGVKRAVSRAINHVDFPTLRINREKTTYITTKFHRSVTGLTLANDGRVTIGRDKKREIRASVHRFTLGKLDEDSIERLHGYISFINSVEPEFIDVLTKKYGSGMMQNLRDASVAIRRA

SEQ ID NO: 4500 - protein, 305 aa, Phyllobacterium myrsinacearum
  source 1..305: note = Related to JACGXN010000001.1
MSEYSIRKILATAPERYKEYRIPKKSGGYRDIAQPAKELKILQRGFANNFLMKLPIHHTAMAYRHKQGIRDNAQRHAGFGQILKIDFKGFFPSIRVEDWRSYCAATGFLIEAEDIDLSSLLLFHRARGTRGLRLAIGAPSSPILSNILMYEFDQRVSEIVAQDKVIYTRYADDLTFSAPRTGYLLDVKKNVSKILDELQFPRLEINHKKTTHVTTKYHRVVTGLTLANDGRVTVGRERKRLIRATIHAYIQGRLVAEDVGRLAGLIAFVKSAEPEYFGLLKHQYTPEKIIEILKWSSGTLNLFDD

SEQ ID NO: 4501 - protein, 315 aa, Labrys sp.
  source 1..315: note = Related to NZ_CP043489.1
MKFLIQESGLSEQTIKRIAIDAPQRYKAYEIKKKNGGVRQIAHPARELKILQRAIVKHVISGLPVHDAAMAYRKGRNIRDNAKRHAGTSIILKMDFKDFFPSIKAQDWHQYCEDNRILTSSEDIWLTSQILFYRARGTRLLRLAIGAPSSPALSNALLYDFDKRVTELVSQEEVVYTRYADDLTFSAARTGYLTGIQKLISRALREMETPKIKLNHKKTTHVTTKYSRNVTGLVLSNDGRVTIGRERKRKIRAMIDHFIKGRLNNRQKAHLSGMIAFAKSAEPEYYTYISEKYNNVLREILNSRAKKTCRIEASR

SEQ ID NO: 4502 - protein, 325 aa, Brevundimonas diminuta
  source 1..325: note = Related to NZ_CP073063.1
MTPLIRALSASSGLSAADTLKLVKDAPDRYKIFDIDKRRGSEKRKIAQPAAEVKYLQRIVVEILLSRLPVHSAATAYIKGGSLRDNAAPHAGVGRPILKMDLKQFFPSIRSRDWESYCSDNEVFSDAQDAYLSSRLLFHRPPGGRVLRLAIGAPSSPMMSNILMYEFDKRISAAVEEDEVTYTRYADDLTFSARRTGYLVDVRKRVYRVVRELNYPKLDINRSKTVYATSRYHREVTGLILSNDGRVTIGRDKKRVIYSMVHRYLKGGLNGAEIQHLAGILAFVKSAEPDFLLNIDRKYEIGTVSDIAKTAGRIHVSDRQSYWQS

SEQ ID NO: 4503 - protein, 325 aa, Roseococcus sp.
  source 1..325: note = Related to JAHCDM010000009.1
MLTQYLAQATGLSTLEIERIARSAPRRYKDYMIPKANGGHRLISHPAREVKALQRALVEWLSDKFPVHHCATAYKKGGSIALNADQHAQNGPIMKMDFRNFFPSIKSHDWIKFITENNFPLNEFDRELTRTILFHKRPSMPDLRLAIGAPSSPFISNIMMYDFDCYVHDKTKAEKITYTRYADDLTFSSARAWNLRDVEPIIKKAVRDHAFSKLEINNEKTRVVTTKFRRIVTGVTLANQGHISVGRNAKRELRAIMSRLSLRQTPKQNPSQIVGILGFLGSIEPKYLQSLKEKYGKDTFDFLYSLAGDLRTDNRQGQADAATED

SEQ ID NO: 4504 - protein, 322 aa, Ahrensia marina
  source 1..322: note = Related to NZ_JXMU01000014.1
MSKIIRDLVLETGISASTLQVIINSAPESYKVFSIPKKTGGTRIIAQPSKQLKIIQRALIEVLLHDFPIHEAAKAYVKGSSIRVNADQHAGSQPIQKYDFSDFFPSITSSDWRKYCDHNQVNLSTADLHLCTKILFRRAHGERTLRLSIGAPTSPILSNILMFDFDKKISEKLAGDEVKYTRYADDLTFSAPKTGYLNAVPRALRECIQEIQFPTLKLNAKKTAKITAKHRRIVTGLTLANDGRVTIGRDKKRLIRSKVHKFKLGQLDRLALDKLTGELAYINAVEPEYISVLKRVYGDECISKITRNKPLRKYTPPSRNGS

SEQ ID NO: 4505 - protein, 303 aa, Variovorax sp.
  source 1..303: note = Related to FOBJ01000004.1
MLGANDLLSQMSSDFGMLPNHLQSIVRTAPIRYKVFYIPKRSGGLREVAQPAREVKAIQRWLMAHFGPLLPLHEAATAYRPGASIKNNALRHVDSDYLLKMDFRNFFPSILMTDIIRHLKIHCGQQYDASAIKLIAYVCTWAPGRQGPLRLCIGAPSSPLLSNSVMFDFDTQLSSVAAADGVRYTRYADDLALSVCRSGALKNYPSLVSKIVADLKYPQLKLNEGKTVFASRAGRRVVTGVTLTADHQLSIGRTRKREIRAMYHRMVLGKLSAEEQRELAGLIAFADDIEPGFAAWLSSPKKL

SEQ ID NO: 4506 - protein, 305 aa, unidentified
  source 1..305: note = Related to JAFKGB010000002.1; note = Burkholderiales bacterium
MLSANDLLSQMASDLGMLLSHLQSIVRTAPIRYKVFHIPKRSGGLREVAQPAREVKAIQRWLTAHLGQLLPLHEAATAYRTGASIRSNALQHVDSDYLLKMDFKNFFPSILITDIIQHLEVYCGRQYDSSAIKLIAYVCTWAPKRQKPLRLCIGAPSSPLLSNSIMYSFDMRLSSAAAADGICYTRYADDLTLSTHHPRVLANYPALVADIAASLNYPRLKLNEKKSVFASRSGRRIVTGVTLTPDRHLSIGRIRKREIRAMYHRMTLGQLNQEEQRELAGLIAFANDVEPGFAAWLSGSKKLET

SEQ ID NO: 4507 - protein, 303 aa, Rubrivivax gelatinosus
  source 1..303: note = Related to NZ_NRRT01000126.1
MLRANDLLHQMSSDFGMLTSHLHGIVRTAPIRYKVFYIPKRSGGLRELAQPAREVKAIQRWLMERLEPLLPLHEAATAYRAGASIKSNALRHVESDYLLKMDFTNFFPSILMTDIVRHLETHCGQQYDASAIKLIAYVCTWAPKRQGPLRLCIGAPSSPLLSNSVMFDFDRRLMDFAAHDQITYTRYADDLSLSARTSGALNAYPKLVAELTESLEYPKLALNTKKTVFASRAGRRIITGVTLTSDHQISIGRARKREIRAMHHRMTMDQLNLDEQKRLAGLISFAEDIEPGFSAWLTKTTEA

SEQ ID NO: 4508 - protein, 303 aa, unidentified
  source 1..303: note = Related to JAFLDL010000016.1; note = Candidatus Accumulibacter sp.
MLCANDLLLKMSSDFGMLAGHLQSIVRTAPIRYKVFYIPKRTGGLREVAQPAREVKAIQRWLIKRLKPLLPLHDAATAYRSGASIKKNAQRHVESDYLLKMDFRNFFPSILMTDIVRHLEIHCGQQYDPSAIKLIAYVCTWAPKRQGPLRLCIGAPSSPLLSNSVMFDFDKQLSSAAASDSVTYTRYADDLALSSRTSGTLNNYPGLVAKLAGSLNYPQLELNERKTVFASRAGRRVITGVTLTADRQTSIGRKRKREIRAMYHRMILGKLSPDEQRELAGLIAFADDIEPGFSAWLSKSIDT

SEQ ID NO: 4509 - protein, 303 aa, Thiomonas arsenitoxydans
  source 1..303: note = Related to FP475956.1
MLSQADILQRMAADLAMLPSHLAKIIQTAPLRYKLFEIQKKSGGRREVAQPAREVKAIQRWLIRELGPRLPVHECATAYREGSSIRKNAEAHASSRYMLKLDFTNFFPSIVRSDLHAHLDRHCSDYLDPSARKLIAHVSCWARHREPPLRLCIGAPSSPLLSNSLMFEFDNRLAAVAKDDGVVYTRYADDITLSSRDRGKIDRYTEIVQTLLESLQYPKLTLNEGKTVLASRAGKRVVTGLILTPEGSVSIGRDRKRLIRAMYHRSLTKQLDSKETQVLAGLIAFADSIEPGFSQRLKGSVRP

SEQ ID NO: 4510 - protein, 302 aa, Pusillimonas sp.
  source 1..302: note = Related to WWER01000012.1
MQREPDIILQMAADLGMLPSHISLLIRTAPLRYKVFYIPKKSGGMREVAQPAREVKTIQRWLIRYLKDRLPIHEAATAYTTGSSIRANAAAHCHSRYLLKLDFSNYFPSIVKHDIQMHLERYCADFLGESARELIAQTCCWMPRREHPLRLCIGAPTSPMLSNSVMYDFDRLLGNIANDEHVTYTRYADDITLSAEEPGKLDRYVEVVMQLLRDLAYPRIELNMAKVVRASRASKRVVTGLVLTPSGSISIGRDRKRLIRAMFHRKIQGKLNAEEAQVLEGFVAFAENIEPGFRKRLERSML

SEQ ID NO: 4511 - protein, 303 aa, Achromobacter xylosoxidans
  source 1..303: note = Related to CYTI01000014.1
MTSLLDDMAIAFGMPRKRLLNIIRTAPLRYKVFFIKKKAGGLREVAQPAKEVKAIQRWLMSSLAEHLPLHSAATAYTPGSSIKRNAEAHLGSQFILKMDFENFFPSISEDNIKAHLRNFCSDYYTENDIAIIARACTWARKRSPPLRLCIGAPSSPLLSNSVMFSFDDMLFQHANQDEVIYTRYADDLTLSSSHPDVLKEYPKIVAGILEKLAYPALSINQRKTVHASKAGNRTVTGLVLASDDKISIGRERKRLIRSMYHRYKTGKLDPELIPKLFGLLNFAEDIVPGFRANLERGYENVDI

SEQ ID NO: 4512 - protein, 309 aa, Paraburkholderia sp.
  source 1..309: note = Related to NZ_JAJEJQ010000001.1
MAYPDLLRKMAGDLGMLPRQLASIIKTAPLRYKVFAIPKRDGSPRVIAQPAREVKAIQRWLINELRPQLPVHEDVMAYEPGTSIKKNAERHLGSRFMLKMDFSNFFPSISAEALHMHLESYCGNTYTLVDRQLIVRACTWLPQRTRATALQLCIGAPSSPLLSNSVMYEFDCAVSEKAQSEGVVYTRYADDITLSTTERGILSEYADFVSDTLATLAYPRVTVNRRKTVHASRAGLRMVTGIVLTPDGGLSVGRDRKRLARSMFHRRTLGLLTADESAELDGLLAFIDSVEPGFSATLRTSLLNKKPHP

SEQ ID NO: 4513 - protein, 310 aa, Burkholderia gladioli
  source 1..310: note = Related to NZ_UWYX01000002.1
MAHADILLRMAADFGMLPTQLASIIKTAPLRYKVFEIPKRDGSPRTIAQPAREVKAVQRWLINELRPHLPIHDAVMAYEPGTSIKKNAETHLRSQFLLKMDFSNFFPSISAEALRLHLELHGGSRYTLADRHAIVRACTWLPERTEWTSSLQLCIGAPSSPLLSNSVMYEFDCVIAEKAQFDGVTYTRYADDITFSSNERGILTLYSDFVNDTLGKLVYPRITVNGSKTVHASRAGRRVVTGLVLTPDGQISVGRDRKRLARSMFHRKTLGLLSAEEAAELDGLLAFIDSVEPGFSDRLRDGTRNSQQHP

SEQ ID NO: 4514 - protein, 307 aa, Burkholderia cenocepacia
  source 1..307: note = Related to QTRZ01000002.1
MAHADILARMANDLGMLPGQLANIIKTAPLRYKVFTIPKRDGTRRTIAQPAREVKAIQRWLINELRPQLPIHDAVMAYEPGTSIKKNAEMHLRSQFILKMDFSNFFPSISAEALRLHLELHCGNRYSLADRHSIVRACTWAPERAPTLQLCIGAPSSPLLSNSVMYEFDCAIAQKAKSEGVTYTRYADDITFSATERGILAPYFIFVKEMLQQLAYPKITINERKTVHASRAGRRVVTGLILTPDGKISVGRDRKRLARSMFHRRALGLLSADESIELDGLLAFIDSVEPGFSDRLRAAARNSRPHP

SEQ ID NO: 4515 - protein, 309 aa, Polycyclovorans algicola
  source 1..309: note = Related to NZ_JOMH01000001.1
MRNSRIFQEMAEALGMLPGHLEKIVRTAPLRYKKFSIPKRDGTPRLVAQPAREVKLIQRWLISNLRDHLPVHPSATAYEKGSSIVINASAHQESNYFIKMDFQNFFPSIKGKDIDLHLQSLSRINLSQEDRDVVVRSCTWAPHRIPPLELCIGAPSSPVLSNSILFEFDCAVESYLIEEKLPVRYTRYADDLTFSSLSGGWLHDVRNQVKMIVRGLEYPKLRIKEEKTVLGSRAGRRVVTGLVLTPDKKLSVGRERKRTARAMYHRFWKGELDESEVMQLEGLLAFVESVEPGFKSRLQDYYRKKNPAA

SEQ ID NO: 4516 - protein, 309 aa, Xanthomonas sp.
  source 1..309: note = Related to JACVAP010000002.1
MDKLESSHLIRVLSLESGLLPEQVANIVRTAPFRYKSFKVKKRTGGLRQLAQPAKEVKWIQSRVVDFLRPLLPMHDAVNAYEVGSSIKKNAGIHASSRFLLKMDFSNFFPSILESDIVAHINCFAPSISEVDAFVITRSCMWANGRKFPLQLCIGAPSSPFLSNSVMYSFDDLISKKAAERDITYTRYADDLTFSSRREGILADFQSMVEVVISEILYPRLKLNTAKTLHASRAGRRVVTGIVITPEGELSVGRDRKRLVRAMAHRDSMSQLDSDGVDKLEGLINFIDGIEPGFAQKARRWRNKKVAGA

SEQ ID NO: 4517 - protein, 302 aa, Salinisphaera sp.
  source 1..302: note = Related to PBYA01000036.1
MKISESQLFGRMCQDLSLQSESLKRIISTAPLRYKKFRIPKRSGGWREVAQPAREVKKLQYWIIRELGDILPVSDHATAYRDSISIKNNALVHDGSNYLLKMDFASFFPSIKFSDLSQHLSKYVKELTADDIGVIALTTLWTPNREPPLRLCIGAPSSPLLSNSILFDFDALVSKSLPDSVKYTRYADDLFFSTQESNQLSYVERLVRETVHELAYPALSFNDNKTVNVSRNSRRSVTGVVLKPDGGLSVGRERKRIARAMCHKLSIGRLSADEEAKLRGLLAFISSIEPRFAERLKSKYSI

SEQ ID NO: 4518 - protein, 308 aa, Stenotrophomonas maltophilia
  source 1..308: note = Related to JAIOAJ010000071.1
MDGLISNVAALVGVSSASCRRIANGAHRRYKVFTIAKRGGGRRVVAQPAREVKAVQRAVCQLLSENLPVHDSATAYKAGTSIAANAAAHAGAQFLTKLDFSDFFPSISGDLISDLLRRRCEHLTEAEIEFVVDVCTWRPDGRKVLCIGAPSSPLLANAVMFEFDCEAFEAASEMCVSYTRYSDDIALSSMVPDTLRQAETAVRRIIASRPALRVNERKRVAVGRGTSMVITGLTLTNQGGVSVGRSRKRGVRAGVNRYLLGELDEADTLKLKGEVAFVLSIEPEFRGVLVRTYGLRVWTLLPRMVAGG

SEQ ID NO: 4519 - protein, 307 aa, Xanthomonas dyei
  source 1..307: note = Related to NZ_MDEE01000039.1
MIGLVSKVSSLVGVSTSSCRIIARGAYRRYKIFAIPKNNGGRRVVAQPAREVKAVQRAICQILSDKLEIHQSATAYKPGSSILANAAVHKGAKYLTKLDFTDFFGSIDGESIFHLVESRCPDLSAAELKFIVDACTWRPQGRAVLCIGAPSSPFLANAIMFEFDAKAFDLANRVDAKYTRYSDDIAISSLKPDLLKGLEENIRNLVRGSRLPYIRLNDQKRVAVGRSTSMSITGLTLTNQGGVSVGRERKRGVRAGVSRFFNGQLSPAEIAKLKGEIAFVLSIEPNFRGVLINTYGLRAWELLPKSQ

SEQ ID NO: 4520 - protein, 305 aa, Stenotrophomonas maltophilia
  source 1..305: note = Related to JADUKR010000001.1
MNGLVAQVSQMAGISSSSCRLIARGAHRRYKKFTIRKKNGGIRVVAQPAREVKAIQRAICVILSEKLFVHASATAYKIGSSILSNAAAHAESRYLSKFDFSDFFPSIGADSLINLLAIRVPNLSEAEVRFVVDACTWQPNGRAELCIGAPSSPLLSNAVMYSFDENIFSALAEMGVSYTRYSDDISISSKREGILADAELLLRAAVARSRFPVLRMNEEKRVAVGRGVSMTVTGLTLTNQGGVSVGRARKRGVRAGVEKFVRFGATEVEFARLKGELAFVLSVEPEFRQVLIRTHGERILRLLPR

SEQ ID NO: 4521 - protein, 316 aa, Xanthomonas arboricola
  source 1..316: note = Related to MIGM01000010.1
MIGLVSTVSFLAGISTDSCRRIAASAHRRYKVFTIPKKNGRDVRVVAQPAREVKAIQRAICAALNEYLHVHPTATAYVKGSSIIANAGMHKHCKYLTKLDFKSFFPSIDGESIERALRSKIADLSESEIQFVLNACTWRPEGRQVLCIGAPSSPLMSNAVMYDFDQLANIECRNMGVIYTRYSDDISISSEQPDKLSLAENRIREIIQIQSQPRLFFNDSKRVAVGRGTAMRVTGLTLSNEGKVTVGRTRKRGVRAGISRYMRGLVDEEALQKLRGEISFVLSVEPEFRKVLIRTYGISVVRILPPRIASKTGDIK

SEQ ID NO: 4522 - protein, 311 aa, Luteibacter sp.
  source 1..311: note = Related to NZ_JQNL01000001.1
MSEFIDQVAASLGLSRGVCENIARTAHRRYKVFLIPKKNGRGFRTVAQPAREVKAIQRTLVLMLDQLLPVHPAATAYRPGSSILRNARAHVRAKYITKLDFEAFFPYIDRTSLGRHLRQHLSHLDGDDIAFILSACCWTPKGTTTQRLCIGAPSSPMLSNSIMHDIDSDIQTYCEEVGAVYTRYSDDICISATMPDVLAPLEQRIRHRIRESTRPTLTLNEAKRVAVGRGSAMNVTGLVLSNEGTVTVGRERKRGVRAGVMRYLKGALDLNETARLKGELAYVISIEPGFRFVLAKTYGMEIQALLPSAGI

SEQ ID NO: 4523 - protein, 311 aa, Lysobacter gummosus
  source 1..311: note = Related to NZ_CP093547.1
MIGLVSQVAEKVGISSQACRRIASSAYLRYKKFVIPKSNGRDFRFVAQPAKEVKAIQRALVEILGAYLPVHDSATAYRIGLSICDNARRHASAKFITKLDFSDFFPSIDAPALSAHLRAHIANISDAEVMFIMNACLWRPEGRQVLCIGAPSSPMLSNSVMFEFDTLISGLASQADVVYTRYSDDITVSSREPDKLRGIEIAIRKACATMSHPKLEINEKKRVAVGRGNAMRVTGLTLTNAADVSVGRLRKRGVRAGINRYVNGDLDDDQVERLKGELAFVLSVEPNFAEALLRSYGAMSLSKILPRKVLP

SEQ ID NO: 4524 - protein, 309 aa, Pseudoxanthomonas sp.
  source 1..309: note = Related to JACVAK010000003.1
MNGDLLSFVVAQTGLSRQAVIRISETARHRYKVFSIDKKRGGKRIVAQPAREVKAVQRAIVAALSSRLPVHESATAYVPGSKLINNAIPHAGQKYLLKFDFENFFPSIDDSAIRKALSGETQNGFSQDDILLVVGSCLWRPPGSSLLGLCIGAPSSPFLSNAVMFEFDGIVSRLARELGISYTRFSDDVTFSGPDASSLSKMELGFRETCRELNAPKLVVNEKKRTFCSRGAAMRVTGLTLSNGGGVTVGRARKRGVRAGVDNYLRGTLDLKKVERLRGEVAFVISIEPLFRDVLIATFGDRVRDVLPS

SEQ ID NO: 4525 - protein, 313 aa, Pseudoxanthomonas sp.
  source 1..313: note = Related to JACVAG010000005.1
MTLGLISAIASEAGISKGSALRVAVSAYKRYKVFKIKKRSGDGTRTVAQPAREVKAIQRAIVQFLSSRLPVHDAATAYVGGSSIYANANFHAGARYLLKMDFSNFFPSIRPLDIERHLLRHLGSEISPAEVSFVIQACIWRDPEMGGFGLCIGAPSSPFISNTILHEFDTSVRSVCDEYLAKYTRYSDDMTFSADGPDVLAEVERRVRAVVKEMRSPVLLLNENKRVAVSRSAAFRVTGLTLPNQGGVSVGRKRKRGVRAGVHKFVLGQLDAKGVEKLKGELAFVLSIEPEFRYVLVETYGGAIHQLLPGKWH

SEQ ID NO: 4526 - protein, 318 aa, Lysobacter spongiicola
  source 1..318: note = Related to NZ_FUXP01000009.1
MTTRLVNRLSQQVGLPAGDIERIISSAPRRYKEFKIRKRSGSGFRDIAQPSRELKILQKAVVEELKPHLPIHDCVHGYVIGRGIKSNAAAHRKGRFILKMDFADFFPSIKPVDFRAHLRESLPDRYDDIEARQLELLLFWLKRGERTLRMCIGAPSSPSISNYLMYAIDSRITENCRLNAVTYTRYADDLTFSCGEEGILGEVEGAVSRIVGETVHPRLRINPDKTIHISRKQRRTVTGVNITPTGELSIGRDRKRLIRAMVHRHIRGLLDLRGQNELIGLLGFAHDVEPSFAQKMWASLKGAPALKRSRRVDYMLEG

SEQ ID NO: 4527 - protein, 312 aa, Xanthomonas arboricola
  source 1..312: note = Related to NZ_CP041965.1
MTTNLVHLLSREVGLPISDIEKIIASAPRRYKEFKILKKNGRGVRDIAQPSRELKALQRAVVSKIAPRLPVHDCVHGYVLGRGIKSNAQSHLGGSFILKMDLSDFFPSIKPVDLRHHLNKFLPEEFDDVELRQLELILFWIKKGTSILRMCIGAPSSPLISNTIMFDVDLEIDNLCRQYDVKYTRYADDLTFSCSEKGVLSLIQRGVSLIVRSSKSPIIKINEEKTLHLSKRAKINVTGVNLTPDGSLSIGRERKRLIRVMAHHHSLGSLDAEGQNKLIGLLGFAFDIEPNFAMGVWGALAGAPKLLRTERR

SEQ ID NO: 4528 - protein, 308 aa, Xanthomonas hortorum
  source 1..308: note = Related to VCME01000014.1
MSTPLVKLLSMSVGLTPTDVMRIISSAPRRYKEFLIPKNNGRGHRKIAQPSREVKLLQRALCESVLTGFPVHNAAHGYVRGRGIRTNAEAHQSANFILKMDFENFFPSMKPNDLRLHLQMYASTRFDENEVRQLELILFWLEKGSDSLRMCIGAPSSPMLSNTFLYSIDAQLTAVCDKSGVTYTRYADDLTFSSSEPNLLKEIQNETELIIGKADYPKLKINKDKTIHISKRQRRTVTGINITPSGKLSIGRGRKRLMRSMAHRHSQGILSTEDQKMLGGLIAFAADIDPGLAVDIKLSLLNHPPLAK

SEQ ID NO: 4529 - protein, 314 aa, Stenotrophomonas maltophilia
  source 1..314: note = Related to JAAAEX010000007.1
MTTGLVQMLSQRSGLPQADIERIVASAPRRYKEFTIPKKSGRGLREIAQPSRELKLLQRIIVDAVLSRMQVHECAHGYVAGRGIRTNAAAHARSKYILKMDFKDFFPSLVPLDLRSYLQKHQPSGFTEQEVRQLEQILFWRKKGSNVLRMCVGAPSSPALSNALMYELDQSISDASSTRGVTYTRYADDLTFSSRQKDVLGSLLTEVIAIVSESKSPYLRINPSKTISISRGQRRTVTGVNITPDGRLSIGRESKRLIRSMVNYHASGKLDEEGQARLIGLIGFATDIEPDFSARMRIALLNSPPLLATPSRSV

SEQ ID NO: 4530 - protein, 311 aa, unidentified
  source 1..311: note = Related to NTJG01000001.1; note = Xanthomonadaceae bacterium NML93-0793
MTTRLASSLSKWSGFALPDVEHIIATAPRRYKVFTIPKKRGGLRQIAQPSRELKSLQVLLIGRVLHHLPVHDAAHGYVIGRGIKTNAQAHSKSNYLLKMDLRDFFPSIRPRDLRAHLKVQAEGYLTDEEVGQLCNLVFWRPKGQRGLRLCIGAPSSPFLSNTIMLGVDQKLAEVARSLGVLYTRYADDLAFSSNEADVLPALEARVIDVVEGSRFPKIFVNREKTVHISRAQRRMLTGLILNSVGDVSLGRDRKRLIRAMVQSSRYGRLDEKELEKLNGLLSFAHDVEPGFAMKMRARMALPQVDDGLGEV

SEQ ID NO: 4531 - protein, 320 aa, Nitrosomonas sp.
  source 1..320: note = Related to FODO01000031.1
MDLILQLANDLGLANRDILLIANSAPYRYKEYKIPKKKPNTFRDIAQPAREVKILQRWVIENVLTKLPIHNAATAYIKDRNIKYNAMLHAGNPFVLKMDFSNFFPSIVPKDFKTHLLRHLPNMYTEDEINLLLRILFWRNKKEERFQLSIGGPSSPNLSNSIMFEFDSLISDECNSLNIVYSRYADDLVFSSIDFDLLKRIHNQVAIYLKKIPYPKLTLNNDKTMFLSKRGNRTVTGVIITNDGSLSLGRDRKREISCQINWHKKGNLKRSDTLKLHGMLCFANDIEPGFIDRMRTKYGIDTIHELIHLDTSKDQKTIKI

SEQ ID NO: 4532 - protein, 307 aa, Salinarimonas ramus
  source 1..307: note = Related to NZ_BMMF01000004.1
MKLLREVAIENGLAPEELIYIGPSLPSRYREFAIMKRDGTPRWIAHPARELKGIQRSIVRSLISQFPIHDSATAYRLGFNIRKNVEPHVRQEFIVKMDFANFFPSIRPHDLISYLSNTQFKLSDTEIKFLTHALFWKPKKASDLRLSIGAPSSPPLSNALLYDFDVHVDALCRVNQVKYTRYADDMTFSATNTQSLEVVHKQIVRFVKEMKSPSLRLNTTKTIWLSKAHRRNVTGLIVTPNGEISIGRDRKRLISAKLHHYSLGRLGVAETKHLHGLLAFANAIEPQFVDRMRRKYGVEVLALRHQK

SEQ ID NO: 4533 - protein, 317 aa, Croceicoccus ponticola
  source 1..317: note = Related to NZ_RXOL01000001.1
MSLLSELIWATGLPQPELMRIITTAPSRYKVYQIPKRTGGWREIAHPARELKALQRLMLNKYLINFPVHQSAMAYVKGRNIGDNAAIHTDSNFFLKLDFERFFPNIKVKDWIRFLKNNNFQPFLSDEIPITSQILFWGSGHRKPQCLSIGAPTSPILSNILLYDLDVELSAHAQAMGVRYSRYADDITISGQTIDQIIAFESLVRQRIRHLASPKLKFNDSKRGVYGRSVKRMVTGLVVTPAGAVSIGRDRKRAISSLVHRFSLGQLDQDQLGYLKGMLGFAKANEPEFLDRLRAKYGDAVIDAATKLHLPPRNRKD

SEQ ID NO: 4534 - protein, 321 aa, Microvirga sp.
  source 1..321: note = Related to NZ_CP069354.1
MRLLEELAINLGLGTAEIETIVETAPARYKVYDIPKRSGGTRTIAQPSRELKALQRYILSTKLVKFPVHKSAMAYLPGKNIARNAEEHLNGNILLKLDFENFFPSILVKDWESFAKKHPVQVIPVEDIKLYSKILFWGQRSRTPRCLSIGAPTSPMLSNLLLFTLDEQLDEAARKCSVNYTRYADDITVSGSTVEQVTAFEKLARKIVKSLRSPRLIFNEEKRGLYTRGQRRMVTGLIITPNGTLSIGRERKRTISAMLHKALLGELDLESTGHLKGLLGFSLANEPLFVNRMREKYGDAIVDRVLRLKLPERILQEGKQG

SEQ ID NO: 4535 - protein, 322 aa, Undibacter mobilis
  source 1..322: note = Related to QRGO01000001.1
MSLLTELVQEFGLGQSDLLRIIDTAPARYSVYPIRKRNGGFRTIAQPSREVKAIQYYILEKKLGVFPVHPSAMAYVKGRNIRQNAASHASSGPILKLDFQEFFPSIGVRDWERFVKSHPVDAIDLSDLKYYSKILFWGQHRKSNVPKCLSIGAPTSPIISNILLYDLDVKMSALAELLGVVYSRYADDITVSGQCVDEVLEFERLARREVKSAKSPKLTFNEEKRGLYFRGQRRLVTGLVLTPTERVSLGRKRKRTISSLLHKSTLGQLDPKRRGYLKGLLGFSVANEPEFLGRLRRKYGDEAVNAALVYFVPKRIDQEALF

SEQ ID NO: 4536 - protein, 327 aa, Mesorhizobium sp.
  source 1..327: note = Related to SALN01000219.1
MSLILELAEATGLSSGDIERVIRTAPARYKTYPIEKRSGGIRIIAQPSRELKVIQNYILKEKLKDFPVHSCAMAYEKGRNIFDNAASHVGSRVLMKLDFKDFFPSIKVKDWERFIAASSVETISPTEVYLYSKVLFWGEKRRSSVPKCLSIGAPTSPKVSNILLYDFDMTMSGKARSLGLSYTRYADDITISGDTVEQILLLEREAKQILRKMAHPKLTFNEAKRGIYSKGQRQMVTGLIVTPQAVVSIGRERKREISSLLHRSLLGQLDNDRRSLLKGLLGFCVANEPEFIGRLRRKYGNGAVNAAMKFHAPKRARVQPPPPPTLF

SEQ ID NO: 4537 - protein, 316 aa, Hoeflea sp.
  source 1..316: note = Related to NZ_CP011479.1
MELVEAIGLSVADINHVIDTAPARYRVYPIEKRSGGERMIAQPSRELKAIQRFILREKLSSFPVHHCAMAYEEHRSIYANAQMHKNTRAILKLDFQEFFPSLKVADWEMLVSKLKPNAINISDIKLYSKILFWGQQKGSKFPRCLSIGAPTSPKMSNLLMFDFDSIVAEKAIEHGLNYSRYADDITISGDSTLKITTLERDIQKLVRSMKSPRLTFNEEKRGLYTKGQRRMVTGLIITPAKDVSIGRDRKRNISSMLHRDTLRKLDVDSRGQLKGFLGFCAAVEPQFIDRLRHKYGDAAIDRAMKYHTPKRSINET

SEQ ID NO: 4538 - protein, 318 aa, Mesorhizobium sp.
  source 1..318: note = Related to JAHBYX010000006.1
MSLLLELVQHTGLSAAELRRIIQTAPKRYRAFPISKRNGTERIIAQPSREVKELQRYLLDQKLTGFPVHDSAMAYEAGTSIRKNAYRHKNGNYILKLDFKEFFPSIKPRDLENLIRRSKREEIAVSDIPIYLKILFWGGLDKSTIPQCLSIGSPSSPRISNILMFDIDERICSEVQKFDVMYTRYADDITLSGKGLEVVRAAEDKVVQVVRKSRFPKLEFNRDKRGIYSRAVRRMVTGLVITPVGSISIGRERKREISALLHRSSLNQLVTEERGHLKGLLGFCVACEPEFVGRMREKYGHKTIDEAMKYHVPKKRGR

SEQ ID NO: 4539 - protein, 316 aa, Ancylobacter aquaticus
  source 1..316: note = Related to RXIO01000070.1
MPILDDLVSDLGFSFKDVSRIISTAPARYKVYGIPKRDGGFRIIAQPSRELKLIQRYILENKLNKCKIHECATAYVKNKSIYENAEVHKSADKIIKLDFINFFNSIKPRDWRAMAPKLDGCLFEASDLEIYIKIFFWGHVKNSSVPRCLSVGAPTSPSISNILMYDFDQAVFAAAKDLNINYTRYADDITLSGDSISHLHKMESHVRKSLKIISFPKISINEKKRGLFTRAGRRSVTGLIITPDGSISIGRDKKRLISAMVHHFVTGEMTEEGKAKLKGWLAFCVDNEIEFVERLRIKYGNEAISKALKYYIKPLS

SEQ ID NO: 4540 - protein, 326 aa, Reyranella sp.
  source 1..326: note = Related to JAIETA010000075.1
MTIGLLKELGIKLGMGRSDLLRIISTAPKRYKVYQIPKRRGGTRTIAQPSRELKAIQRVLLKAVLSKFPVHAAATGYVENRSILDNAVAHMSSRVLLKLDFRDFFPSIVPDDWRRLARAKFVDLDEDEVWLSTMILFWGQKSTTPRCLSIGAPTSPMLSNIVMYSLDVRLAEAAAATNTTYTRYADDITASGPTIEDVRQFEAYAREIVGRSVSPQLTFNDQKRGIYSSGQRRMVTGLVLTPSNSVSIGRERKRLISSMLDHWIKDSLDNERKARLKGLLAFCIAAEPAFVSRLRAKYGDGPVNDVLRYHIVRKGPPPRQAGKSSS

SEQ ID NO: 4541 - protein, 320 aa, Neorhizobium galegae
  source 1..320: note = Related to CP090554.1
MSLFEDLLFFTGLSAPDLRRIIATSPARYKQFTIAKKSGGERLIAQPSRDLKVLQRYIQGNILSKGTIHASATAYKNGASIKHNANIHKYNRVILKCDFKDFFHSIKPRDWILYAQENFHSLSQDDVGLCARVLFWGRGTSKPACLSIGAPTSPVLSNLIMFDLDEKLTRSAEKIGATYTRYADDITLSADKIETVLLLEKRLKSAVAKSKYPKLTFNGDKRGLYTTAHRRNITGLNITPDEEISIGRDRKRMISSMIHKYSIGQLSEKDAGKLKGYLAFAYDCEPDFIERMIRKYGEEQISIIRQLHLPPRQRDIEFPE

SEQ ID NO: 4542 - protein, 317 aa, Rhizobium tubonense
  source 1..317: note = Related to NZ_PCDP01000036.1
MTLFDELSILTGLGASDLNRLIYNAPARYKEFPIKKRSGEDRIIAQPSRELKIVQRYIAGLVLNRLPIHSAATAYKEGANIFANVQSHSANRIILKLDFTDFFHSIKPTDWRNYAKVHIPSLSKEDVELSAKVLFWGMKSNRPICLSIGAPTSPVMSNLIMYDLDEQFFQITNDIGVTYTRYADDITLSGSNKESVIEAEKAIRVAVRKCKSPKLLFNESKRGIYSTGQRRHITGLNITPSGKISLGRERKRMISSLIHKYSLMLLDANDVGKLKGYLAFSLACEPEFLGRMRIKYGSTLIEEIQKTHIPARTLPES

SEQ ID NO: 4543 - protein, 321 aa, Sulfitobacter marinus
  source 1..321: note = Related to NZ_FPAJ01000001.1
MSELDLLRTVALNVGLSEESTLEIIRDAPQRYKVYPIPKKGKGHRIMAQPARELKPIQRSIADIVLEKFPVHPSAMAYRRGVSIADNAKVHAGKNSILKLDFESFFNSISAAAWRRFMKAQEIIELESHELALLTKALFWGAGQRTPYCLSIGAPSSPLVSNIIMFEFDRQMHDFAEKHGIRYTRYADDITASAREFKNLAAFERHLRTYISRNKTPSLKINEEKRGIYSSSDRRLVTGLVLTPDGKVSLGRERKREISSLVHKSTLGQLDIEQLGYLHGMLAFAISSERDFVNRLRIKYGEDAISSVLRYRVPRRDGTAR

SEQ ID NO: 4544 - protein, 306 aa, Paracoccus luteus
  source 1..306: note = Related to NZ_SDEA01000022.1
MSDASVLEIIQNAPKRYKVYRIPKKGSGFRIIAQPARELKTIQRSISKLVLEKLPVHASAAAYRPKIGIFHNAAVHAGTSPILKLDFERFFNSITAEAWRRFVASQEELRLSRSEMALVTRALFWGEGSKNPSCLSIGAPTSPLISNAIMFQFDVEMSNFAEERGLRYTRYADDIVASAKDFKVLHHFERHVRQYIKKNKTPSLTINESKRAIYSPGDRRLVTGLILTPDGKISLGRHRKREISSLIHFFRLGQLDHERLGYLQGLLSFSLSVEHDFVSRMSSKYGNDVVSAILNYRVPRRDGSPR

SEQ ID NO: 4545 - protein, 319 aa, Devosia sp.
  source 1..319: note = Related to NZ_LMEM01000009.1
MSLLEELQTYSGLGYGELGAVLRTAPRRYKAYLIPKRSGGHRMIAQPARELKNLQYFLIDRTLSKLPVHSAAAAYRENVGIRSNAAAHARNEVILKLDFSDFFPSIKPRDWMLFCGSLDPEVAEASGLATGADVMLATRLLFWGRGTFEPKCLSIGAPSSPVLSNVLMFAFDTAVAAHAIQNDVVYTRYADDITLSSDRSKQILLVEAAIRRYIKRYRSPALTINEEKRGLYTSGQKKMVTGLVVTPEKRVSLGRDRKRMISSLVHRFTLTQLELPKIAYLQGMLAFARDVEPSFYASLERKYGQPTMRALLAFRLPKS

SEQ ID NO: 4546 - protein, 311 aa, unidentified
  source 1..311: note = Related to JAFKLT010000057.1; note = Sphingomonadales bacterium
MSVEPKHSLIRTCALATGLTINEVVRIAGIGPKRYKIYQIPKRSGGQRTICHPSRELKALQYVFLRDILAQLPVHSAATAYKSGSSIKQNASRHLASRIILKLDFENFFHSIKVADWMAYAKATFPHWTAHDIEFSLFVMFWGAGGYKPVCLSIGAPTSPLVSNALMYQFDGVLSNFAAANGLVYTRYADDITISAEGRLDKDAIMAEIHSALDLIEYPRLKLNTAKTKLASKATSRRVTGLVLANDGSLSLGRERKRLISAMVHRAVRGLAEPDAIAHLRGLLAFANDVEPSFVAMLRKKYGSFVLDILH

SEQ ID NO: 4547 - protein, 300 aa, Hyphomonas sp.
  source 1..300: note = Related to AWFC01000023.1
MSSLIEKISAETRISIPDVKLTVRTASRRYKVYSIPKRDGTARIIAHPARELKAIQRALISESPASLRVHSAASAYEDGSSIAKNANIHVKNSWLAKFDLENFFNSITVSAWQMYLSKLEVDDEYVELSSKVFFWKPERRKSDLCLSVGAPSSPFASNRYMFSFDQYVSDYCTKNNLAYSRYADDIAISSQSEIELIHLQEVIEEGLKESRLKLNSRKTLLLGPGQRRVVTGVILKNDKKISLGRGRKRIIESMVHNYAKGKPSSSLEVIRGHLALLKMIDPDGYNRIRKRYENCTSLFK

SEQ ID NO: 4548 - protein, 317 aa, Brevundimonas sp.
  source 1..317: note = Related to DOSK01000382.1
MSRVLTDIAEHLGVGTEDVRKFIFAAPARYKVFSIPKRRGGQRTIAQPSAPLKEIQRFVAANQLATFPVHDAAAAYITGKSIADNAARHRKGKYLLKLDFENFFNSITVKDWRRLVALTPNHGITPQDLPHLDRILFWGGGTFSPIMLSVGAPSSPTISNMIMFRFDTAVSQKAAEVGAVYTRYADDISISAPTAKTCLEVERFAVSALRALKYPGLRFKTDKRGLYGPGQRRLVTGLVVTPDNRVSLGRERKRNISSLVHKASLGKLDAPEMLELKGLLGFVHSAEPRFLQTLKTKYGAELVQRIAAFEVKKLGDG

SEQ ID NO: 4549 - protein, 314 aa, Aureimonas phyllosphaerae
  source 1..314: note = Related to FOOA01000003.1
MSLRDEICIATGIGLSEFARIENSAPVRYKSFSIAKKSGDYRIIAQPSRELKIIQRWICENYLASFPVHNAAYAYRLGRGISHNARVHAGSRYILKIDFKDFFHSITPNDLFVRIKLANKDLSKADKRTLSQCLFWGKGVNMPLCLSIGAPSSPMLSNIVMFDFDERIARICKDKGVKYTRYADDITVSSEGIDELLFVERGIRETVKNSKNPKIEINEDKSRRFGPGQRKLVTGLNLTSEGGVSIGRGRKRKIHSMMNSAKYGILPDHDIGMLKGLIAFSISCDDDLVTLLRKKYGSDVVDRILSFKVPSRRR

SEQ ID NO: 4550 - protein, 334 aa, unidentified
  source 1..334: note = Related to DOJP01000165.1; note = Rhodospirillaceae bacterium
MGTFFDPENSKLCLRLARETRMPYSALYRLVLTAPYRYKTYKIQKVGRPGQVRIIHHPARELKTIQRWLVKNVLYSMPVHSAACAYEKNTGIKLNASKHVNNNYILKMDFKDFFPSIVPRDIFLRMPADTPWNSNDFYFLSRVLFCKKDTGTKLSLSIGAPSSPKISNIVMYEFDQKVSEYCNQKNITYTRYADDMTFSTNRREILQECEDFINGLVREMDSPHLEINASKTLHTSKKHHRRITGLVLSSQGFVSLGRERKRLIRAMLHNYKYNQNSDADKTQKLKGLLAFACDCEPIFIDNLKAKYEAEIDCLLSMKPEKPYIRRLLGSRSKS

SEQ ID NO: 4551 - protein, 337 aa, Vibrio anguillarum
  source 1..337: note = Related to CP023054.1
MKSLYDISEFTEKSVEEIIANYLTAPRKYKEFKIKKRNGGLRTISQPSKDVKFYQYAIIEKILKNLSIHDSATAYRDSKSIYHNALPHKGSSWILKLDFKDFFHSIRPEHLKSFLLDAYEDISSIEVDILNHYLFWLDRTDRKLKLSIGAPSSPIISNIVMYNFDESVCDICSKYSVIYTRYADDITLSASSRECLLEAEEELKVLIEETQTPLLVLNDKKRVLIGRNRSKRVTGVVITHENKLSVGRYKRKKVRAMLHLYSNDKLNEQDIPILHGTLSYIKSIEDNFYRSLRDKYGDAVFTKLAKESFKISKLKYYGKEESEEEKTQSKDDNDIVF

SEQ ID NO: 4552 - protein, 328 aa, Photobacterium sp.
  source 1..328: note = Related to CH724143.1
MLWGLIFDMKSLLEISKFTGKDVTEIISNYLTAPRKYKEFKIKKRSGGFRTISQPSKDVKIYQYAIIENVLNNLSIHDSATAYRKGKSIYHNAFPHKDSMWILKLDFKDFFHSIRPEHLKSYLLDEIKGISSIEVDILNHYLFWMDKTDRKLKLSIGAPSSPIVSNIIMYKFDENVSNICSKFNVIYTRYADDLTLSANSRECLLETEKELKALVEETQIPLLVLNDKKRVLIGEHKSKRITGVVITHESKLSVGRYKRKKVKAMLHLYANGKLNEEDIPILHGTLAYIKSIEDNYYRSLRDKYSDAFFTKLYQESFSISERKYLGKE

SEQ ID NO: 4553 - protein, 324 aa, Vibrio sp.
  source 1..324: note = Related to JAKKCQ010000002.1
MKILSDISECLGKGIGEIISNYLTAPRKYKEFKIKKRNGGFRQISQPSKEIKNYQYAIISKVLNELPIHDAATAYRNKKSIYHNALPHKDSAWILKLDFKNFFHSIRPEHLKSYLTEAYEEISSIEIDILNHYLFWMDKTDRKLKLSIGAPSSPIISNIIMLKFDNAVSDICSKHDVNYTRYADDLTLSAQSKESLEKAEEELNALVEETQTPFLILNDKKRVLIGNNQSKRVTGVVITHENKLSVGRHKRKKVRAMLHLYVNEKLEKKDIPVLNGLLSYIKSIELEYYLSLKDKYGDVVFSKLSLESFSISGMLKKPEKKMKA

SEQ ID NO: 4554 - protein, 326 aa, Proteus mirabilis
  source 1..326: note = Related to JADRZV010000010.1
MKYLLDILEHSKKTIDDLIFNYLTAPRKYKEFEIKKRSGGFRKISQPSFDVKLYQYLIMENILAKLPIHDAATAYRYHKSIYHNALPHKNSDWILKLDFKDFFHSIRPKHLKSILTDVYKDISSIEIDILNHYLFWMDRGDQKLKLSIGAPSSPIVSNIVMYKFDETVFNMCSENNVIYTRYADDITLSSDSRNILLKVESELKKIIADTQEPLLILNNNKRVLLGKQKSKRITGVVITHEKKLSVGRYKRKKTKAMLHLYVNNKLKKGDIPILHGTLSYINSIESEYYQLLELKYGKATFRKLTKDAFYISKMKYKNINKNDMDN

SEQ ID NO: 4555 - protein, 334 aa, Aliivibrio fischeri
  source 1..334: note = Related to NZ_LTZD01000015.1
MKILKDLSEKLDIDVDDIISSYLTAPRKYKEFKIPKKRGGFRDIAQPSNEIKIFQYGLIDTFLKNFPIHDCATAYMENKSIYDNALPHKDSKYLLKLDFKDFFHSIRPEHLKFYINKYNEGISNIEIDIINNFLFWMDKEDNKLKLCIGAPSSPMISNIVMYDFDLELESLCNTNNVIYTRYADDLTLSSNSNSSLMEVEGFLNKIVERTQIPLLELNDSKRVCIGDKKSKRVTGIVITHNNQLSVGRYKRKRIRAMLHLYNCNKLNENDIPRLHGLLSFVKSIEPDYYDLLKLKYNENLLKQLAKESYIISRKWYVSFNNDSLNVGDEDDIVF

SEQ ID NO: 4556 - protein, 326 aa, Photobacterium kishitanii
  source 1..326: note = Related to PYNJ01000059.1
MNILKTLIEVLGVSYSSIFKDSLTASRKYKEFTIPKKKGGRRKISQPSEDVKIVQSAISSVLLNSLPVSDYAYAYIRNRSIYDNAFIHKESSFLLKLDFKDFFHCIRPEHLKYYIKKNISDISDMEVDIVNNFLFWFDNDDNKLKLCIGAPTSPLISNIVMYEFDEKISKICEDFDVIYSRYADDITLSSNNRDDIDTVEIKINNLIKETNIPLLKLNKKKRVFVSQHMSKRITGIIITHDNKLSVGRYKRKKIKALLHLYNNRKLKDKDIPYLHGFLSFIKNIEPEYFNKLKSKYNEKLFHQLAKESYILSKKEKEKEMITHEKL

SEQ ID NO: 4557 - protein, 335 aa, Shewanella sp.
  source 1..335: note = Related to CP045427.1
MNKLNILNEISNDIDVNIGEFFNFSSMAPTAYSTFQIRKKSGGTREISQPAQWLKSVQYAIIQKLLEQLPIHYTATAYQKGKGIKQNAEAHINKTFILKTDFENFFPSILQSDLELILKRNNIEINSFEYSVISRFLFKKKNDSNKLELCIGAPSSPMISNVVMFEIDSLLSEKCNELDISYTRYADDMTFSSDKYENVEFILEFLKQTILKVESPQLILNNKKTKIISKGRSQRVTGVILSNDGRVSIGRNKRRRARTLLHLLELDKVDDKSLVELYSIVSFMRNIEPEFYEILKEKYGYNLFKKLYKKFSLLVEKHTDQSTGMKLKFKGFNVD

SEQ ID NO: 4558 - protein, 345 aa, Vibrio alginolyticus
  source 1..345: note = Related to NZ_CP042449.1
MNIVKVISDLINQDITYMFLLSATAPEAYSTFYINKKSGGIREISQPSKEVKEVQYVIIKEILSKLPVHECAKAYKKGVGIKQNAVEHLNKEFILKTDFSNFFPSIKPADLEYYFKKNNIEINNLEFDIISKILFKKKENSNKLELCIGAPSSPIISNIVMYEIDELLYSHCKERNISYTRYADDMTFSSNSIEDLKEILSTLKKVIIKNKNPELILNQKKTRLISSGRSRRVTGVILSNEGKLSVGRTKRRRTRTLLHLLSKSSIDDKSIIELYSNISFIRNIEPEFYQKLLSTHGQSTFNKLNKSFQSLIEKNTDNNGFTWRFGINGDSLVKKVIYEDDDIQF

SEQ ID NO: 4559 - protein, 321 aa, Salmonella enterica
  source 1..321: note = Related to AAIODZ010000022.1
MSYIDNLSRVLNCSVMSLISGYIKAPKKYKVFYIKKKNGKGLREIAQPAPDIKEVQRAIVSTLLAKLPVHECAKAYIKETSILNNAEPHKENKYILKVDFENFFYSIKPQDLYFYLLRGEIKLTQFEYEILSHYLFRRKKGEKKLRLCIGAPSSPIISNIVMYDFDCILSDYCHLNNIAYTRYADDITLSSESYGKIKDAYSFIARVVSDLKKPELKINSDKTKIIGKGRSRRITGVIISNTGELGVGRFLRKKIRALTHLYSNHKLSERDIPYLLGMLAHIKNIEPSYYEALVSIHGDNLFKKLGKDSYRILENKRGNDN

SEQ ID NO: 4560 - protein, 317 aa, Serratia sp.
  source 1..317: note = Related to NZ_CP025085.1
MSYIDELSKTLNCTPKTIISGYIKAPKKYKVFFIKKKNGKGLREIAQPSPDVKKVQRAIVNSLLSLLPVHECATAYIEEKSIFDNAEPHKKNEYILKMDFENFFYSIKPQDLNYFISKNDIKLNHFEYEVISHYLFRRKKGEKKLRLCIGAPSSPIISNIVMYDFDEKLFNHCKENDVIYTRYADDLTFSSDSFDKLNDVKNFVIDLVSLQKKPELIINTSKTKFIGKGRSRRITGVVISNTGDLGVGRFLRKKIRALFYLYSNNKINHKDIPYLLGMLSHIKNIEPDYYYSLIKINGEDKLKQLGKDSFAVLQKKQ

SEQ ID NO: 4561 - protein, 322 aa, Serratia fonticola
  source 1..322: note = Related to DAEHES010000012.1
MGYLNDLAGSLDSSVASLISGYLQAPRKYKVFYIKKKGSDKLREVAQPSPDVKNVQRAIASTLLNQLPIHSCAKAYIKDLSIYDNAKEHKTNTYILKMDFRDFFPSIRPNDLLLCLEKNSIKLNDFEYTILKHYLFWRKRGDNGLRLCIGAPSSPIISNIVMYDIDCKIDSICQALNIPYTRYADDLTFSSNSIDTLNIVFDKVKNIISSQESPRLIINHNKTKFIGKGRSRRITGVIITNDGQVGVGRYLRKRVRALLHLYSNNRIKVNDIPYLQGMLSHVKNIEPKYHEELLKKYNESLIKRLNLDASRIIKENRRNGVI

SEQ ID NO: 4562 - protein, 319 aa, Pectobacterium brasiliense
  source 1..319: note = Related to JAFJZU010000009.1
MSYLEHLALSLNSSVASLISGYLKAPQKYKVFKIRKKNNKSFREIAQPSPDIKNIQRAITSTLLKNIPIHPCAKAYIEGLSIYNNAYEHRENNYLLKMDFKNFFPSITPNDLLLCFKRNNIELNNFEYNILKHYLFWRKRGERSLRLCIGAPSSPTISNIVMYEFDCKIHEYCITHNIPYTRYADDLTFSSNEIEKLHAIYDYVTSVILENKSPNITINDSKTRYIGKGRSRRVTGVIITNEGKLGVGRYLRKKVKALLYIYNNKDLRKEDIPYLQGMLAHIKNIEPSYYEKLLQKYEPSLLSRLGKEAATIIKERSLN

SEQ ID NO: 4563 - protein, 323 aa, Pectobacterium brasiliense
  source 1..323: note = Related to NZ_CP009769.1
MSYLDELANYLEKSVPYLIRNYISAPRKYKVFYIDKKNGSKKREVAQPSKEIKEIQRAIVKTLLENIPIHSCAKAYMKNSSIYDNALPHKDNVFLLKMDFRDFFPSIKPSDLLYFLERNGLKFDAFEGTIVTNYLFWRRKGERKLSLCIGAPSSPIISNIIMHDIDSEINTYCEKEDIIYTRYADDLTFSTDNIVKLQKIHDFISNLTNRTEHPKLLINKEKTRYIGKGRSKRVTGVVITHEGELGAGRYLRKKIRAMIYLYSQKKLKKEDIPYLHGMLSHINNIEHDYYIKLKKQYGAAMFSALYQESFCISKKEKEADKVI

SEQ ID NO: 4564 - protein, 324 aa, Shewanella livingstonensis
  source 1..324: note = Related to NZ_CP034015.1
MELISKVAEHLGLPMHELISNMRSAPSMYKAFSIKKRNGGDRIIRQPSPFVKNIQRAIVDIVFSGIDRSEFSMAYEKGRSIKDNALIHTGADFLLKMDFKDFFPSIKPSDLFRTLGDLGYDFNDLDRMFLSRYLFVEVGSLLELSIGAPSSPMLSNLVMKHFDIAIGDFCHKNSIRYSRYADDLTFSGCCYKDLKKVEAHVVHIISLDNKSNLLVNDKKTRLIGKGRSQRVTGVILTHDGNISVGRNLRKKIRGLVHLYSNKKLNNSDIPYLHGIISHMRNIEPEYYEKLIVLHGDVLFKRLAKQSYAIGKHLRCAHLKTGLVK

SEQ ID NO: 4565 - protein, 319 aa, Shewanella sp.
  source 1..319: note = Related to JAHKRD010000001.1
MEIISDLAEELNVSIIELINQMQQAPKKYKVYSIKKRSGGSRIIAQPTAFVKMVQKGLCTSFLSQFKYSNSAMAYVKERSPISNANVHVGAKLILKLDFENFFPSIKAAHFIEFLERNKVTLESLEIDFLIRYLFRKVKGSYELSIGAPSSPLISNVMMYDFDLEIEEALKDSLINYTRYADDLTFSANSFEELNEAKLFVEAVILSKRYSFLKINEDKSKIIGRGRSQRVTGITLTHDSKISIGKSLRKRIRGMLHLYNQKKLKKNDIPYLHGIISHMRSVEPDYFKKLIDVYGAELFSRLARQSFMISKETKMKLME

SEQ ID NO: 4566 - protein, 318 aa, Aeromonas dhakensis
  source 1..318: note = Related to NZ_CDBP01000069.1
MSNESITDIICKSLSLLAHELLIKAMKAPLSYRVYTIPKRSGGKRTIAQPTAEIKKIQRCIVKTVLDPLPTSDISTAYKKDISIKDNAERHLGKKFILKMDFKDFFPSIRPEDLINSLERNNVRLSSADRKILILFLFRRNNYGRFELSVGAPSSPIVSNIIMYEFDIAVKEYCEKNNIVFTRYADDLTFSSNSIEDIKKTPAIIKSNLMLMDSPKLSINEKKTHIVSKGRSQRVTGVTLTHDNKLSIGRNLRKKIRAMLHLYKNNKLEHNDIPYLHGIISHMRNIEPEYFNKLLESYDDVLFKDLAKVSFNVSKVYK

SEQ ID NO: 4567 - protein, 321 aa, Vibrio sp.
  source 1..321: note = Related to CP001805.1
MENLLKEICSSSDLSIQDVIKGLSTAPLAYKVYTIPKRTKGERVIAQPSPFVKEVQRTLISVFLTKYKPSEVSTAYVEGKSIIDNAEAHKDNDWILKLDFKNFFPSLKPNDLFTFLEREGVVIGEFDKKILSSYLFRRNNRKLELSIGAPSSPLVSNLIMKSIDNKIEGYCNDNSIVYTRYADDLTFSTMDLDKIDALKQYIAAVLSETKSPKLSINDSKTKVIGRGRSRRVTGIVLTHENKLSVGRYSRKKIRAMVHHYSNRTIKKSDIPYLHGVISHMRSVEPDYYQKLEIKYGSDFFSKLAMDSYKISKAVKLKKLVK

SEQ ID NO: 4568 - protein, 321 aa, Vibrio parahaemolyticus
  source 1..321: note = Related to CP006004.1
MTNLLKEICENSEIQLTDIIKNLNTASISYKVYDIPKRTKGVRTIAQPSSFVKDVQKVITKVFLSEFTPSDASFAYIEGKSIVDNAAIHKDNKWILKIDFKDFFPSIKPEDLFNFLEKEEIKLSEFDKKIISSYLFRLNNSKLELSIGAPSSPVISNLVMKELDQEIIHFCEEKSIAYSRYADDLTFSTNNIAYFSDLLPYIYELLSYTQSPKLSINDKKTKIIGKGRSQRITGVVITHEGKLSVGRYFRKKIRAMLYSYNSNKIKKSDIPYLHGLVSHMRNVEYSYYEKLEENYGKEFFRKLAMDSYKIGKAIKLNSIKS

SEQ ID NO: 4569 - protein, 303 aa, Marinobacter orientalis
  source 1..303: note = Related to NZ_SRZX01000002.1
MSTAIEKVCKDLGFTEEKFIEFCSLAPHRYKKFFIPKKNGAGLRLVAQPARPLKKVQRWLVSEYLSKLPIHEAAAAYVSEKSILDNAKKHAGNKVLVKYDFKDFFPSIKPSDFLKLISKNDVGISAYEAEIFSRLIFWSPGNRPGLELCIGAPSSPVISNAVMFDFDNAVSEFCSSESLIYTRYADDICISGYDNSIFEHVDRFIKKQVFEIESPNLLLNPNKTQFINENTVKKVTGLFITQNEEITVGRKLKRKVRAMVHNFHKGNLSAKDKERLKGYLCYLSDVDPSYLRKVAPDFQSWDL

SEQ ID NO: 4570 - protein, 646 aa, Legionella pneumophila
  source 1..646: note = Related to DACSHB010000002.1
MDTIIEYFSKIDFTKVRTNQPPELIFLCGGNSDQKANNFRPKLQNELIKKQRNVVLAENAMNWQGGQVFAKDLLELEKYYAALVSIIPLICESYGAAAEFGAFVTDEFIRKKLFIIIKEQFYSGENSSSFIRYGPIKKYEDSENRETYCINNENPEEDLEDLCETLLACKPKTSKCNFDEGYFRILLLIDIINVLSISTHKEIKSIFEKVLSIIGFDQLSIDTYCVDLNEMLFVLEKLRLIKLRQKGQRSFYLSVSQEFYLEYRFIKDSNDTKLSTIRKNVLDYIYAQETRIQKTKVSILKEELKKGEIKWLQTNISLDDINIDELLKTAPLQYKVYEIPKKSGGKRTIAQPTAKLKILQREKILELENTFPVHNCAKAYKKNNNGIFENAKAHQDNSYFYKFDFEDFFESIKARDFNQYLLQFGYSLNERIDLIMLFFRFNKQSDKRKTNKIYKLLYNSDFNKSNNMSLLNVMVNEFSNEFQLSVGAPSSPFISNAILYEFDDMTQKWASEIGITYTRYADDITLSSRSKFEIADLEKEILNISSKMNFPKLKLNKRKEKYCSFKNRVSITGLNITPDHKISIGRKKKREISSMIHHFKLGKLSKDKMNRLRGWLSYCKAVENSFLDKMKIKYSEDTILEILKKN

SEQ ID NO: 4571 - protein, 646 aa, Legionella pneumophila
  source 1..646: note = Related to DACVYU010000020.1
MQIITDYFKKVDFSKVRTNHPPELIFLCGGNNDEEANNFRPKLQDKLVKKQHNVILAESAMNWRGGQKFAKDLLELEIYFAALVSIIPLICESYGSAAELGAFVADQFIRKKLFIIIKEQFYSGENSSSFIRNGPIKKYEDSEGRKTYCINDKHPEQDLDDLYEALLSCRPKTSKCYFDKGYFRILLLIDIINVLSISTLKEIKISFQEVLSIIGIDQHEIESYCDDIDEMLFVLEQLNLIKYRNKGQQGFYLAVSQEFYLEYRYVKDSDDTKLSTIRKNILDTIYSQDSRINKTKVSILKEERKKGEIAWLQTNISLDDINVHELLKTAPLQYKVYEIPKKSGGKRTIAQPTAELKALQRKKISELEDKLPIHNCAKAYRKNKNGILDNAKAHKDNSYFYKFDFQDFFESIKACDFNQFLEQHGYSFSERVDLIKLFFRFNKQSSKQKTKRVYRYLTDNSFNRNNNPALLNLMIQDFANEFQLSVGAPSSPFISNAILFEFDDMMQNWANENDITYTRYADDITLSSKSKIDISSMEKEILNICSKISFPTLKLNKKKEKFCSFKQRVSITGLNITPDHKISIGRNMKREISAMIHHFKSGKLTVDKLNKLRGWLSYCKVVESEFIIKMENKYSKNTISAILRKK

SEQ ID NO: 4572 - protein, 504 aa, Legionella pneumophila
  source 1..504: note = Related to DAECXU010000022.1
YIIFSDINPHDELDEICTIINNYKPETINSNFSHNYFKILLVLDLINVLAISSIDEIKIHAEAVLKKFDKNYEINRKTVKEMLFVLKKLDLVVEINKINQSFYLSKYDDLFLDYNPHQYKLFNIKKDIINSFYQSDESNTSNYRKYQIFSKYYRYYKDQENNSTKKDIEKEVKWINKTLDYEHIDTDQVIQIGPMLYKKFKIKKKNKGYRTICQPTAELKQIQRNELKKLYKQFLIHDAAKAYKKNINGILENASEHLGNNFFYKYDFTDFFSSIKADNFIGFLKRNSFEDNKILRLIKLFFVFDKNNKSEIKKAYEILKSNRSDINAFPRWFKDNLSLSIGAPSSPFISNIIMLEFDSIVFDWAKKNQLVYTRYADDLTFSSKHSFESKLIQKLINDTIKNIDYLNLRLNISKIRHFNIKEHVSITGLSITPDNKVSIGKKRKKEINALIHQYKNNDNYSLSRQQILRIKGLLAFCKNVETDFFLNLQKKYGNKVIKDILSEK

SEQ ID NO: 4573 - protein, 346 aa, Piscirickettsia sp.
  source 1..346: note = Related to NZ_MDTU01000002.1
MSYLIKVPSYVEFLKKVYSLISKISNDLLISEEKIKNVIDRSSLLYHEFTIVKNNKSRVIHNPAKELKAIQIYLTNMFIKQAPIHDCAFAYREGISIKNCVEKHIDSNYFFLTDFKDFFHSIMFDDILRFLKLTNISQYLSRDEDCSDFAKVMCRYKRLTIGSPSSPSLSNALCFRLDEVINRFCCNNNLIYSRYADDICISSENKINCNLVRKSILSSIQEANVIRRLRVNPSKTRTLNRAKRVKILGLNITSDRKISIGRSKKREIKSMVNMWKYNRINNIERSYLSGYISYCLAVEEDFVMGLYQKYGSTLINRIREYNASYAREKNLLLENSLMDINHSDYN

SEQ ID NO: 4574 - protein, 307 aa, unidentified
  source 1..307: note = Related to REDP01000333.1; note = Planctomycetes bacterium
MISPFNLILKDCMITNVKIMNIAQRAKHMYKTYAIPKKNGGRRIIDHPAKPLKAIQRSIVSAVLRDLPVHQSCTAYEPGRSALLNAQTHQDSRYFYQLDFKDFFHSIKHRNVSAFLESSTRLDTEESEIISMICCKGDHLVIGAPSSPILSNRIMFRFDSEATIISQSLGCIYTRYSDDITISTKNDTTAINECIRALIDFIGSPDNNWLRINEAKTRHSSLKRRVAVTGYNITNDHRPVVPRSYKRTVRALIHKAIICNNDEIELDKVLGMVAYIEGSEPGFIESLKGKYGPEVINRLRKHNTTGH

SEQ ID NO: 4575 - protein, 305 aa, unidentified
  source 1..305: note = Related to RDXE01000040.1; note = Alphaproteobacteria bacterium
MTEIIKEIMRHTGFWPSDIVRISRDAPRSYKVFSIPKQNGSSRTIAQPTKELKAIQRAIVECLRKILPAEHTTATAYVKGKSIIDNAKPHRNSRIFLKTDFQNFFPSIMPSHFDQLLIQNEIHWEPEICNLIKRLLFFGNRTSTPQCLAIGAPSSPYISNAIMYQFDLRFSQYCASNELIYTRYADDVTVSGNGKMNQSAVLNEIDRNLASVGLSALKINPSKTRVFSHKHGVKITGIRVTSDGEIKVDRELRREIRARLHKIRIQSASTEMIAETHGLLSFVHMIDEELEENLLSQYKLDSYDW

SEQ ID NO: 4576 - protein, 317 aa, Pseudomonas syringae
  source 1..317: note = Related to JACYWS010000002.1
MSEYNFREHLSDEFLISEHDVTRLLLRAPYAYKRYTIPKMNGGIRQIAQPAKETKIFQHFMMREWFSKMPIHECAAAYKHGASIKDNAERHAGSTYLSKFDFVNFFGSITERNIKVLLSTVFKGELSEKSIVDMARMSCIRDRATGRLVLSIGAPSSPVLSNAVMFNFDSVVHKWCVEQGIIYSRYADDLTFSCNEKGKTFLVEEFLQVTLKQLPEPLLTLNADKTIHASKKNQRRVTGLVLSNEGSVTIGRDRKRLISAMVHRFAIGALDNKSIAHLQGLIGFAQDIEPLFVAKLREKYTSKVITELMRVRGKKRN

SEQ ID NO: 4577 - protein, 317 aa, Pseudomonas neuropathica
  source 1..317: note = Related to NZ_JACOPX010000017.1
MSEYNFREHLSAEFMISEHEVVRLLVRAPYAYKRYTIPKKNGGIRPIAQPAKETKIIQNFMMNFWFCKLPVHECAAAYKQGASIKDNAERHVGSSYISKFDFVNFFGSITEFNIQTLLSRAFQGQLSERSIADMARMSCIRDKVTGRLALSIGAPSSPMLSNAVMFNFDSVVSQWCFERDITYSRYADDLTFSSNEKGKTFLVEEFLRGALKELPEPGLLLNANKTLHASKKNQRRVTGLVLSNDGNVTIGRDRKRLISAMIHHFIQGQLDRKSIAHLQGLIGFAQDIEPLFVAKLRGKYTSKVITELMRSRCEKRN

SEQ ID NO: 4578 - protein, 317 aa, Pseudomonas aeruginosa
  source 1..317: note = Related to CP089062.2
MSEYNFREHLSDEFLIAQHDVVRLLLRAPYTYKRYTIPKKNGGVRHIAQPAKETKIIQRFMMGEWFSKLPVHECAAAYKDGASIKDNAERHSGSIYISKFDFVNFFGSITEGDIKRILSRTFGGQLSEISIADMARMSCIRDRATGQLVLSIGAPSSPVLSNAVMFNFDSVVNQWCSERDITYSRYADDLTFSSNKKGNTFCVEEFIKGALKELSEPSLSLNSDKTIHASKKNQRRITGLVLSNDGKVTIGRDRKRLISAMVHRFAHGELDDKCVAHLQGLLGFAQGVEPLFISRLRSKYTSKVITDLMRFRSKKLD

SEQ ID NO: 4579 - protein, 317 aa, Pseudomonas promysalinigenes
  source 1..317: note = Related to NZ_CP077094.1
MSEYNFREHLSDEFVISEHDVSRLLLRAPYAYKRYTIPKKNGGVRHIAQPAKETKIIQHFMMSEWFSKLPVHECAAAYKSGASIKDNAQRHSDCAYISKFDFVNFFGSITEVDIRNLLVEVFGSQLSEKSIADMARMSCIRDRVTGRLVLSIGAPSSPVLSNAVMFNFDSVVNQWCREHDIVYSRYADDLTFSSNRKGVTFLVEDFLQGTLKELPEPSLSLNTEKTVHASKKNQRRVTGLVLSNDGNVTIGRDRKRLISAMVHRYALGELDNRSIANLQGLLGFALDVEPLFVAKLRGKYTSKVITELMRVRAKKDD

SEQ ID NO: 4580 - protein, 315 aa, Pseudomonas mosselii
  source 1..315: note = Related to JACGDE010000010.1
MSHYNFRKQISEEFMISEHDVSRLILRAPYAYKRYTIPKKGGGVRHIAQPAKETKIIQHHMIHEWFSKLPIHHCAAAYKTGASIKKNAELHSNSTYISKFDFVNFFGSITALNIKNLLQNEFNNIISEASIEDMSRMSCIRDKATGRLVLSIGAPSSPILSNAVMLNFDTVVHQWCSERGIIYSRYADDLTFSSNERGATLKIQDFIQGTLKELPNLNLILNTDKTIHASKKNQRRVTGLILSNDNKVTIGRDKKRLISAMIHRFSHNELNSKEIMHLQGLVSFAQHIEPLFVAKLRGKYSTKLITELLRSRGDK

SEQ ID NO: 4581 - protein, 315 aa, Pseudomonas viciae
  source 1..315: note = Related to NZ_CP035088.1
MSLYDFRKHMSEMLSLSEHDVARLIVRAPYAYKRYFIPKKSGGMRPIAQPAKETKVIQNLLVNSWFSQLPVHECAAAYRQGSSIKANAERHKQNSYIAKFDFSNFFGSITESDLVNHLSYVLCGKLSVQSIKDIARVSCIRDRATARLALSIGAPSSPILSNSIMYYFDLAVESWSLERNIVYSRYADDLTFSTNDKGATSEIEKFILETLESIPYPRLHINSEKTVYASKKKQRRITGLIISNDNEVSLGRDRKRLISAMIHRYAHHELDEKSILHLQGLMGFAQDIEPLFVAKMRGKYTGRLISDLLRQRGKK

SEQ ID NO: 4582 - protein, 317 aa, Pseudomonas glycinae
  source 1..317: note = Related to NZ_CP014205.2
MILYDFRKHISEVLSLSEHDVARLIVRAPYAYKRYFIPKKSGGMRPIAQPAKETKVIQGILIESLFAQLPVHECAAAYKQGSSIKDNAERHRQNSYIAKFDFSNFFGSITELDLIKHLSYVLCGKLTAQSIKDIARVSCVRERSTSRLALSIGAPSSPILSNSIMYYFDLAMEGWCRDRSIVYSRYADDLTFSTNDKGVMFDVEAFILEVLENIPYPRLKINSEKTVYASKKRQRRITGLIITNDNNVSLGRDKKRLISSMIHHYVQNKLDEESILHLQGLMGFAQDIEPLFVAKMRGKYTGKIISDLLRQRGKRIK

SEQ ID NO: 4583 - protein, 317 aa, Pseudomonas parafulva
  source 1..317: note = Related to NZ_CP031641.1
MSLYEFRKQISVALSLSAQDVARLIVRAPYAYKRYTIPKKGGGVRPIAQPAKETKIIQSILISDWYCRLPVHENAAAYKSGASIKANAERHKNNTFVAKFDFKNFFGSITYSDLVNHLSYVFVNEVTKQSILDMARVSCVRDRSSGDLTLSIGAPSSPVLSNSIMYNFDLAVVEWCAERDVEYSRYADDLTFSAKDRGVLFSVKDFLLSTLEEIPYPKLSLNEEKTIYASKKNQRRVTGLIISNENKVSLGRERKRLISAMVHKYSHQDLDEKAVTQLQGLLAFAHDIEPLFIAKLRGKYSSKVIMDLMRKRGKKIK

SEQ ID NO: 4584 - protein, 316 aa, Pseudomonas sp.
  source 1..316: note = Related to JAGPVQ010000174.1
DVYDFRKYVSDTLAIPIHDVLRLLVRAPYTYKRYEIPKKSGGSRSIAQPAKETKIIQRLLMDAIFSQLPVHECAVAYKHGASIKTNAQQHRYNQYLSKFDFSNFFGSITSEDIAAHLGQCLGDELSEQSVADIARISCIRNKINSGLCLSIGAPSSPVLSNSILYNFDVSVSAWCLEKGIVYTRYADDLSFSSNQKGLSGSIEPFLRQTLKDISYPSLVLNERKTIHVSKKHQRRVTGLVISNDGSVSLGRERKRLISAMIHRCINDKLEEADIYILQGLLGFAQDAEPIFVARMRAKYGSLVIREILRKRVKLPR

SEQ ID NO: 4585 - protein, 315 aa, Pseudomonas sp.
  source 1..315: note = Related to NZ_CP019428.1
MDIYDFRKHVSETLAIPSHDVARLIARAPHTYKKYEIKKKDGGSRSIAQPAKETKVIQRLLMEALFCDLPVHECAVAYKLGSSIKKNAQLHRQNQFISKFDFSNFFGSITEKDVAAHLRHVFIGKISEQSILDIARTCCIRNSLTGILCLSIGAPSSPILSNSILYYFDIAIQTWCNERDIIYTRYADDMTFSSNERGVTSLVEKFLTHTLKNIKYPHLILNEKKTIHLSKKHQRRITGLVVSNDGLVSLGREKKRLISVMIHHYLLKKLDHKDIPILQGLLGFAQDAEPLFVARMRGKYGSPAISEIMRGRIKK

SEQ ID NO: 4586 - protein, 325 aa, Pseudomonas fluorescens
  source 1..325: note = Related to NZ_CABVJA010000003.1
MSIFDFRKHLSESLAIPTHDVVRLIVRAPHTYKKYEIPKKSGGVRLIAQPAKETKLIQRLMIQEIFTELPVHECAAAYKEGASIKANAEQHKNNQFISKFDFVDFFGSIKEADVASHLAYALPGKVSEQSIKDIARISCIKNKTLGGLQLSIGAPSSPILSNSIMYYFDVAVAAWCADKGVIYTRYADDLTFSSNVKGLPAQIEPFLTEILKEIPYPTLSLNKKKTVHVSKKHQRRITGLIINNDGAISLGRERKRLISAMIHRFILGTLEVEAILNLQGLLGFAQDAEPLFVVRMRDKYGHQVITELLRHRGVSKDKPKAYLKN

SEQ ID NO: 4587 - protein, 318 aa, Pseudomonas proteolytica
  source 1..318: note = Related to NZ_JAAQXL010000002.1
MSVYDFRGNISNALVVSSNDVSRLIIRAPHTYKTYEIDKKNGGKRSIAQPAKETKYIQRLLMTQLFSRLPVHSCAVAYKDGASIKKNAELHKNNQYISKFDFTNFFGSIKEPDISAHLASVFGDELSDETIKDISRISCIKHKDLPGLCLSIGAPSSPVLSNTIMYLFDQIVHEWSVERGITFTRYADDLTFSSNTKGLFSEIEPFLSQVLKKLPYPVLSLNSKKTIHVSKKNQRRITGLVLDNDGRVSLGRDRKRLISTMIHHYSCGRLSDEETMRLQGLLGFAEDAEPLFVSRMRGKYGILVISELFQKRGKKLEK

SEQ ID NO: 4588 - protein, 320 aa, Pseudomonas sp.
  source 1..320: note = Related to BPLZ01000028.1
MSSYEFRQDVVEFFSVSEHDVFRLLQRAPHTYKRYEIDKKSGGKRLVAQPAKETKILQRYLMRVVFNDLPIHECATAYSSGSSVRKNAELHVVNPYISKFDFVDFFGSIKESDLILHFSRFLGGKVSEQSIKDIARVCCIQHKGRADHCLSIGAPSSPVLSNSIMYDFDEQVEAWCKERGITYSRYADDLTFSTSGKGVSAEIEPMIRGLLNDLPYPRLSLNDKKTLHLSKKVQRRVTGVILNNEGKLSLGRERKRKISSMIHRFSLGQLDEKDVFQLQGLLGFAEDVEPLFVSRMRGKYGIGVISALFQKRSEGRINKL

SEQ ID NO: 4589 - protein, 321 aa, Pseudomonas aeruginosa
  source 1..321: note = Related to CP041771.1
MSKFELRLRLCRELLLTDKEVARLISRAPYTYKVYSIPKKNGGRRVVAQPARETKILQNFLIENVFKELPVHECATAYKAGSSIAINASAHVGNSYISKFDFSNFFPSITMLDLVRHIKSFFDGRLDDLEIIDIARVCCIKDRVTDRFHLSIGAPSSPILSNSIMYFFDVAVHKWSSERGVSYTRYADDMTFSTNEKSMSREIELFLVRQVEAMKSPRLSINHEKTIHLSKRNQRKVTGLVLSSEGKVSLGRNRKREISSLIHRFALGQLDPTDVFRLQGLLGFANDAEPDFVVRMRKKYGDLVIAALFEKRKAPSVISDG

SEQ ID NO: 4590 - protein, 316 aa, Burkholderia contaminans
  source 1..316: note = Related to LASC01000001.1
MTINLRESLQESLGLSEAQLNRLIVRSPHTYKVYTIPKRTGGKRTIAQPAKETKFIQNWLIENIFNSLPVHSCASAYQPGSSIKRNADAHKAQRYLTKFDFKNFFTSIKSDDLIEHMRVHLGEVLDLDAIHDIARVSCIQLKAGEKLCLSIGAPSSPLLSNSIMFEFDSLVNEWCSRERVVYTRYADDMTFSTNERNKSAVIEKFIRGVVRDVGYPSLRFNNKKTISLSTKHSRRVTGIVINNQGQLSLGRDRKREVSALVHKFMLSELPQAEVYRLQGLLGFACDVEPDFLARMKRKYSDELIRTILEIRKKSDA

SEQ ID NO: 4591 - protein, 316 aa, Burkholderia gladioli
  source 1..316: note = Related to NZ_CADEWJ010000002.1
MTIHLRGALRDSLGLSDAQLNRLIVRSPHTYKVYTIPKRTGGKRTIAQPAKETKFIQHWLIRNVFCHLPVHACASAYQDGASIKKNADAHRLQRYLAKFDFKNFFTSIKSDDLIIHMRRHLGSILEESAIDDVARISCIKLKAGGKLCLSIGAPSSPLLSNSIMFDFDSLVNGWCKKEGVIYTRYADDMTFSTNERDKSREIEEFIRSAARDVEYPALRFNTKKTVFLSTKHSRRVTGIVINNQGELSLGRDRKREVSALVHKFSFEELPEKEVYRLQGLLGFAKDVEPDFLERLKRKYSDELIRQILAIRKERDV

SEQ ID NO: 4592 - protein, 313 aa, Burkholderia sp.
  source 1..313: note = Related to NZ_FSRV01000001.1
MTIALRKELQESLGLSEAQLNRLILRAPHTYKVYTIPKRTGGVRVIAQPAQETKFIQNWLIKRVFGELPVHSCATAYQAGSSIKKNAAAHKDHQYLAKFDFKDFFTSIKADDLVAHMSRHLAGLLSRSEILDAARISSIQQRQSESLCLSIGAPSSPLLSNSVMFEFDSLVSNWCVDRGIIYTRYADDMTFSTNRKGRSGEIEEFIRNIARGLDYPRLRFNSKKTVFLSKKHQRRITGIILNNDGELSLGRDRKREIKALVHKFTCDELPGEEVYRLQGLLGFALDVEPTFLQALNVKYSDQVIETILSIRKE

SEQ ID NO: 4593 - protein, 314 aa, Cupriavidus necator
  source 1..314: note = Related to NZ_CP017757.2
MKIALRKALHDSLGLPEDQLNRLILRSPYSYKVYTIPKRSGGLRVIAQPAKETKFLQHWLMANVFRNLPVHECATAYQAGSSIKKNAELHKNNSYLVKLDFKNFFPSISARDLISHMRRHLDGSLDEEAQRDIARISCIRLPDAPGLCLSIGAPSSPMLSNSVMFEFDTAVHGWCNERGVRYSRYADDLSFSTNERGASGDIKEYVLSVVERLEYPRLSLNDKKSVFLSKKHQRRITGLIINNENQISLGRDRKREISALIHKFSVGALPDSEIFRLQGLLGFARDVEPRFFVSMSKKYTSDTISNILSTRKKP

SEQ ID NO: 4594 - protein, 317 aa, unidentified
  source 1..317: note = Related to QFXG01000005.1; note = Candidatus Nitrotoga sp. SPKER
MTDHLRHGLQESLGLSDCLLNRLIQRAPHSYKIYTIAKRTGGQRTIAQPAKETKFIQRWLIQNIFNKLPVHECASAYKDGASIKKNANAHKNHSYVIKLDFKDFFPSITFSDLVKHIAKHLGHILRTQDIQDIARISCIRLHGKSDLCLSVGAPSSPVLSNTIMYNFDSEVSAWCTQQCITYTRYADDLTFSTNFKGGSSEIEAFVRSITQKLTYPSLRLNNNKTTHLSKKHQRRITGIIINNEGNLSLGRNRKREICALIHKFSLDLLPESEIFRLQGLIGFAKDVEPLFVARMRGKYSSKLIEEVLQKRKPGRLC

SEQ ID NO: 4595 - protein, 312 aa, Acidithiobacillus ferrooxidans
  source 1..312: note = Related to JABFOH010000005.1
MTDHLRHDLEESLGLSDYLINRLIDRAPYSYKVYTIPKRSGGQRTIAQPAKEIKFIQRWLIQNIFDKLPVHECASAYKDGASIKKNANSHKSHSYIIKLDFKDFFPSITSSDLVMHISKHLGRTFGAQDIQDIARVSCIRLHGKGDLCLSVGAPSSPVLSNTIMFSFDSEVSAWCAQNGITYTRYADDLTFSTSTKGICSEIESFVKGVTQELDYPNLTLNFNKTTHLSKKHQRRITGVIINNFGALSLGRNRKREISALIHKFSLDMLPESEILRLQGLLGFAKDIEPLFVARMRRKYSSRLIEEVLKKRK

SEQ ID NO: 4596 - protein, 321 aa, Marinimicrobium koreense
  source 1..321: note = Related to NZ_RJUK01000001.1
MMIGLDISEQISKDLYVSAFQVDRLINRAPHAYKIFFIPKKTGGQRKIAQPAREVKYIQRWLVDNIFNQLPVHEAVKSYREGLGIKDNATWHKKNKYLVKLDFKDFFTSIKEAGLFDFLLRKLSDSYSDESLRKIARASCIKYKHREDLCLSVGAPSSPAISNAILYAFDEAVNNWCFENSISYTRYADDLTFSTSVPNVSSLIEPKVRQISSDFPYVNLRFNNAKRTHLSKKYQRRVTGIVLTNQGELSVGRLRKREVKALIHKFKTGLLPMNEVHRLQGLLGFVSDVEPMFLERMRVKYSSATIDDILKSVKQDKLVNS

SEQ ID NO: 4597 - protein, 314 aa, Cellvibrio sp.
  source 1..314: note = Related to MVDH01000001.1
MNKSLLQEISESFFMSEIQIERIFVRAPYAYKLYTIPKRSGGLRNIAQPAKETKYVQSWLIHNVFSSLPVHDCAMAYKSGSSIKENALAHVEKPYLVKFDFKDFFTSIKEANLIAHFQLYLGGRFSSEEIKYLARISCIKYKHATEKCLSVGAPSSPILSNSILFEFDKSVHEWCVSKNIVYTRYADDLTFSLREKGMASTIEAEVRNFAKTKCVVNLRFNQKKTTHLSKKCQRRITGLVITNEDKISLGRDRKREIKALIHQHLLGMLNADQVSNLQGLLGFAKNIEPSFLFSLYKKYTFEVVNGIIRSRKTK

SEQ ID NO: 4598 - protein, 314 aa, Pseudomonas sp.
  source 1..314: note = Related to NZ_BQIK01000019.1
MTNSPLVNICADTLHISTSQVMRLILRAPHTYKVYSIPKKSGGRRIIAQPAKETKYLQDVIIKRYLNLLPIHEAASAYKIGSSIKNNANAHKHNKYFVKLDFKRFFESITLDDLVTHFEKYLPTPLSKEDTVYLARICCRSSDGRAALTIGSPASPVLSNTVMYDFDKIIESWSSQNGFTYTRYADDLTLSTSTPGASAQVIPAVLNALEKIEYPKLLLNNEKTVFLSRKNNRRITGIVINNDGRLSLGREKKRLISAMIYHYQQGRLSEENQFKLQGLIGFALDIEPIFVSRLNSKYGRDVISKILQRRQPKQ

SEQ ID NO: 4599 - protein, 310 aa, Pseudomonas alliivorans
  source 1..310: note = Related to JAFFZW010000005.1
MIAHKTLEKMLADLSLSSEQLVRVVSRAPYSYKTYSIPKKNGGLRIISQPARETKYVQHWLIHNVFHLLPIHEAASAYVKGASIKKNAEAHRTNEYMVKLDFKDFFPSIKIDDLIAHFQKSLPFLDLLEIRYIARLSCINRGNGGALSIGSPASPILSNSIMYEFDSVVADWASQNKFVYTRYADDLTFSTSLPYASESVVPVIKDLLSSLKYPRLSLNVDKTIHLSKRGSRRITGLVITNDDKVSLGRDRKREISALVHKYGLGLLEQKDVFRLQGLLGFAADVEPLFLSRLGKKYGMKTILNLLRKRQ

SEQ ID NO: 4600 - protein, 316 aa, Pseudomonas sp.
  source 1..316: note = Related to MSXW01000061.1
MSNNPLIDALLSDLALSKEQFLRIASRAPRTYKIYPILKKNGGIRVIAQPARETKYIQSWLANNVFGLLPVHDSATAYRKGSSIKVNAQMHAANPYIVKLDFTNFFPSIKSSDVFAHLKQFLIGATDSELKIFTLLSCFNNNGELCLSIGSPLSPGLSNSIMYEFDSIISDWAAGNNFIYTRYADDLTFSTPIKGASEAVVDKVREVIGKIAYPRLSLNEKKTIHLSRKGCRRVTGLVLSNSGSVSIGRDKKREISAMVHRFSIGKISHDDLRRLQGLLGFVQDVEPLFIARLRAKYSSAVVVDLLRRRVKKESDK

SEQ ID NO: 4601 - protein, 318 aa, Pseudomonas stutzeri
  source 1..318: note = Related to POUU01000009.1
MSNQSTLSRLLDELALEPHQFRRIALRAPYTYKTYTIPKKNGGARVISQPARETKYIQSWLIENIFKKLPVHSAAAAYVKGASIKKNANAHKDNPFLVKMDFENFFPSIKSLDLHLHFRKHLSFLSEEEILLVARLCSVRGMVHDGLSIGSPASPILSNSVMYEFDSLVAEWSQRNGFVYTRYADDLTFSTSTKEASAAVEPMIRDVIGAIGYPSLTINNRKTLHLSKKTNRTITGVIINNQGQLSLGRTKKREISSLVHRYTLEQLDVSRVHKLQGLLGYAYDLEPKFINALSKKYSLGVINEILRRRPPRQEANTD

SEQ ID NO: 4602 - protein, 323 aa, unidentified
  source 1..323: note = Related to SDYH01000002.1; note = Alphaproteobacteria bacterium
MTIALIEEIQASLGLSSEQMVRLIVRSPYTYKTYTIPKKSGGFRVIAQPAKETKLIQRWLISNLFNKLPIHDCATAYKEGSSIKLNANKHRENEFLSKFDFIDFFQSIKEEDIKAHLMECLGGFLSEKEVAWVARLSCIKTQTSKNLCLSVGAPSSPLLSNSAMFQFDSKLNNWCQENGIIYTRYADDLTFSSSIKGASAEIEGAIQNVLTEMARPKLLLNNKKTIHVSKKHQRRITGIIINNEDELSLGRERKRMISALIHKFTLNQLASFEIFRLQGLLGFSKDVEPAFLIRMRDKYGSGVIEMILKIRKDNNGKNGDFNS

SEQ ID NO: 4603 - protein, 313 aa, Polynucleobacter wuianus
  source 1..313: note = Related to JACVPK010000010.1
MNSNDLIGRLISHLGLNEKDVLGLIRRAPFTYKVYTIPKKTGGNRVIAQPARETKYIQNWLIDHIFLALPVHERSMAYKKKIGLINNVLPHKNNKYLAKFDFKDFFHSIKFLDLVNHFNKHLHHLLSEAEIQYVARVACIKQRDSGSLCLSVGAPSSPLLSNSFMFEFDSAMDEWCQENEIIYTRYADDLTFSTNISGATNKIQQTIVGILSLKYPNLFLNHDKSIQLSNKNRRRVTGLIITNQQRISVGRDRKRMVTSMIHKFSIGELRAEDVFYLQGMLGFIKSVEPTFLVSMNRKYGHDLLTKIISIRKE

SEQ ID NO: 4604 - protein, 317 aa, Janthinobacterium sp.
  source 1..317: note = Related to JACYMM010000001.1
MIDNLSGLIHLSLGISTTQLDRIIQRSPFTYKIYTIKKRSGGYRTIAQPAKETKFIQNWLIENIFSTFPVHECASAYKNGASILKNAELHKKGEFLSKYDFKDFFSSIKVKDLVLFFTHQLAHRFSKLDILRMAQISCVRHTELSGLCLSIGAPSSPILSNAIMYDFDAKIYEWCNKNNISYSRYADDLTFSTNELGRSDEITSLVNAAILENKIVKLQINKKKTVHLSKKYQRRITGLIITNSNIVSIGRSRKREISTLIHKFSLNMLSDDEKYRLQGLLGFSKNIEPLFIERMNVKYGKDLINQIFKIRKSTDTA

SEQ ID NO: 4605 - protein, 315 aa, Janthinobacterium agaricidamnosum
  source 1..315: note = Related to NZ_CP033019.1
MKYSLPQLLQENIGLHPSQFERLIRRAPDTYKHYTIKKRTGGDRWIAQPAKETKYIQHWLIDNIFLKFPVHRCAMAYKAGTSIAINAAAHSKNSYLAKFDFSNFFNSIKYHNVNDFLSLLLEDSFSPDDIDNMARVSCVREPDFGLCLSVGAPSSPLLSNAILYEFDSRIEYWCQERSITYTRYADDLTFSTNEKGACSEIHKFLVDSLIDFDCPVLRLNDKKTIHSSKRFQRRVTGLIINNDGMVSLGRGRKREISAMIHKFRCKDLAESESYRLQGLLGFARDAEPSFVESMNKKYGNEILSSIYSLRKPKES

SEQ ID NO: 4606 - protein, 318 aa, Duganella radicis
  source 1..318: note = Related to NZ_WNKY01000042.1
MNSKLLTQIRAELGLPVAQIERLIERAPYTYKVYTIPKRSGGDRTIAQPARETKLIQKWLIEHIFCTLPIHDAAAAYRPGASIKKNAERHANSKYMVKLDFKEFFPSIKYQDLVNHFCVHLSDAYEDDDIKRMALISCLHIGGRDFALSIGSPASPCLSNSIVYELDKKIKSWCKENKVAYTRYADDLTFSTNRPDISSEVEKMVSLTLKEIEYPQLKLNKKKSIHLSKRHKRVVTGVIINSENNLSLGRDRKREISSLIHKYSIGLLSKGDTYRTQGLLGFARDIEPDFVARLNTKYGNKLLEEIFTLRKAEEEDDL

SEQ ID NO: 4607 - protein, 315 aa, Duganella sp.
  source 1..315: note = Related to LRON01000007.1
MSSKLLTQIRAGTGLPITQIERLIVRAPYTYKIYTIPKRSGGERIIAQPARETKLIQNWLVENAFGSLPIHKAATAYRSGASIKHNAEMHAKSRYMVKLDFKNFFPSITYNDLVAHFSRHLSEQYEIEDIKRMAIISCLNIGRLDLALSVGSPASPCLSNTVMYELDNIIQNWCDDKHITYTRYADDLTFSTNQKDISTEVEIMIASSIATVQNPRLSINSEKTVHLSKKFKRMVTGVVINSQNNISLGRDRKREISALIHKFSIGILSPDEAFRTQGLLGFAKDIEPDFVVRMDKKYGNQLLEQIFKLRKVTEI

SEQ ID NO: 4608 - protein, 321 aa, Burkholderia stabilis
  source 1..321: note = Related to NZ_CP016442.1
MKIDLSQRLQESLGVSSDQLARLVARAPYAYKVYEIKKRSGGMRTIAQPARETKFIQIWLIENIFKELPVHESATAYGKGSSILKNAVAHKDNRFIAKFDFRNFFPSIKYEDLVEHFTRHLSGVVSDADVKMMARIACMRSKTNGRMQLSIGAPSSPILSNSIMFEFDSQISAWCVEQGIVYTRYADDLAFSTDVIGATAKIEPIIRQALRGINYPALQINNKKTVQISKKFQRRVTGLVINNEGDISLGRDRKREISSLVHKFTLGGLADDDIFRLQGLLGFAKDVEPQFIVRLSAKYTAEIINVILKLRKPPKLKSDFN

SEQ ID NO: 4609 - protein, 316 aa, Burkholderia gladioli
  source 1..316: note = Related to NZ_CADEZN010000001.1
MNLSLKMQEELGITGEQFTRLVARAPYAYKIYEIDKRSGGTRTIAQPARETKFVQSWLIEHVFGALPIHECATAYGKGASILKNVDAHKENSFLAKFDFRNFFPSIKYDDLLLHFSIHLSNIASVEDVKMMARIACMRSKASGQLQLSIGAPSSPIISNSVMFEFDCRVAAWCAEQRIVYTRYADDLAFSTNVKGATVKIEPIIRKVLREIPYPLLQLNNKKTIHVSKKYQRRITGLVINNADEVSLGRERKREIGALVHKSTLGLLNDDDVFRLQGLLGFAKDVEPQFVIRLRAKYTCEVIDAILQLRKPSKAKS

SEQ ID NO: 4610 - protein, 326 aa, Acidovorax sp.
  source 1..326: note = Related to JAGMZN010000009.1
MSILEGLAMASSIFSRMQEAYALSDEQLNLLVKRSPHSYKVYSIPKKSGGNRQIAQPAKETKYLQYWLIENVFSLLPVHECASAYHKGASVKSNAAAHSKNQYLSKFDFRNFFPSIVFSDLVRHFEKHLNDHVQAADILLIARLACIRPKGTSNLCLSIGAPSSPILSNSIMYEFDERISGWCKDHGIVYTRYADDLAFSTNIKSISYAVEKELREVLAGLQYPKLVLHAEKTIHVSKKYQRKITGVVINNQNALSIGREKKRIVSSLIHRFALNGLSDADISRAQGLLGFAHDVEPLFVVRMRQKYGFRVIDQLLSFRVQSEEKK

SEQ ID NO: 4611 - protein, 313 aa, Methylomonas sp.
  source 1..313: note = Related to NZ_KI911557.1
MSTNLRREITGSLGISDLQINRIITRSPYAYKTYSINKKSGGKRIISQPAKETKFIQRWLVENVFSKLPIHQSVTAYRAGSSIKKNASIHKNNKYFAKFDFKDFFTSIRSDDLIAHLNKYLSDKYSYEEIMDIARISCKKNKRSGKLFLTIGAPSSPIISNTVLFDFDTLLYSWCCQNNITYTRYADDLTFSTNEKESTKNIEKNIRSIIRAIEYPRLIINSKKTVHLSKKSQIRITGLIIDNNKNVSIGRKRKREISSLIHSFSLGALPNDEVYRLQGLLGFANDSEPQFLERMRSKYSSEKIDNILKIRKQ

SEQ ID NO: 4612 - protein, 314 aa, Halomonas qijiaojingensis
  source 1..314: note = Related to NZ_BMXS01000014.1
MDESRFRQLLKDELSISFSESARLIARAPHAYKVYRIKKVGGGYREISQPAKETKFVMHWLVGRFFEKLPVHECATAYSSGSSIKKNAIIHAEKSYIAKFDFKDFFPSITKFDVEKHLGCFNREELDGKSLSEIARLCTVAKGGSDNLCLSIGSPASPVLSNSIMYAFDRRIYEWCCDNSVVYSRYADDLTFSTNVKGLSFELPELVRTVLDGIEYPSISLNNEKTVFASKKGHRRVTGLVLSNPGKVSLGRKRKREISALIHKFSVGALSKEDLLRLQGLLGFVKDVEPLFVEKMISKYGYRVIVKILSFRKD

SEQ ID NO: 4613 - protein, 312 aa, Halomonas halmophila
  source 1..312: note = Related to NZ_BJOC01000041.1
MDESKFRRLLKEELSISYSESARLIARAPHAYKKYRIKKADGGFREISQPAKETKFVMHWVIDRFLKPLPVHESAAAYRKGASVKKNAAMHSSNSYLAKFDFKNFFPSIKISDIERHLALHGDRGLDERSVSEIARLCTIAHMEGKCLSIGSPASPFLSNSIMYDFDEKVSRWCAENALTYTRYADDLTFSTNVKNLSFEVQGFLIEVIQSLEYPAIELNENKTVYASKKGHRRVTGVVLSNAGNVSLGRERKREISSLLHKFRIGELSREEVYRLQGLLGFANDVEPVFVERMRKKYGHDLLWRIMSLSRE

SEQ ID NO: 4614 - protein, 315 aa, Alcanivorax profundimaris
  source 1..315: note = Related to JABJWH010000040.1
MDETVFQSLLQKELAISTSESGRLIARAPYAYKTYSIKKANGGRRTISQPAKETKFVMRWLVDRIFSKLPIHECASAYQKGSSIKRNAITHSNNGYIAKFDFKDFFPSIKREDIETHLYQYLPKDLELDRKSISQIARLCTISTGGGRLALSVGSPASPALSNSIMFDFDTIIANWCFSNSIFYTRYADDLTFSTNRKGLSFLILEQIHNTLSEVNYPQLSINDRKTVYSSKKGHRRVTGVVINNNGKLSLGRERKRKISSMVHKSCLGVLSDDETRHLQGLLGFAKDVEPLFIIRLKNKYGKRAIQEIFNSQII

SEQ ID NO: 4615 - protein, 319 aa, Pseudomonas aeruginosa
  source 1..319: note = Related to VOJF01000050.1
MTLQEFLLKISSALAISNSELLHLIAKAPYSYKSYKIKKKSGGDRVISQPAKEIKYLQNIIMEAFLNKLPIHECATAYKKGGSIKKNAAAHTSNTYISKFDLKDFFGSIKANDVSQHLEKHLNGDLPPASYQLIARICCIKHKGLEELCLSIGAPSSPLLSNSIMYEIDQKISQWCRENQVTYTRYADDLTFSSNIKGISFEIEGLLSDILSTSQSPRLKINEKKTIHVSKKGTRRVTGIIITNDNKMSLGRERKRLISAMIHRNLVQRLEEKDIERLQGLLGLAKDIEPIFCARMRKKYGAAAISEILQYRREELKED

SEQ ID NO: 4616 - protein, 319 aa, Pseudomonas aeruginosa
  source 1..319: note = Related to NZ_UATW01000001.1
MTFQEFLLNISSALAISDSELLHLVAKAPYSYKSYKIKKKTGGDRVISQPAKEIKYIQHVLIEFFLNKLPIHESATAYKKGGSIKSNAAAHRENTYISKFDFKDFFSSIKAADISLHLEKHLGDDLPPESYQLISRTCCIRHKGAEELCLSIGAPSSPLLSNTIMYELDQKISEWCQENQVIYTRYADDLTFSSNIKGKSFEIENVLRSILSATPSPKLSINNKKTIHVSKKGTRRVTGLIITNDDKISLGREKKRLISSMIHRNLTQGLKSKDIEKLQGLLGLAKDIEPIFCSRMRKKYGAATISEILQYRREEPEED

SEQ ID NO: 4617 - protein, 316 aa, Pseudomonas sp.
  source 1..316: note = Related to NZ_CP015992.1
MSHHDFLHDIASTLTLSLQELVYLIAKAPHSYKVYRIEKKTGGKRIIAQPARQIKYLQRALIHSVFKELPIHSCATAYAHGSSIKKNAEPHKNNKFISKFDISDFFGSIKEHDLIKHFNRHLAENINPDYFRYIARSCCINYKGTQELVLSVGAPSSPILSNSIMHEFDCIIHDWCTSKNITYTRYADDLTFSSNTKGVSFEIEKAITEALNSLDYPTLKLNTKKTFHASKKSQRRITGLIISNEGKISLGRDRKRTISAMIHKFSNGALPEEDIPKLQGMLGFAEDVEPVFSSRMRAKYGVKAISEIFQYRKQKK

SEQ ID NO: 4618 - protein, 314 aa, unidentified
  source 1..314: note = Related to PBYC01000020.1; note = Oceanospirillaceae bacterium
MKQESPIIAALCSELGFSSNQLMRLIARAPHTYKTYKIPKKTSGFRTIAQPARETKILQNWLIHNVFKDLPVSESASAYKKGASIKKNASHHKDSSYLLKMDFKNFFESIDIEMIKNHLISCLDVSRLDASAIARICSIDTQSSPNHHLSIGAPSSPILSNSFLFNFDLEAEQWCKENNCIYTRYADDIFVSTNAKSKTKEAEQLIEKLVNELLPGLKLNHKKTKHLSKKFNRTITGLVISNDNEVTLGRDRKREVRKSVFLYTKGLLEHEQVEKLQGTLSFAKHIDPVFLSSLQEKFGSDIIGEIFNARRKTK

SEQ ID NO: 4619 - protein, 311 aa, Thalassolituus oleivorans
  source 1..311: note = Related to JALE01000028.1
MTTTPSFLSKLAKAYKLTETDIKRLVARAPHTYKTYEIPKKSGGKRTIAQPAKETKIIQNWLIKTEFKGLPVSNSASAYKPGSSIKINALKHRKNRYLLKMDFKNFFESIDETMVKEHLFKYLQIPESDAATISRVCCFQKKHSKKLSLSIGAPSSPILSNSIMYEFDAEIENWCRLNAAIYTRYADDLFISTNQSGRTADAEQFILTLTKELLPKLDINKNKTKHLSKKCNRTITGLVITNEGGVSLGRDKKRNIRKSLFLHQKGLLDKKQLSTLQGELGFAKHIDPDFITTLNDKFGNQFIHAIFTHRE

SEQ ID NO: 4620 - protein, 314 aa, Halomonas sp.
  source 1..314: note = Related to DNYL01000221.1
MKSKLREIIKKKFALSDAEVAILISRAPVSYKSYKIKKKNGGHRKIHQPAREIKALQRWILDAVFSKLKVHPSSTAYEPGSSIKENAKRHLDNSYFIKLDFKDFFHSIKSEDIIQFLTDKGIKLNNRDLSDLVRILCIKDGESLCLSIGAPSSPKVSNVILYDFDEAVTNWCSENEVTYTRYADDLTFSTKRKGIGHLIEKQVLEIISEIQYPKIELNLSKRVSVSKKDWVSITGLTITTQNSISVGRKRKRFVKSLIYKHLSDGLQEKKLGELNGLISFIENIEPGFKDKMLEKYGDVPGLNLKKAKDEVSDL

SEQ ID NO: 4621 - protein, 314 aa, Halomonas alkaliantarctica
  source 1..314: note = Related to NZ_SOCZ01000001.1
MENKLREIIKKQFALSDTEVAILISRAPVSYKGYRIKKKNGGHRKIHQPAREIKALQRWALDAVFSKLKVHPSSTAYEPGSSIKENANRHVNNDYFIKLDFKDFFHSIKSEDIVQFLSDKGIKLNSKDLTDLVRILCIKHEDSLCLSIGAPSSPKVSNVILYDFDEKVTSWCNENNVTYTRYADDLTFSTKQKNMGHLIEERILKIIYDMNYPKLELNISKRVSVSKKDWVSITGVTITCQKTLSVGRRRKRFVKSMIYKHMSEGLKQHNLSELNGLIAFIEHIEPGFKRKMIEKYGNVAGLNLKKESDEDPEI

SEQ ID NO: 4622 - protein, 309 aa, Kushneria phyllosphaerae
  source 1..309: note = Related to NZ_ONZI01000001.1
MSESKLRQLISSSLFIPEKDLSLFIARAPVAYKSFFIAKKDGGFRKINQPAKETKKLQRWVIEKVFSHLDIHDCAMAYRAKVSIKDNALVHSNNKYFLKLDFENFFGSIKSEDIQNFLHDKKIKLDDDDVRDLARILCIKDEGKLCLSVGAPSSPAVSNAILYAFDEEISFWCLERKIAYTRYADDLTFSTKEQEACYSIKEKVKSILESMAYPRLKLNESKTLSLSKKNNIKVTGITVTSDNKISIGRKRKRFIRSQVYKYKKGELKPSSVPRLRGLIAFFEHIEPGAISKLEMKFGKELMVRVVKGS

SEQ ID NO: 4623 - protein, 326 aa, Paraburkholderia caledonica
  source 1..326: note = Related to NZ_NGUT01000002.1
MHILERISHDLLVPQSLLEDALRRAHVRFRKIKIPKRSGGERVLLQPAAELKLILSWADSYVLRKAPVSNVATAFEPGTSIVRNAQIHSKSDYSVRVDLSNFFPSIRSHDLLRALSKARQHFPEWVFERDFEDMLRKACFDRADSLPVGYMTSPRIANIVMLDVDTTLQTTISSNPERFGRAYITRYADDFVFSTNRKGACNEFVEELRTLLASRPSPKLAINEAKTRFMSRKGGTTLITGLRVNNDGDVGVHANYRDHIRLLLKLFATGRLEQAENESLRGHLAFIEHADPSLFTRLSYRYHAEIAKLRGHAGLTALPAPQKLSS

SEQ ID NO: 4624 - protein, 318 aa, Paraburkholderia silviterrae
  source 1..318: note = Related to NZ_SMRP01000003.1
MNIVERMSNELSVPQSLLESALLLAHVRFRKIKVPKRSGGERVMIQPASELKLVLSWLDSRVLSNAPVSPIATAFEPGTSIVKNARTHSKSLYSVRIDLSNFFPSIRSRDLLLALSRSRELLPEWASGGDFETLVRNACFDRADRLPVGYMTSPRIANIVMLELDTALATAVSRDTVRFGQAVLTRYADDFVFSTDKKGACNEFLSEMRSLLASTPSPKLSINEAKTRFMSRKGGTTLITGLRVNNDGDVGIHANYRDHIRMLLKLFSTGRLKPAENEKLRGHLAFIEHADPDLFTRLSFRYHAEIAKLRGHPSLNPA

SEQ ID NO: 4625 - protein, 306 aa, Burkholderia ubonensis
  source 1..306: note = Related to MTZU01000087.1
MLDDAIQAAYFRFKKFTIKKRSGEDRHLIQPAAELKLVIAWLDAVVLSKLPVSDLATAFQPGTSIVMNAEAHRKSAYSVRLDVSGFFPSIRSKDLIRAINDAKPRFEEWVFTPAFEQLVRKACFDRSDRLPVGYPSSPRIANAVMYELDMRLNQLIAAAPERFGQAVLTRYADDFVFSTDKQGACRTFADELQTILARCASPKLSINVAKTRYMSRKGGSTLITGLRVNMDGKVGVHANYRDHIRLLLKLFSVGKLDFEEHEKLRGHLAFIEHADPRLFTKLSFKYYKEIASLRMKKAVPEQESPQ

SEQ ID NO: 4626 - protein, 317 aa, Rubrivivax sp.
  source 1..317: note = Related to NZ_JAALCQ010000007.1
MTDFPALIGEKTNVPTEIIKSAVDLAHIRFRKIKVKKRSGGERIIIQPAAELKLVLAWLNNEVISKLPISPIATAFRKDASILKNASEHKASLYSIRVDIKEFFPSIRSSDLVLAIKSSPIELPPFTAEAGFFDFIQRCCFDRDGRLPIGYPTSPAIANAVMRNIDVALLNKINIDPTKFGQARLTRYADDFVFSSDKPGACRSFLDTLQETLIRTTSPRLAINSKKTRFMSRRGGSTLVTGLRINQDGLVRVHPKYRDHVRLLLKHFANGSISADDVPRLVGHLAFVQHADPRLFTRLSFRYFEEIARLRGKQENT

SEQ ID NO: 4627 - protein, 313 aa, Simplicispira sp.
  source 1..313: note = Related to NZ_QXJC01000004.1
MTNFPVLIADQMKVPVVLVEDALKLAFIRYRKIRVPKRSGGYRTIIQPAAELKLVQAWLNEKIFKHLPLSSVATAFRPGASITNNAAIHRNSLYSVRVDIKDFFPSIRSVDLIRIVRSNRSALPPFVMETGFTNLVRQACFDREGRLPIGYPTSPSIANAVMHQTDKMLINEITSDVSIFGNTQLTRYADDFVFSTDKSGACHEFVRKLERLLSTLESPRLKLNTSKTKFMSRRGGSTLVTGLRINQEGLVRVHANYRDHVRLLLKHFAAGSLQSDDVIRLVGHLAFVEHADPRLFTRLSFRYFEEIARLRGK

SEQ ID NO: 4628 - protein, 316 aa, Variovorax sp.
  source 1..316: note = Related to JABMJG010000023.1
MDSIVSKISGDLKIPIATLEIAIRLAKTRCRKFSILKKNGDTRQIIQPSVKVKPILSWLSLNVLNSLPVHDAATAFRRGKSILDNTSKHKEADYSVRLDLKDFFPSIKPEDLWRVMLDSRHLIPEWSIKEDAFWLISNVCFDQNNQLPIGYSTSPAIANAVMHRIDTTLANAVMDDSRFGAATVTRYADDFVFSTNKRGACKNFSDLLHDVIKTTNSPSLQINENKTRYMSRAGGSTIITGLRVNNLGAVVVHGNYRDHVRLLLKLFDSGRLALDQVPQLAGHLAYIEHVDPALFTKLSFKHYKRIEEIRSLRLVE

SEQ ID NO: 4629 - protein, 311 aa, unidentified
  source 1..311: note = Related to JAJTEM010000008.1; note = Burkholderiales bacterium
MLAKISDDLNIPRPLLENALALAATRFRKITFKRRSGPPRVAYQPAVELKPILEWLDITLISKLPVSRIATAFCAGSSIVQNAQVHRDSLFSIRVDISNFFPSITSSDLVTAIEATSHLPEWSNAPTTLRVLKQACFDINDRLPIGYSTSPRIANAVMFSLDNLLIQAISDERRFGNSLLTRYADDYLFSTNQRGACAEFLKEIRKILNSVQFPKLQINNEKTRFMSRAGGSTLITGLRIKQTGEIGVHAHYRDHVRLLIKLYAANRLRAEEFDSLRGHLAFVEYADPKLFTHLSFHFSDEITRIRSTDSL

SEQ ID NO: 4630 - protein, 312 aa, Achromobacter denitrificans
  source 1..312: note = Related to NZ_CP054569.1
MSNIIDLIADDLQLPKTLVKSAVDFARSNNRKIIFPKKTGGKRTALQPSVESKPIMHWLRLKLIELLPIHMIATGFRANHSILTNADRHRQSAYSVRIDIENFFESISFNDFKKTLESNKATLPSWALEEATLSLVEKICFDRDGRLPIGYPTSPGIANATMFEIDSALESLILDTTTFGQAIVSRYADDFTFSTDLRGSCRAFLEKLELLLASQTSPTLRINAKKTRFMSRGGGSTLVTGLRINNCGVVVVHPEYRDHIRLLLKLYSRNTLKQEDIPRLLGHLAHIQNVDPGFFTKLSYRYHEEISRIRKK

SEQ ID NO: 4631 - protein, 312 aa, Alcaligenes faecalis
  source 1..312: note = Related to NZ_LQAS01000005.1
MDDILELMAADLSLSKTTLKSTIFSTKRKYRKFSIEKASGGQRVIHQPSIELKPILYWIQINILDKLPVHKISTAFKKGSSILNNASLHQESLYSIRVDIDNFFNSIQPQDLISAIRENQANLPEWTKDGYVDELVTLSCFISRSYLPIGYLTSPQIANSVMFKIDSLLDEEFSNEGKYGVAKISRYADDFIFSTDKKGACKDALEKLKSIIEESKHPNLAINKKKTTYMSRPGGSARVTGLRINNQGKIIVHACYRDHVRLLLKLYKENRLNEEGGKEKLVGHLAHIQNVDPGLFTKLCLKYSSEIHELRK

SEQ ID NO: 4632 - protein, 312 aa, Burkholderia pseudomallei
  source 1..312: note = Related to CP009585.1
MSSLATLAAAECCVPESWVNDVVRQGPSRVKTLRIEKSTPGKFRIISRPSAELEILQRWLVLRFFEKMEVHDSAMAFRRGRSILTNAQAHAKSRFFVRVDFSNFFPSIRYADFSFALGKSKNLGYFFSEYADAGNFIQRICFDSNLRLPIGYISSPTISNAVMFEFDVRMEGMVAANGGDLGNAKVTRYADDIVFSTDKKGGCAKFVELLRELVKTWASPLLSINENKTIFSSSSGGSAIVTGLRVCSDSHITITREYKDKIRLMLSLHAKKCLRPEDLPKLKGHLNYIRYVAPAFFSTLCAKYTSVIDKLI

SEQ ID NO: 4633 - protein, 312 aa, Paraburkholderia aspalathi
  source 1..312: note = Related to CAJNBA010000001.1
MPSIVTLAAAECCVQESWVNDVVRQGPSRVKTLRIKKSTPGKFRVISRPSAELEILQRWLVLRFFEKMEIHESAMAFRRGRSILTNAEVHAQSRFFVRVDFSNFFPSIRYADFAFALGKSTELAYLFKEYSDIGNFIQRICFDSNLKLPIGYISSPVISNAVMFEFDARLENIVAANGEDLGSARVTRYADDIVFSTDKKGGCTKFVEILRSLVKSWASPSLSINEDKTNFSSSSGGSAIVTGLRICSDNHITVTREYKDEIRLMLSLLVKNSLRPEDLSKLKGHLNYVRHVAPAFFSTLCAKYTSVIAELI

SEQ ID NO: 4634 - protein, 312 aa, Paraburkholderia fungorum
  source 1..312: note = Related to NBSN01000004.1
MSSLVKLAATECCVQERWVNDVIRQGPSRVKTLKIKKPKSAKFRIISRPSAELEILQRWLTIRFFEKMEIHDSAMAFRTGRSILTNAQFHAKSLYFIRVDFLNFFPSIRYADLNFAIGKSKIIRNIFTDYADAGSFIERVCFDSNLRLPIGYISSPIISNAVMFEFDVQLQKLVTANTNELGDGRITRYADDIVFSTDKKGGCAKFLELIRSFVKTWASPSLSVNENKTTFSSRNGGSAIVTGLRVCNDSHVTITREYKDKVRLMLSLRGKQVLRPEDVRVLKGHLDYIRHIAPAFFSTLCAKYTGVISEFI

SEQ ID NO: 4635 - protein, 312 aa, Burkholderia gladioli
  source 1..312: note = Related to NZ_PVFX01000143.1
MPNFASLAATECHVPEDWVANVVRQGPRRAKILRIKKKNSDKFRSIARPSAELEMLQRWLLLKFFNQLELHDSAMAFRDGHSILTNAVRHKGSAYFIRIDFKDFFSSIKLQDFIMAMSQTKFFGFHLTEYSDYMEFIGKICFDSRGRLPIGYVTSPIISNAVMYRFDVALSNAISARTKEFGVSVLTRYADDIVFSTDLKGGCAAFLKFFQEFVSAWASPSLVINTEKTIFSSKAGGSAMVTGLRICNDNHITVTREYKDKIRLMLSLYQKSKLNEDELPALRGHLSYVKHVSPAFFSAICSKYLTAIEKLI

SEQ ID NO: 4636 - protein, 312 aa, Ralstonia pseudosolanacearum
  source 1..312: note = Related to NZ_CP046674.1
MPSLITLAATECFVPEIWVRDVIRLGPSRVKRLRIRKKSSASYRVIKRPSAELEILQRWLTLKFFENLEMHDAAMAFRRGRSILTNAQHHVDSKYFLRIDFTNFFPSIKYDDLKKSVDKSSKNKGTFDAYHDADLFIKRVCFDENERLPIGYISSPAISNAVMLEFDEKVHRLIESNEEKLGAGKFTRYADDVVFSTDKKGGCTEFLKIFSSLVDGTTSPKLSINEKKTIFSSKLGGSAIVTGLRVCRDSHITVNREYKDQIRLMLSLYEKGKLDKEEHKNLKGHLSYVRSVAPAFFSRLCAKYFKSIEEFM

SEQ ID NO: 4637 - protein, 323 aa, Pseudomonas sp.
  source 1..323: note = Related to JAHYXH010000009.1
MSNLVKLAAKDCYVSEEWIKSVIDSGPNNVKIIHIKKKGDPNKTRIIHRPSAELETLQRWLTLTIFNQLANHEIAMAFLRGKSILSNAERHRKSKYFIRVDFKDFFKSIKADDLFKTIKFYNKSNSLISLSESDQFFIKRVCFDKLGRLPIGYISSPAISNAVMYDFDTRLLSLVNDNKAKLGAGIITRYADDIVFSTDTKGGCLEFLNLFKIMVNKNLSPRIFINEKKTIFSSRAGGSAIVTGLRVCQDSHITITRDYKDKIRLMLSLFEKGKLMQEDTATLRGHLSYIEHVAPAFFSKICAKYLYGISKILDPTPSPQQNN

SEQ ID NO: 4638 - protein, 316 aa, Escherichia coli
  source 1..316: note = Related to JAKLOK010000001.1
MEIYSIIDFETLMRSGFTSEVMRSPEPPKKWDIPKKNGGVRTIYHPASKVKLIQYWLINSVLINLPIHEAAYAFIKNRSIKKNALRHASARNKYYVKIDLKDFFPSIHYDDFEYAFKKYRDHIDYPEKLDSELLPLIKGVCFISDLTLPIGFPTSPFIANFVAREFDEKLTKNLNSIDRLNATYTRYADDIIISTNKKGASKQIINSVKSTLRNIKPDFKINPKKIKICSASGGSIIVTGLKVCDDFHITLHKKTKDNVRLLLSLLSKGNLKKDDYNKLSGYILYTKSIDPHFYTKLNRRFFKEIKFLENYHNKKN

SEQ ID NO: 4639 - protein, 316 aa, Hafnia paralvei
  source 1..316: note = Related to SISW01000095.1
MEIYNIIDVETLMRKGFTGEVMRSPEPPKKWDIPKKNGGVRTIYHPSSKMKLIQYWLINRVLTNLPVHDAAYAFIKDRSIKHNALRHATTKNKYYVKIDLKDFFPSIKYNDFEHAFKTYRDRIDFPNNLDTEVLFLIKGACFIPDLSLPIGFPTSPIIANFVAREFDEKLTVKLNSIDRLNATYTRYADDIIISTGKKGCSKQIINAVKSTLKDIKPNFKINLKKVKICSASGGSIIVTGLKVCNDFHITLHKKTKDKVRLLLSLLAKDKLKIEDYNKLSGYIAYTKSIDPHFYTKLNRRYFKEIKMLENHHNKSE

SEQ ID NO: 4640 - protein, 316 aa, Serratia marcescens
  source 1..316: note = Related to CP026050.1
MEIYKLIDSETLMRKGFTSEVMRSPELPKKWHIPKRNGGVRTIYHPSSKVKLIQYWLISNIFSNLPIHNSAYAFVNGRSIKSNALLHATAKNKYYVKVDLKDFFPSIKYSNFEYAFKLYRDRIEFSDVYDAELLQLIKSICFISDESLPIGFPTSPIIANFVAREFDEKLTLKLNSIDRLNAVYTRYADDIIISTNLKGASVKILNAIKSTIKRIEPNFKINNDKIHICSASGGSIIATGLKICHDFHVTLHRSMKDKIRLYISLLSKGRLKQEDYNKLSGYIAYAKSIDPHFYTKLNRKYFQEIRGIENSHNKVI

SEQ ID NO: 4641 - protein, 316 aa, Escherichia coli
  source 1..316: note = Related to CP010200.1
MRIYSLIDSQTLMTKGFASEVMRSPEPPKKWDIAKKKGGMRTIYHPSSKVKLIQYWLMNNVFSKLPMHNAAYAFVKNRSIKSNALLHAESKNKYYVKIDLKDFFPSIKFTDFEYAFTRYRDRIEFTTEYDKELLQLIKTICFISDSTLPIGFPTSPLIANFVARELDEKLTQKLNAIDKLNATYTRYADDIIVSTNMKGASKLILDCFKRTMKEIGPDFKINIKKFKICSASGGSIVVTGLKVCHDFHITLHRSMKDKIRLHLSLLSKGILKDEDHNKLSGYIAYAKDIDPHFYTKLNRKYFQEIKWIQNLHNKVE

SEQ ID NO: 4642 - protein, 316 aa, unidentified
  source 1..316: note = Related to OCMY01000001.1; note = Enterobacteriaceae bacterium JKS000234
MSLYTLIDKEVMMRDGFTQSVIDSSEPPKKWSIPKKNGGYRSIHHPSSKNKLLQYWLLTKVFDKLPQHDASYAFVKNRSIKDNALRHAKEKNNYYVKLDIKDFFPSIEFSDFEKCFLRYRELISIPTTWDESLLFLIKETCFLKPQKNLPVGFPSSPAIANFVARELDELILGELASYEKYNPIYTRYADDLVISVAEKGLSKEIIKAVKKAIKNCTCNFSLNEQKIKICSASGGSIIATGLKICNDHHLTLHKKMKDSIRLKLSLYSKGKLNIDELNKLSGYIAFAKSIDEHFYTKLNRKFFKELSSLENVHLKE

SEQ ID NO: 4643 - protein, 315 aa, Pantoea agglomerans
  source 1..315: note = Related to CP034474.1
MILYKIIDTDIMMRDGFTESVIKSSEPPKKWTIPKKSGGVRSIHHPSTKNKLLQYWLLTKVFNNLPQHPASYAFIKGRSIKDNALRHAESKNNYYVKLDIEDFFPSITYDDFERCFVKYRDLITTPTKWDKDLLPLIQDVCFLKPQKILPIGFPTSPAIANFVARELDDIINAEMASFEKHNPVYTRYADDLIFSVADKGLSKKIITAVRKSLRKCSSNFKLNANKIKVCSASGGSVVVTGLKICNDHHLTLHKKMKDSIRLMLSLHSRGKLKEEDFNKLSGYIAFAKSIDEHFYTRLSRKHFKELRTLENRHLL

SEQ ID NO: 4644 - protein, 325 aa, Pectobacterium brasiliense
  source 1..325: note = Related to NZ_CP059959.1
MMLYDLIENDLKMKTGFVSDILSSPEEPRRWTIPKRNGGIRFIYHPSAKRKVLQYWLLQRVFCLIPLNDAAFAFIKNRSIKDNALRHSKSKNKYFVKADIKDFFPSINFDDFLYSFNRYRADINFPKEYDNDLLRMIREVCFIGPKKTLPIGFPTSPFIANFIARELDEIIHLELKNINDANPIYTRYADDLVISSCKKRMHSELISIIRKSINKCNASFSLNEKKLKICSSSGGSAIITGLRICHDGHLTVHKKMKDKIRLYLSHINKKGLEESEINILSGYLAYVKNADANFYTKISRKHFKEIKEIENHYTYADLKPHDEVS

SEQ ID NO: 4645 - protein, 313 aa, Halomonas sp.
  source 1..313: note = Related to NSKB01000007.1
MSIISEVSRELDMVEDSFREQIRLARGKIKHIKIKKKNGKGFRRIVIPPWEFKIVQYWTILNYLRNVKIHRSATAFHEGASIRTNALCHRKGNYFVKMDLSDFFPSVGVDDFKNALYKYHPEFIWLEKELSDSEFLESMFHKGVCAIGFPASPYIANICMIEIDELIESKLKNNVERFGRFSYTRYADDLTISIERKGFKREVEGVVYEAVREASLKNIKVNKEKTKYGSKSGGSAFVTGMRICKDGHITLHRKYKDHVRLLLSLYSKGKLKPEDKGKLLGHLNYCKSSDPEFYNKLVLKYFQSIEKLKNSNG

SEQ ID NO: 4646 - protein, 311 aa, Halomonas gudaonensis
  source 1..311: note = Related to NZ_FNES01000010.1
MGIIKSIAKELGMPEPVFREQLNTAAGKIKHIRIPKKSQKGYRKLVIPPWEFKIVQYWLIYNHLKGFPIHPSSTAYKPGASIRKNALKHAEGKYFVKMDLSDFFPSIGAEEFRNIIEEYYPKHNWLIKELEDSDFVSSIFYDKKCAIGYPASPYISNIIMFGVDQHIDRALQDKQQTFGNYSYTRYADDITISIENKGHKKEVVRLVHDSIKKSGIKNLKVNQNKTKYGSKKGGSAFITGMRICPDGHITLHRKYKDNVRLLLSLYNRGKLDVAERSKLAGHLNYCKDADPLFYNKLALKYFSSIKKLQES

SEQ ID NO: 4647 - protein, 310 aa, Halorhodospira halophila
  source 1..310: note = Related to JAJNRC010000001.1
MSEESVRNQIHEGRRQIKIKKIPKKDGNFRKITIPPRIFKLVQYWTIKNILHSLPVHEAATAFKPGSSIRENAFRHRDGQYFVKMDVTNFFPSIKSDDFFSVLSRMQHAEADPLLDSKDDEDFLDAMFRNRACEIGYPASPHIANIVMFEKDTRIDNALRDRKQEFGNSTYTRYADDITVSIDQKGYKDEITRLVSGVVEDDSEPTLKINPNKTRFGTRRGGGAFVTGLRVLPEGRLTLHKSYKDDVRFLLKLYEQDRLERWQISALQGHLNYCSFADPDFYTRLMIKHLDSIEEIKGEGLRSTDGTTEN

SEQ ID NO: 4648 - protein, 314 aa, Kushneria phosphatilytica
  source 1..314: note = Related to CP043420.1
MKLIRDFCHEMGLPEEEFTVYVDDARERVKKAKIKKKDKTTREIIIPSWELKIIQYWVILNYLRKLPASESATAYYKGASIIKNAQAHRKGSYFVKVDIESFFPSLTLDIFITSLKKDLESNPENEVIRYLLEATNDASFNQSIFYNGTCVIGYPASPYIANYILKAFDENVVAELNEISGKLGIFNFTRYADDIVVSCENKGNKTEVLKILHNCLEQKFDGALKLKATKTKSTTRSGGSTIITGVLICSDGRTTLPRKYKDKVRLLFSLYAKEILEKEEIPALTGHLNYIRSVDPVFYNKLYSKYYTQIKKLS

SEQ ID NO: 4649 - protein, 317 aa, Marinobacter sp.
  source 1..317: note = Related to NYUH01000011.1
MEKEMSIIDEIAKELRINKKIIESQLFASRKQVKKIRVPKKNGAHRSIYVAPKSYKIFQYYILNNYIKHVKKSHAASAFWKGSSILKNAKKHRERTYLVRIDISNFFPSIHINDFISVLDDSENNIIDLFSNPENAEVIMETCLSDEGYLRVGYPISPFIADIAMREIDQEIAKYLEEKFQEGTFSYSRYADDLVIGFDEKCGKEIEIAISEIIEKRDHPKLSINHSKTRYFNRNVGNAIVTGVRICQDGRLTLPKQFKDDLRFRLSLLNKGNLANEELSSLEGCLNHCRDIDPSFYTKLQTRYFKSIAELKNRNKN

SEQ ID NO: 4650 - protein, 313 aa, Gallaecimonas sp.
  source 1..313: note = Related to NZ_CP031416.1
MHIKKAIANDLSIPDGLIDEAISVARAHVKIFHIQKRSGGSREICHPSKKLKTLQYWLIHSVFSQMQVHDASMAYRDGVSILHNAEKHRSNRFFLKMDLENFFHSISFEDFIPILRSWHRKSNPKWILDAECEDMIRRICFYKNDRLAIGYPSSPIISNIVMNEFDSKVSTLISDRKYGKVIYTRYADDLVLSTDKKGACSEIIKEIINLIQGTSSPNISVNHSKTKLGSSTGGSASVTGLKICSGGHITIHRKQKDHIRLLLSLYRKGKLEQEEENSLLGHLSYCHYVAPDFYTKLSKKYFKEIYDLRSKDL

SEQ ID NO: 4651 - protein, 313 aa, Vibrio breoganii
  source 1..313: note = Related to MCXN01000048.1
MHIKRTIANELSIPDNLIDEAIRVARSHVKIFHIEKKSGGSREIFHPSKKLKTIQYWLIHSVFSQIPVHDASMAYRNDISILDNARKHRSNRFFLKMDLKDFFPSISFNDFIPILRDWHAKAKPNWVLDEEAEHLIKKVCFYKNDCLAIGYPSSPTISNIVMRDFDSKVSTLISAEKYGKVVYTRYADDLVFSTEKKGVCSEIKKELQTLIQATTSPNIKVNNLKTKLGSSTGGTASVTGLKICSDGHITIHRKQKDHIRLLLSLYRKGKLRPEDEKSLLGHLSYCHYVAPDFYTKISKKFFKEIHELRTNDL

SEQ ID NO: 4652 - protein, 313 aa, unidentified
  source 1..313: note = Related to NZ_JAAORA010000005.1; note = Candidatus Chlorobium masyuteum
MHIRDAIAIDLSVPVSIVDEALKESRIYVKKFTLPKKSGGSREIFHPSKKLKTVQYWLIFNILSKLPIHSSAVAYRDGISILNNAKKHCHNRFFLKLDLKEFFHSIVFSDLLPLIEDWYQNISVDWVFGPEEKDLIRKSCFYKEDRLAIGYPSSPVISNVVMYQFDLNVESLVSSGRFGDVCYTRYADDLIFSTDKKGGCKVLLREISDLIGRHKSPDITLNSAKTRLGSSTGGTASVTGLKVCNNGYITVHRKQKDHIRLLLSLYAKGELKPDEYRSLLGHLAYCHYVAPSFYSRLAQKYFKEIHELRASVF

SEQ ID NO: 4653 - protein, 313 aa, Endozoicomonas arenosclerae
  source 1..313: note = Related to NZ_LASA01000253.1
MNIKSIISNDLGIPEKLIEEALSSSRTYVKVFKIKKRNGGFREIHHPSKKLKTLQYWLIHNIFKNLSIHKSSVAYQDGVSILDNAKMHSSNRFFLKIDLENFFPSIKYTDLEPIVDKWHSENKISWELDQEAKELIRKSCFYKEDLLPIGYPSSPIISNAVMHDFDTAINQIILDNRFGETVYTRYADDLVFSTNKHGACSKLKDVIRTFIGGYNTPNIKINTSKTKMGSSTGGSASVTGLKVCENGHITIHRKQKDHIRLLLSLYAKGKLPESEKSSLAGHLAYVQHVAPSFYSSISNKYFKEIFELRATNV

SEQ ID NO: 4654 - protein, 313 aa, Halomonas subglaciescola
  source 1..313: note = Related to NZ_LT670847.1
MRIEEVISRDLKVPESLINEAISGARVRVKKFQIPKRSGGSREIFHPSKKLKVIQYWLMHSVFCNMPLSDAAMAYREGISILHNARVHSLNRYFLRMDFKDFFPSIRFEDVESHIKAWHRNFKPEWDLNDKSLEFINQSCFYKDARLAVGYPSSPAISNIVMRDFDSKILNEIGSEKYGDVVYTRYADDMVFSTNQKGACKEIIKAVKEIVSVCKSPVLEINESKTRLGSSTGGSASVTGLKICSDGRITINRKHKDHIRLMLSLFSKGKLDPKEVPSLAGHLAYCHYVAPDFHSGLSSKFFKEIHQIRTMDL

SEQ ID NO: 4655 - protein, 314 aa, Dickeya undicola
  source 1..314: note = Related to RJLR01000016.1
MNIKQLISESIDVPLSMVDNAIILARSHVKKFELKKKNDKFRIIHQPSKKLKVIQYWLIYNIFKEMPIHAAAVAYRNELSILDNAERHKRNKYFLKIDFKDFFPSLTFNDLLPFLESWKSSRTDLFINNELKEIIRKSCFYTNDKLVIGYPSSPIISNIIMFDLDENIQSIISDNKYGNVIYTRYADDIIISTDKAGACKEIYKEISTLIKSTITPSLSINVEKTKFSSSSGGSATVTGLRVCHDQHITIHKKQKDHIRLLLSLYAKGILNEKDEKSLIGHLAYCHHVDPAFYSKLSKKYFKEIATIRSSHMKN

SEQ ID NO: 4656 - protein, 322 aa, Lysobacter penaei
  source 1..322: note = Related to NZ_JACHTE010000007.1
MRDLVEVCSADLGISRQETLHLAKSAPYRMKRFELSKRGGGRRTIWRAAIETKGLQYSLIKNYLEHLPVHAASQAFSPGSSIKKNASIHVGNHYFLRVDLKDFFPSLTFENLRKATLSSNAKFDFSLEGSDSFALIQGACFDRDGKLPIGYSTSPFIANVVMFEFDESLEVTLQSEFGAGNFNYTRYADDMVFSTSTRGVCRKAYRKIKNFVADFDGASLSVNDRKTHFGSTGKGTAFVTGVHMLPNGKLAATRQLRERVKFLLYLLTKKRIPEKEYSQLIGLLAHLRSVDPAYHTKLSTDFYSVFPRLGKDRTATTSSERT

SEQ ID NO: 4657 - protein, 311 aa, Dyella sp.
  source 1..311: note = Related to NZ_LMUE01000002.1
MLDLLDICSSALGTTRENALVIARTAPYRLKRIEIPKQDGSKRITWQAAIETKGLHYPLIQYYLRQLPAHPASQAFSPGSSIIKNAGIHLGNKYFLRIDFSDFFPSIKFNSFKKIINQTKSIFENFNTATPESMLLLEKACFAKDSSLPIGYATSPYIANCTMFEFDREIIDLLRAKFASANVTYTRYADDLVFSTNIKNACRDIYDVIVQFVKKYRAIDLTINHKKTHFGSVPKGTAYVTGVHMLESNRTAATKTLRSEARFLLSLRKKNKLDDDEQKRLFGLLAHIRQIDPAFYTKLASDFHVAFPHTK

SEQ ID NO: 4658 - protein, 313 aa, unidentified
  source 1..313: note = Related to NZ_JAJOYU010000020.1; note = Proposed Pararheinheimera soli
MDLKSRICKDLQIPETLFDSSVSNARRAVYQFKIPKKNGDERTIYQAAAKTKTIQYWLLKNIFEKVKSHPSSMAFSQGCSILKNAECHRNNRFFLKIDLLNFFPSVTFEDVKGALIKNWEQIDSLPPDKDLFELIRTVCFFKGDILPIGYPTSPILSNIAMLNFDEMVMSTLESSFGGDVTYTRYADDMVFSTNVPGRTHEVFKLIRQLITTNTSPKISINPDKTTSGSSSGGSAIVTGIKICPNHLTITKKQKDEIRLLLSLYSKGRLRSSDYERTIGLISFARNVDPSFFTRVSERFFREIRAIKKELSDT

SEQ ID NO: 4659 - protein, 313 aa, unidentified
  source 1..313: note = Related to JAHLLK010000006.1; note = Deltaproteobacteria bacterium
MKFWEQIETSFGLGKPEINRIINDSRRCVKHIKIPKHNGGFRLVVQPTRKVKLIQYWLIDNVFSKMEVHSSAMSYRPNISIRRNAEVHKNMRYFLKLDFIDFFWSLNYSDFVVVFDSFLGRKKILWSDNKFDRNLMRCCCFYKDDALPIGYPSSPIISNIIMYNLDVAIKNKLEVLEEKIGGKIVYTRYADDLVFSTNIPGACEEIKNSIISLVSGCNSPKLKFNYNKLKMTSSSGGSAVVTGLRICHDGHITLRREYKDQVRFFLNLMAKDGLKKEDIFVLRGHLAYVQDVDPVFYTKLQEKYFKQIEGVEK

SEQ ID NO: 4660 - protein, 306 aa, unidentified
  source 1..306: note = Related to JAHJTB010000019.1; note = Proteobacteria bacterium
MSEELNIPVDSLSDTIEQSRSFVKRIKINKKSGGERIVYQPARKIKVIQYWLMRTIFSKITIHSASMAYRKEGSIKENALKHSNGGYFLKLDFKDFFPSIKFSDLNKSIIAFRKNNNAIFKYTKADQELIRRVCFYKNDKLPIGYPSSPIISNIVMYKFDIRVTDEMPKFRKYGNVVYTRYADDMIFSTDRKGGCEKIFSFLSVLINSWSTPSLLLNEAKTRFVSSSGGTAIVTGLRICYDGHITLHRHYKDIVRLLLSLYKKGNLKEEDVYVLKGHLSYIQNVDSVFYTKICKKYFDIIDEIKTK

SEQ ID NO: 4661 - protein, 317 aa, Thioalkalivibrio sp.
  source 1..317: note = Related to NZ_KB906230.1
MNIRERIAADLHVSHELIDRAVWESHSKVKKFRIKKRNGGTRPIFHPSKKTKLIQQWIIHNILNHLPVHDAAMAYRKGLSTVDNARKHRQNRYFLRIDLTNFFPSITYNDLEPLIREWHSHAETDWTLDPTSELLLKHTCFSQDETLRIGDPSSPSISNAVMASLDETISNTVRALSKNPIAYTRYADDLIFSTNERGLCKPIHEHTVAVIEESTSPLLSVNRRKTRFLSRSGGSAIVTGIKINPDGSLTLPKSYRNEIRFKLDLYRKGKLGDSDVRELRGHLAYCKHAAAGYYSRLCGKHYREIEEITTSLQDHSC

SEQ ID NO: 4662 - protein, 321 aa, Halobacteriovorax marinus
  source 1..321: note = Related to NC_016620.1
MIYREISKFYNIPQEEVQDFISSNKTKYFRFEIPKRNGKFRTITHPRHELKIVQYWLVEKVFSRMNYVSCSSYAYIKERDILKNARKHQRNSHFLSVDFSNFFESITFKLLEPFLEKFYHSTEVEYSLEELKNVVKRSCFDSYGRLPVGFVTSSIISNIVMFDFDLRINVLLMSRKMLGRVVYTRYADDVTISTNKEGAIREIYELFCKGLISEFNSEITLNASKTKVRHKRCGNVLVTGLRITKDSRITIHKNYKERVKKLIHDNYKSEDLSVVSRIIGHLNFIKYVDANYSHKLNIKYFSEINELKLRYQALFSAKSYI

SEQ ID NO: 4663 - protein, 323 aa, unidentified
  source 1..323: note = Related to JADHXY010000004.1; note = Phycisphaerae bacterium
MAKSLIDMVATYLGHTREQVLHLSYRAPMTYRRYTIPKKKGGRRLINHPAKQTKSLQYALMNIFLSQLPIHSCAAAYKKKTASEHIPSPLLKNAILHAPYSYSVRIDFTDFFHSISSLDLFNRISNNDINLSISDKEFIENCLFVRVPEGQKGLAIGAPSSPIISNIVMYSLDEQINAIANGISDRVAYSRYADDIIFSTNLRGGCNYFYRAMSELVTRTSSPKLVINRSKTMFSSRASRRVVTGLFIRPDGGTSLGRQNKRYIRKLLFDLKRDNIEPRKLTYLSGYLAFALDVEPDFYNRLAHKYGAELLAVAIGKTHHDVS

SEQ ID NO: 4664 - protein, 323 aa, unidentified
  source 1..323: note = Related to MSYB01000011.1; note = bacterium B17
MSRIINLKNDVAKYVGITLERVESLAAVAPKSYRRDEGSKRSGRGSRVIFHPSKKTKALQYGLIKILLDDLPVHASAYAYRKGLKAPLLKNSMLHQKYSFSIRIDFKDFFPSIVPEDLFKVIDESGLFPAALDSADKRFLENVLFIRHHGLMHLAIGAPSSPSISNAIMHSLDVLFSAFARDKDSVYSRYVDDIIFSTNRKGMCDEFLRFLSTTLSGTPSPILQVNATKTLVMSRGTRRCVTGMFITPEGGVSIGRTRKRKLRTLLYRYSKHLKGEDVLSKEDLNYLKGNLAFVLDVEPDYYNRLVQKYTATMVNSALHASVS

SEQ ID NO: 4665 - protein, 313 aa, unidentified
  source 1..313: note = Related to JACKDE010000001.1; note = Deferribacteres bacterium
MDLIEKIALYLGFSKEQIVKHSKRCSKTYRLYKIPKKGKLTGFRTIYHPAKETKAIQYALMEILLGDFKVSESAIAYKRGLSSPLRENALLHAPYKYSVRIDFENFFLSLQPRDLARMAKSKFDLNDKEIDFLIKSLFVDLGSGRSGLGVGAPSSPMVSNIIMYELDEEIQKIALKIDPKSVYSRYADDIIFSTDQKGACKQFYDQLASVIKSSKSPRLKINDLKTIFSSRGSRRMITGLIVTPNGDVSIGRRNKRYIKKLLFDFSKSKISDKNKSYLKGYLSYIEDVEPDFLNSLSLKYGAALLEKIRMDQF

SEQ ID NO: 4666 - protein, 305 aa, unidentified
  source 1..305: note = Related to PAAX01000026.1; note = Ignavibacteriae bacterium
MSLIENVSRYLSFNESELLSFAQKAPTTYRTYQIPKKNGRLRTIHHPAKETKSLQYALINLIFKNYPIHSSAVAYRKGVKSPLKLNAESHSKYLYTIKMDFKDFFHSIVFEDLKNILDSPYTQQELEFLKNVLFLNYQGIYCLAIGAPSSPILSNIVMHGYDESILKIVTKIDPDATYTRYADDITFSSNKKSHCLNFAKELNKLTKDKLTPSLKLNSKKTILLSKANHRMVTGLVITPQGNVSVGRHNKKYIKKLLNDLKYDKISPIAFKYLKGYFAFVRDVEPKFVNSLTNKYGAALINKIII

SEQ ID NO: 4667 - protein, 304 aa, Pontibacter actiniarum
  source 1..304: note = Related to NZ_CP021235.1
MKIIEKISNIYGLSFNETKNLINTAQNNYRIYKIPKKTTGTRTIYHPSKQVKAVQYILIDLILKKLQVHNAAVGYIKGVKAPIKRNAEQHAKFPYSIRIDFKNFFSSISFSDLKKVLENSSLELSLDDYKVLELVLFKNGLPIGAPSSPLISNIVMFELDELLAREALKVDSNSLYTRYADDIVFSTSKKNGCKDFLKKLKSVLINYNHPKLTINSSKTKFMSRKSKRMVTGLIITPQGKVSIGRENKEFIKMLLYQYNKKLLNPEQVSYLTGYLSFIIDVEPAFFNTLVIKYGAVVSNLLKKI

SEQ ID NO: 4668 - protein, 313 aa, Maridesulfovibrio ferrireducens
  source 1..313: note = Related to NZ_FNGA01000002.1
MPDKLNLVGKLSFFLGASEEDIKTSANSMSRKYKQYKIPKKNGGSRTILHPCRPLKALQYAIHEVLLNKLEVHPIAHAYVPNQKSPLKQSAKAHTNYKYTIRIDFENFFPSIRPEDLELQINKNFILSKTDKYLLRTVLFYQKNRGSRPILPIGAPTSPTISNIVMFNLDELLLKTSKEHDRDSALTRYADDIYFSTNIKGCCKLFYDEIFQLLKRIDSPRLKINTNKTLFLSKGTKRVVNGLFVTPNGKVSIGRKRKTQIKSLIYKHSQTALMGKELLQTRGLLAFIQDCEPEFYNTLALKYGVHFYSIKES

SEQ ID NO: 4669 - protein, 309 aa, unidentified
  source 1..309: note = Related to JAFGSW010000031.1; note = Spirochaetales bacterium
MSRIIDIISKYTGLDPHKILKITYDSPTNYKLYYIKKKNGDSRAIFHPSKETKMLQYALMEKFLKKIPVHEFAMAYKKGIKSPLKKNALYHLNTQYTLHIDFTNFFPSIIPEDFWRAVSVAFPGKEFETSDIELINNILFIKVKGKCFLSIGAPTSPIISNIVMKEMDAQFLKLCKTLDEYSVYTRYADDINISTNIKGFSQKIYYSIKQHLSETESPKLTINEKKTYFLSKKGNRLITGLCITNMNSVVIPRNKKRIIRSLIHTELTSNKKDKTRLSKIKGYLAFIKDIEPDFFNKLVIKFGDGINDL

SEQ ID NO: 4670 - protein, 316 aa, Aliifodinibius halophilus
  source 1..316: note = Related to NZ_JAALLS010000018.1
MSILKGLLSKYTSLSIDNISNIIKKAPASYKTYRIEKANGGYREINHPAKETKTLQYALMEIIFKKNDVHPIAMAYKRGVESPTFENARLHKDYEYSLRLDFKNFFPSIKPDDIISIVKDSSKYEFDDTDYSDLKRICFRKNHIKGYQYGLAVGAPTSPIISNIVMYDFDEAMEKISKELDKSSTVTRYADDIVFSTNEKGICAKFYSSVRDHLNDQDLSLEFNEEKTAFMSRGTKKVITGLVISNKGNVSIGYDKKEKVKRKVYKYSKGDLEDSDILSLKGYLAYIQDVDPDFFDKLNIKYGADILDDIMSFENE

SEQ ID NO: 4671 - protein, 313 aa, Lysobacter enzymogenes
  source 1..313: note = Related to NZ_RCTY01000045.1
MHKLFDAMYHGKYRFDEFLALSPEENYSPVHWKARTIYKPSRTLRDFHTFLSGFVLEQLPINTSVSFAYRKGTTLAQAVAPHAKSRAFFQTDLERFFDSITTPLIRRILIENQTPVLDLQAHLDHILKLLTIDDKLPIGYSTSPLVSNACMHSFDQRLAQISHDRGWIYTRYADDIMLSTQDRADLSDASTVITGCLATELGYGFNLNPGKSKLTTIGRKVKLLGLVILPSGDIAIDRDVRNRIESWIYFYLRDRARLSKIFEETYKDGLEEGLERLSGLISYAHAADPGYLEKLRSKFGTTVIDSLLHRSAQ

SEQ ID NO: 4672 - protein, 318 aa, Stenotrophomonas nitritireducens
  source 1..318: note = Related to LDJG01000003.1
MTPQPLHKLFDAMYHGKYRFDEFLALSPRENYSPVSWKSRTIYKPSRMLRDFHTFLNGFVLEHLPVNTSVSFAYRKGATLIQAVEPHAKSRAFFQADLERFFDSITTPLIRRVLLESETPVADLHDHLDHILGLLTIDGKLPIGYSTSPIVSNACLLSFDHRLAQVSQDRGWIYTRYADDIMLSTEDRANLSNAGAVIETCLASELGDEFKLNPAKSKLTTVGRKVKLLGLVILPTGDIAIDRDVRNRIEAWIHFYLRDRARLLKIFEETYSQGMEEGLERLSGMISYTHAADPAYLEKLRRKFGTTVIDSLLHRSAQ

SEQ ID NO: 4673 - protein, 318 aa, Xanthomonas translucens
  source 1..318: note = Related to NZ_LNSU01000266.1
MTPQPLHKLFDAMFHGKYRFEEFLALTPEENCSQVRWKSRTIYKPSSTLKDFHVFLSRVALDHLLVDTSVSFAYRKGATLIQAVAPHAKSRAFFQTDLERFFDSITTPLIRRVLVENETPVTDLLDHLDHILRLLTIDGKLPIGYSTSPIVSNACLLSFDQRLAKISDDRGWIYTRYADDIMLSTQDRADLSDAGAVVEDCLASELGDGFNLNQAKSKLTTIGRKVKLLGLVILPSGDIAIDRDVRNRIESWIHFYLRDRAKLLKIFEETPNQGMEEGLERLSGLVSYAHAADPAYLDKLRSKFGTTVIDSLLHRSAQ

SEQ ID NO: 4674 - protein, 318 aa, Xanthomonas campestris
  source 1..318: note = Related to AM920689.1
MTPQPLHKLFDAMFHGKYGFEDFLAISAEENHSLVRWKSRTIYKPSSTLKDFHVFLSRVVLDHLPVDASVSFAYRRGASLIQAVEPHAKSRAFFQADLERFFDSITTPLIRKVLVESQTPVTDLHDHLEHILKLLTVEGKLPIGFSTSPILSNACLLSFDQRLAQISHDRGWIYTRYADDIMLSTLDRSKLSDAGTVIEDCLSAEIGDEFKLNPAKSKLTTIGRKVKHLGLVILPSGDVAIDRDVRNRIESWIHFYLRDRAKLLRIFEETPNQGMEEGLERLSGLVSYAHTADPTYLDKLRSKFGTTVIDSLLHRSAK

SEQ ID NO: 4675 - protein, 318 aa, Xanthomonas campestris
  source 1..318: note = Related to LOKH01000144.1
MTPQPLQKLFDAMFHGKYRFDEFLTLSPEDNYVPVRWKTRTIYKASRTLKDFHTFLSSFVLEHLPSDTSVSFAYRKGAALMQAVEPHAKSRAFFQADLERFFDSITAPLIRKVLTENQTPAADLQEHLEHVLNLLTIDGKLPIGYSTSPLLSNACLLPFDRRLAQVSLERGWIYTRYADDIMLSTQHRTDLSEAKTVIEECLATELGAGFNLNPAKSKLTTIGRKVKLLGLVILPTGHITIDRAVRSRIESGIHFYLSDRARLGRIFERENDEGMEEGLERLSGLISYANAADPAYLEKLRRKFGTTVIDSFLHRSAQ

SEQ ID NO: 4676 - protein, 318 aa, Pseudoxanthomonas sp.
  source 1..318: note = Related to FPCI01000001.1
MTPQPLRKLFDAMYHGKYRFEEFLALSPEENYSPVHWKNRTIYKPSRALKDFHLFLNGFVLEHLPVNTSVSFAYRKGTTLLQAVEPHAKSRAFFQTDLERFFDSITTPLVQKALAENETPVADLSDHLDHILKLLTIDGQLPIGYSTSPILSNACLLSFDQRLAQISAERGWVYTRYADDIMLSTQDRAELLDARTVIEDCLTTELGDGFNLNPAKSKLTTTGRKIKLLGLVILPTGKIAIDRDVRNRIESWIYFYLRDRSRLSRIFEETYDEGMEEGLERLGGLVSYAYASDHAYLEKLRRKFGTTVIDSFLRRSAQ

SEQ ID NO: 4677 - protein, 318 aa, Xanthomonas translucens
  source 1..318: note = Related to CP076254.1
MTPRPLQQLFDAMYHGKYRFEEFLALKPQEHYSLIRWKTRTIYKPSKTLKDFHFFLNGFVLEHLPVDTSVSFAYRKGSTLMQAVEPHSRSRAFFQTDLERFFDSITTPLIQGVLQRNQSPVADLADHLHHVLGLLTIDGKLPIGYSTSPLLSNACLLGFDQRLAAISQTREWIYTRYADDIIVSANDRATIADASAVIEECLASELGDGFNLNKGKSKLTTIGRKIKLLGLVILPTGAIVIDRDVRNRIESWIHFYIRDRSRLAKIFEEERGEGMEEGLGRLSGLISYAYAADPGYFEKLRSKFGTTVIDSLLHRSAQ

SEQ ID NO: 4678 - protein, 306 aa, Achromobacter sp.
  source 1..306: note = Related to NZ_FNYM01000002.1
MYHDKYRFEEFLTLYAGDHYSQVLWKNRTIYKPSAKLKDFHHFIGGFLLEHLPVDQSVSFAYRKGATLLQAVQPHSRSRAFYQTDLERFFDSITNNLIRSVLEQAATPVSDLSDHLDHILSLLTIDGRLPIGYSTSPILSNACLYGFDKRLAAISHERGWIYTRYADDIIVSAADRLAIEDAPQVIEDCLGTELGDGFKLNSSKSKLTTIGRKIKLLGLVILPTGAIVIDREVRHRIEAWLHFYVSDRPRLAKIFQEERKEGLEEGLQRLSGLIGYAHAADPLYLEKLRAKFGNTVIDSFLRRSAQ

SEQ ID NO: 4679 - protein, 306 aa, Alcaligenes aquatilis
  source 1..306: note = Related to NZ_CP032153.1
MYHEKYRFEQFLELKPEEHYSSVLWKNRTIYKPSSILREFHYFLNGFLLEHLPVDTVVSFAYRKGATLLQAVEPHANSRAFYQTDLERFFDSITSDLIRSVLSRYETPVSDLSDYIDHIIGLLTINGSLPIGYSTSPILSNACLLGFDKRLAAISDERKWVYTRYADDIIISADDRLSIKDADQVIKECLKLEFGDGFSLNESKSKLTTIGRKIKILGFNILPTGAISIERGVRNRIESFLYFYVKDRPKLARIFEEEQGDSMEDGLLRLSGLISYVYAADPAYLKKLRVKFGNTVIDGFLHRSIK

SEQ ID NO: 4680 - protein, 318 aa, Stenotrophomonas sp.
  source 1..318: note = Related to NZ_PKQQ01000003.1
MTPQPLEQLFDSMFHGKYRFIEFMELKPEQHRVRVSWKGRTIYKPTGVLKAFHRFLNHYVLDHLQVDETVSFAYRRGTTLLQAVEPHAHSRAFFQTDLERFFDSITTDHIRTALETSDIPVEDLGQHLGHILELLTIDGKLPIGYSTSPILSNACLLGFDSRLKSQSRDRGWVYTRYADDIILSAADRESLADAVAVVEDCLSSELGDGFALNPTKSKLTTIGRKVKLLGRVIVPTGVIVIDREVRNRIESYLHFYITDQSKLARIFREDREEEWEDGLQSLSGLISYVHVADVAYLDKLRAKFGATVIDSFLHRSAK

SEQ ID NO: 4681 - protein, 318 aa, Stenotrophomonas bentonitica
  source 1..318: note = Related to NZ_PKQP01000016.1
MTPRPLHQLFDAMFHGKYQFDEFLALKPEEHRTRVSWKGRTIHKPSGILKNFHRFLHSFVLEHLLVDEKVSFAYRKGTTLLQAVEPHAQSRAFFQTDLERFFDSITSDLVRNVLKQAEVAVGDLDDHLEHILALLTIDGKLPIGYSTSPILSNACLSGFDARLSSISIDRDWIYTRYADDIIISADDRTALIDAAAVIEECLASELGEGFTLNLAKSKLTTVGRKVKVLGRVILPTGTIVIDREVRNRIESWLHFYTSDRPRLAKIFREERNEEWEEGLERLSGLVSYVHVADPSYLEKLRAKFGTTVIDSVLHRSAK

SEQ ID NO: 4682 - protein, 318 aa, Massilia lurida
  source 1..318: note = Related to NZ_VLLB01000004.1
MNPQPLHQLFDAMYHDKYRFDEFLALKPEEHYSPIPWKSRTIYKPSPTLKDFHKFITGFLLDYLPVNDSVSFAYRKGASLLQAVTPHAYSRAFFQTDLERFFESITSSLIRRVLDQASTPVADLAEHVEHIVRLLTIEGALPIGYSTSPILSNACLLGFDARLAATSCARNWIYTRYADDIIISAGSRAAINDVGQVVEECLRAELGDSFRLNQDKTKLTTIGRKVKLLGFVVLPTGGIVVDRNVRDRVETLLYFYVTDRSRLAKIFAEENDEVMEAGLERLSGLISYVHSVDEAYLEKMRIKFGSTVIDSFLHKTAR

SEQ ID NO: 4683 - protein, 318 aa, Acidithiobacillus thiooxidans
  source 1..318: note = Related to SZUV01000002.1
MTPRPLRQLFDAMYHGKYRFEEFLELRPQEHYNIVRWNSRTIYKPSKKLKAFHYFLNGFLLEYLPVNQSVSFAYRKGATLQQAVAPHARSRAFYQTDLQRFFDSITSDLIRSTLEGASTPASDLPEHIDHILDLLTINGKLPIGYSTSPILSNACLLRFDERLAAISKDRQWIYTRYADDIIISADDRKTIGDAKELIESCLAAELGGNFALNPSKSKLTTIGRKVKLLGLVILPNGAVAIDRDIRNRIETLLHFYISDRSRLAKIFEEERSEGMEEGLQRLSGLVSYTYAADPLYLEKLRAKFGATVIDSLLHRSAE

SEQ ID NO: 4684 - protein, 318 aa, Orrella marina
  source 1..318: note = Related to NZ_CP028901.1
MTPRPLHQLFDAMYHGKYRFEEFSELNPREHYTSVQWNNRTIYKPSKKLKDFHSFLNGFLLEFLPVNQSVSFAYRKGATLLQAVMPHSRSRAFYRTDLERFFDSITSGLVRSALERAVTPISDLAEHIDHLLDLLTINGKLPIGYSTSPILSNACLLGFDERLASISRERQWIYTRYADDIIISADDRSAIEAASDVIKSCLSTELGDEFALNSSKSKFTTIGRKVKLLGLVILPNGTIAIDRDVRNRVESWLHFYVSDRSRLAKIFEEERSEGMEEGLQRLSGLISYVYATDPRYLEKLRAKFGTTVIDSFLHRSAQ

SEQ ID NO: 4685 - protein, 318 aa, Pseudomonas aeruginosa
  source 1..318: note = Related to CP053705.1
MNPRPLHQLFDAMYHGKYRFEEFLALNPEEHYTPVPWNRRTIYKPSPTLKEFHRFLSDFLLDYLPVDQSVSFAYRKGATLLQAVTPHAHSRAFFQTDLERFFDSITLNLIRPVLNRAAHPVSDLPKHIEHILRLLTINGKLPIGYSTSPILSNACLFGFDKRLTVISNERHWIYTRYADDIIISAGDRLAIEDASSVIENCLSAELGKGFVLNQSKSKLTTIGRKVKLLGLVILPTGAITIDRDVRNKMESWLYFYVTDRSRLAKIFQEERNESMEVGLQRLSGFISYAYTADPAYLEKLRTKFGNTIIDSFLHRSAQ

SEQ ID NO: 4686 - protein, 318 aa, Methyloversatilis discipulorum
  source 1..318: note = Related to JADMJL010000080.1
MTPRPLHQLFDAMYHEKYRFEEFLALKPQEHYSPVSWNRRTIYKPSPKLKEFHHFLSGFLLEFLPVDRSVSFAYRKGATLLQAVAPHAQSRAFFQTDLERFFDSITSDLIRSVLDQAETPVSDLGDHVEHILDLLTIDGTLPIGYSTSPVLSNACLFGFDKKLAAICHSRQWIYTRYADDIIISADDRLSIEDADQVIENCLVAELGGGFKLNQKKSKLTTVGRKVKLLGLVILPTGVIVIDREIRNRIETWLYFYIKDRSRLSKIFQEDRGEGIEEGLQRLSGLISYASAADPIYLDKLRAKFGNTVIDSFLHRSAQ

SEQ ID NO: 4687 - protein, 318 aa, unidentified
  source 1..318: note = Related to PNKA01001725.1; note = Cyanobacteria bacterium PR.023
MTPRPLRQLFDAMYHEKYRFEEFLALKPAEHYSPVHWNRRTIYKPSSKLKEFHRFLNGFLLDYLQVNESVSFAYRKRTSLLQAVAPHAHSRAFFQTDLERFFDSITSNLIRSVLERADTPIADLADYIDHILDLLTIDGKLPIGYSTSPILSNACLLGFDKQLAALSAERQWIYTRYADDVIISANDRASIEDASQVIENCLAIELGDGFKLNQKKSRLTSIGRKVKLLGLVILPTGAIVLDRDVKNRIETWLHFYVTDRARLAKIFQEEKNEGIDEGLQRLSGLISYAFSADPAYLEKLRAKCGSTVIDSFLHRSAK

SEQ ID NO: 4688 - protein, 318 aa, Halomonas sp.
  source 1..318: note = Related to CP086344.1
MTPRPLHQFFDAMYHGKYQFEDFLELEPKEHYTPVPLSGRTIYKPSKVLKEFHTFLNGFVLVHLPVNTTVSFAYRKGVSLLEAVTPHADSRAFYQTDIQHFFESINVKLIKSALIKADTPVTDLNDFFDHILDLITVDGSLPIGYSTSPILSNACLHGFDERLAYISYKNEWIYTRYADDIIISGADRKSVQNAQSEIKNCLLEELGEGFKLNLNKSKLTTVGRKVKILGLVILPNGDISIDRSVRDKIEARLFFYINDRKKLAKIFVEEKNDGMEDGLQRLSGLIGYVHTIDPLYLEKLRMKFGTTVIDSFLHRSAQ

SEQ ID NO: 4689 - protein, 341 aa, Lysobacter sp.
  source 1..341: note = Related to NZ_JAKPBV010000013.1
MPDLKASCRVGHFVCAPISTMTDPSVSVKARSLEYLFEMMHHGRHSFDDFLRLPVDKHFQRVDWRTRTIYKPSKTLRAFHSFLNVFVLGYLPVNERVCFAYRKGATLTDAVAVHAESRAFFQTDLAKFFDSITSQMVHDALARASTPAEDLPQFIDRIVELTTIDERLAIGFSTSPLLSNSCLIAFDNMLEDVCRDRQLIYSRYADDIVVSGQSPDKLDGIERLIAQLLDKALGPTFQINTAKSRMLRVGRKVKILGLNILPSGRITVDREIRDKVETQLHFYLTDRARLMRIIDAEPDEALQKLSGYIGHIHSADPLYLEKLRRKFGATVIDSFLHRSAQ

SEQ ID NO: 4690 - protein, 328 aa, Burkholderia cepacia
  source 1..328: note = Related to LPEM01000032.1
MTKKPLQILFDAMYHNKQNFEDFANGDIASHFSRKPVTDDSGKTRVVSVPDKVLRKYHSFLNLFVFNQLPVNEEVVFSYRKGTNVAAAVQKHAASKHFYQADFSNFFESITSDIVRHSILRGEDKIPVADIHQYLDRIVDLVTFEGRLPQGFSTSPVISNTALLPFDKDLATYCQNKHLVYTRYSDDITISSNDKEPLFELDHVIAEILSSCGYSEMKLNENKTKISSKGRKIKILGMVILPNGQVSLDAKIKNRIETLLHLYVNNQQGLSDITESDLEDGLAKLSGLLNYANTVDQGYLDKLRRKYGVTVVDILIHQPKKTDAKKAD

SEQ ID NO: 4691 - protein, 328 aa, Burkholderia gladioli
  source 1..328: note = Related to NZ_UWYX01000002.1
MTKKSLQTLFNAMYHNKQNFEDFATGEIKQHFSKMPVTDASDKARLVFIPDKVLRKYHSFLNLFVFNRLPVYNDAVFSYRKGTNAAAAVRKHSASKHFYQADFSNFFGSITSDIVRRSILHGAEQLPVADLHQYLDRIIDMVTVEGRLPLGFSTSPVISNTALLPFDEDLAIYCRRRQLVYTRYSDDITISSNERESLLELDDAISDILSSRGYSEIKLNEKKTKISSKGRKVKILGMVILPNGQVSLDAKIKNRIETLLHLYVNNQPGLSDVTKSDLGDSFEKLSGLLNYANTVDQTYLDKLRRKYGVTVVDILIHQNKKTDSKKAS

SEQ ID NO: 4692 - protein, 328 aa, Paraburkholderia heleia
  source 1..328: note = Related to NZ_BBJH01000023.1
MTKKPLRVLFDAMYHNKQNFDDFATGEIDRHFTKKTIKDDAGKERLVFITDRTLRKYHSFLNLFIFNRLPVNEGVVFSYRKGTNAAAAVRMHAGSKHFYQADFSNFFGSITSDIVRQIIINGEDVLPIADTNQYLDRIVDLVTVDGRLPMGYSTSPVISNAALLLFDKELARYCQSKQLVYTRYSDDIIISSDEKEPLMDMSQVIADTLSDCDYYDLRLNEEKTKISSKGRKVKILGMVILPNGQVSLDAKMKNRIETLLHLYVNNQDRLSDATKIDFEDSVVQLSGLLNYANTIDQDYLDKLRRKYGVTVVDILIHQPKKTDSKKAE

SEQ ID NO: 4693 - protein, 328 aa, Paraburkholderia sp.
  source 1..328: note = Related to VZQP01000011.1
MTKKPLHVLFDAMYHNKQNFEDFAAGQISHRLSSKTVTNESGKTRLICIPDKVLRKYHSFLNLFVFNRLPINEEVVFSYRKGTNVAAAVRKHSAGKHFYQADISNFFGSITSDIVRRSILRGEEQLPVADMHRYLDRIVDLVTVEGRLPQGFSTSPVISNTAMFPFDKELVTYCLKRQLVYTRYSDDITISSQEKEPLLDLDRVIADILCDCAYPEMKLNENKTKISSKGRKVKILGMVILPNGQVSLDSKIKNRIETLLYLYVNNQPGLSDITKSDLGDSFEKLSGLLNYANTVDGNYLDKLRRKYGVTVVDVLIHQPKKTGAKKAN

SEQ ID NO: 4694 - protein, 327 aa, Caballeronia sp.
  source 1..327: note = Related to NZ_JAAVUQ010000005.1
MTKKPLQILFDAMYHNKQDFADFATGDIIRRVSSKTVTNDSTKERLVFVPDKVLKKYHSFLNLFVFNYLPINEDVVFSYRKGTNVTAAVRKHRNSKHFYQTDISNFFDSITVDIVRRCILRGEEQTPVSDMGEFIDRIVELVTMEGKLPLGFATSPAISNTALLPFDDSLAAYCSHKNLVYTRYSDDITISSSEKEPLFALDDALRDILSAHGFPNMQFNEHKTKISSTGRKIKILGMVILPNGQVTLDSKIKNRIETLLHLYVNNQSALFDLTKSDLDGSYETLSGFLNYANTVDQSYLDKLRRKYGVTVIDTLIHQPKKSESRKG

SEQ ID NO: 4695 - protein, 328 aa, Paraburkholderia ribeironis
  source 1..328: note = Related to NZ_CYGX02000017.1
MTKKPLQFLFDAMYHNKQSFADFATGDIGRHLSARQITDDAGKKRDVFVPDKVLRKYHSFLNLFVFNYLSVNTAVVFSYRKGTNAADAVRSHASSRHFYQADISSFFPSITADIVRRSILRDEAQTPVEDLGDYLDRIIDLVTIDGTLPIGFSTSPVISNTALLPFDDAFAAHCLRNGLIYTRYSDDITVSSQEKAPLLALDAVIQDLLCRCNLPEMRLNERKTKISSTGRKIKILGMVVLPNGVVTLDAKVKNRIETLLHLYVRNQLALQEVMKADLVESAETLSGLLNYANTVDQGYLDKLRRKYGVTVVDTLVHQPKRTDSKKDK

SEQ ID NO: 4696 - protein, 328 aa, Burkholderia sp.
  source 1..328: note = Related to NZ_CP045094.1
MNKKPLETLFNAMYHGKQSFQDFATCDVAQRVTRKTISDNSAKERIVYAADKVLAKYHSFLNLFIFNHLPIREDIVFSYRKGTNAADAVKKHVNSRHFYQADIANFFPSISADSIKKAILRGIHQVPVSDVAEYLDRIIDLVTVESALPLGFATSPSISNAALLLFDDALSNVCLEKGLVYTRYSDDITISAQEKESLLGMDATITRLLAECDYPQMHLNDRKTKLTSIGRKIKILGMVILPNGQLTVDSKIRNRVETMLHFYVRNNDALVDLTNTDLDESVDVLGGLVNYINTIDQRYLDKLRRRYGVTVIDTLIHRQKNTDSKRNK

SEQ ID NO: 4697 - protein, 313 aa, Janthinobacterium sp.
  source 1..313: note = Related to JAHYBY010000004.1
MEQLRNLFDEMFGGELSFDDFLHGDISNRVIKKIDGTRVVYSADQTLRSYHRFLQRHVISYLYLNSDVVYSYRKSFNVADAVRQHAQSKYFFQTDLSNFFNSITSKLIHSTLFKSSERMKFLNSTEYFDRIVILLTANDRLPPGFITSPSISNACLSELDDVFQKFCIHKNLIFTRYCDDVIVSGQSQDDLRIAAQELSNLVEICYKGEFSFNVRKSKFTKIGRKIKLLGMVILPNGLVTIDSSLKKKIEVLLHYYITDSFTFLRMVDNDLGKGTRSLCGYISFVNAVDPTYFLKLCSKYSSAAIENLLRMPK

SEQ ID NO: 4698 - protein, 322 aa, Trinickia diaoshuihuensis
  source 1..322: note = Related to NZ_QUBS01000013.1
MTKKPLAELFRAMYHGKYDYRDFIGEALSSRYKPLNVGGAQVSKERLVYAPDKTLKIYHSFLNLFLFEYLDVNEEVVFSYRKGVNVVGAVRKHAHNKHFFQADLQDFFLNINSTMVRAVIENVAARTPISDVLDHVDRIIELVTIDGTLPIGFPASPLISNAVLRSFDDRFEDYCALRGMVYTRYSDDLIVSSQNRDELTNLAAVIEEMLQSVGLAQFKLNPEKTKITSVGRKIKLLGLVILPNGVVSVDIKLKQQIETMLHFYITDNAKFRDFSEKDLTKATEQLSGYVNYVNTVDPAYLDKLRKKYGVTVIDTLMHQGSK

SEQ ID NO: 4699 - protein, 322 aa, Caballeronia sp.
  source 1..322: note = Related to JAJUBG010000007.1
MTKKPLAELFRAMYHGKYEYRDFICEALDARYKPINVGRTQTSKERLVYAPDKTMKIYHSFLKLFLFEYLDVNERVVFSYRKGVNVVEAVKKHAHNKHFFQADIQDFFPSIDSMMVRLVIESAATRTPIADLMDHVDRIIELVTIDGALPIGFPSSPLISNAVLHRFDDSFEEYCVNRGMVYTRYSDDIIVSSQNRDGLNNLATAIENTLKSVDLGHLTLNPEKTKITSIGRKIKLLGLVILPNGTVSVDIKLKQQIETMLHFYITDRAKLRDFLETDLSKATEQLSGYVNYVNTVDPGYLDKLKKKYGVTVIDTLIHQGSR

SEQ ID NO: 4700 - protein, 317 aa, Pseudomonas sp.
  source 1..317: note = Related to JAEKFF010000008.1
MVNRDFKSAFEAMYHGKYDFEDFKSGDISEKFRKLDLNKKNVYEADQTLKIYHKFLNLFVFQWLEFNENCVYSYRKGMNVADAVKKHAHSKHFYQTDLNNFFGSIRSDFVKGSIIASIDRMPITDVLLYVDRIIEICTVSNKLPVGFSTSPLISNACLLHFDNEVERYCEESGLIYTRYSDDIIISGGDKKLYGTGEIIAEVLYRQFEGHLSINSSKTKYSSAGNKLKILGMMILPNGTITIDSKLKADIEVLLHFFTKDKQKFLDKIEADSATALAKVSGYLNYINTTDKVYLNKLRKKYGASVVDMFVRGSVKSL

SEQ ID NO: 4701 - protein, 317 aa, Pseudomonas viridiflava
  source 1..317: note = Related to NZ_UUGY01000017.1
MANRDFKSAFEAMYHGKYDFEDFKVGDIADKYRKLNLNKKNVYEADQVLKTYHKFLNLFVFQWLSFNEDCVFSYRKGINVADAVKKHSQSKHFYQADLNNFFGSIRSDIVRSCIGASIDKVPISDISLYVDRIVEMCTVADRLAVGFSTSPLISNACLFRFDNEIEHHCHANGLIYTRYSDDIIISGVENKLYGMGDVVESILFQHFNGVLSINLPKTKYSSAGNKVKMLGMMILPNGTVTIDSKLKADIEVLLYFFIKDKQKFLDKIDTDSATALTKLSGYLNYINTTDKIYLDKLRKKYGSSVIDMFVRGSVKSL

SEQ ID NO: 4702 - protein, 306 aa, Pseudomonas shirazensis
  source 1..306: note = Related to NZ_JABWRD020000002.1
MYHGKHDFEDFKSGEILSKYRALVFKKKKVYEAGADLKVYHKFLSLFVFQWLEFNERCVYSYRKGMNVVDAVKKHANSKHFFQTDLNDFFGSIQGDLVKLCIRGSLDRIPISDASSYIDRVVDLVTVENKLPVGFSTSPLISNACLLPFDNALEAYCNHSGLVYTRYSDDVIISGGDSKLYGIEKVVEYTLAQCYGGDFTINSAKTKFSSAGNKVKILGMMILPNGTITIDTKLKSDIEVMLHFFIKDKQRFMDKVDAEGTAAALAKVSGYLNYINTTDPAYLNKLRKKYGASVVDMFIRGSVKSL

SEQ ID NO: 4703 - protein, 318 aa, Pseudomonas aeruginosa
  source 1..318: note = Related to CP047592.1
MASRDFKSAFEAMYHGKHDFEDFKSGDVSSKYRTFVFNKKDVYEAGAELKVYHKFLSLFIFQWLEFNERCVYSYRKGMNVVDAVKKHAGSKHFFQTDLNNFFGSISGKLVRECILRSLDRVPISDAGLYIDRIVELVTVEDKLPMGFSTSPSISNACLLPFDNAVEKYCEEQGLVYTRYSDDVIISGGDNKLYGTEKIIESILEELFQREITLNASKTKFSSVGNKLKVLGMMILPNGSITIDTKLKSDIEVMLYFFIKDKHRFIDKVDAEGTAAALAKVSGYLNYINTTDQVYLNKLRKKYGASVVDMFIRGSVKSL

SEQ ID NO: 4704 - protein, 303 aa, Pseudomonas lutea
  source 1..303: note = Related to NZ_JACYNP010000006.1
MYHGKFDFKHFISWPAAELFKPIQIKDRVVYDADKNLKAYHKFLNLFVFEFLEINTDVVFSYRKGVNVIDAVKKHATSRHFFQTDLKNFFGSISSGMIRRCLEENIANFPVSDIGEHLDRILDLVSVENILPPGFSTSPLISNACLYHFDNKLELLCDSRGLIYTRYSDDILISGSEKKLYGLDVEISAMLETSFGGRFQINRGKSRYNSVGGKVKMLGVVILPNGEITIDTKLKSKIEVLLHFFTSDRAKFNSMLEAEDVNGLLKVSGYLNYINTTDPLYLNKLRSKYGATVIDMFMRGSVK

SEQ ID NO: 4705 - protein, 315 aa, Pseudomonas fluorescens
  source 1..315: note = Related to NZ_CABVHI010000016.1
MAKQKLESVFEAMYHGKFDFKDFISGPTSELYKTIKFKNRTVYNADKKLKAYHKFLNLFLFEFLELNTRVVYSYRKGVNVIDAVKKHATSRHFFQTDLKNFFGSIDLDMIRAAIQENTENFPVSDVNENIERILELVSVSGVLPPGFATSPLISNACLYHFDNLVENFCLNSGLIYTRYSDDIIISGSTNKLYGLDTHIESMLKKTFGEKVLINGSKSKYMSIGGKIKILGVVILPGGGITIDTKLKSKIEVLLHYFTSDRQKFNVMLDDKDVNGLLKVSGYLNYINTTDPAYLNKLRTKYGATVVDMFMRGSVK

SEQ ID NO: 4706 - protein, 315 aa, Pseudomonas jessenii
  source 1..315: note = Related to FNTC01000002.1
MAKQTLESLFEAMYHGKYDFNDFIEAPLSMLCKKIPLKNRIFYKADEKLRAYHKFINLFISDFLKINTNVVYSYRKGINVVDAVRQHAHSRHFCQVDLKNFFGSIDAALIESCILQNIVNLPASDIATHIGRIVSLVSLDGTLPPGFSTSPPLSNACLFEFDNQVENYCHKKNLIYTRYSDDIIISGSSERLYGLDSIIEEFIKEYFNEKLEINPAKTKYTTVGGKIKLLGLVILPNGEITIDTKLKSKVEVMLHYYLTDRPQFNKILEKDSTKGISTLSGYLNYINTTDPSYLDKLRLKYGATIVDMFIRGSVK

SEQ ID NO: 4707 - protein, 323 aa, Pseudomonas sp.
  source 1..323: note = Related to NZ_CP052862.1
MAKKELSSIFDAMYHGKHDFQDFLAGDITTRYKVTTLKGMELYKTDEKLKAYHKFLNLFVFEFLKVNENVVYSYRKGVNVASAVQKHAGSRHFFQTDLKSFFNSIDSALVRETVKNNFDSIPVSDIDRYLDRIIEMSTVNDMLPIGFSTSPIISNACLQKFDSILEDYCIAQNLIYTRYSDDIILSSSGDTRLYGIDTTVGEMLKECFGEKLNLNFSKTKFSSVGNKIKILGMVILPNGAVTIDSKLKNTIEVLLHFYASDKTKFNDRLESESSKLKGDNSVGLLQISGYLNYVNTTDPHYLNKLRKKYGTSVVDAFIRGTVK

SEQ ID NO: 4708 - protein, 323 aa, Pseudomonas asplenii
  source 1..323: note = Related to NZ_LT629777.1
MVKKELGSIFEAMYHGKHNFQDFLTGNIEPHYKITTLKGMKIYRPDEKLKAYHKFLNLFVFDFLKINKDVVYSYRKGVNVVSAVKKHANNKHFFQTDLKNFFNSIDKELVRNTIHSNLEHIPISNLDKHLDRILELSTVEDKLPIGFSTSPIISNACLQKFDSVLEDYCASEDLIYTRYSDDIILSSGGNTRLYGIEAKVSEILRECFGGKLNLNPSKTKFSSVGNKIKILGMVILPNGTVTIDSKLKNTIEVLLHFYASDKEKFKDRLASESSKLKGENSIGLLQISGYLNYVNTTDPNYLNKLRKKYGSVVVDAFIRGTVK

SEQ ID NO: 4709 - protein, 322 aa, Pseudomonas sp.
  source 1..322: note = Related to NZ_LT607553.1
MAKKSLSLLFDAMYHGKHDFLDFIEGDVADKYKVAIVKGMEVCKPDDKLKVYHKFLILFVFEFLRVNQDVVFSYRKGVNVASAVQKHAGSRHFFQTDLRSFFRSISRSLVKQTLLNNLDSIPVADLQENLERILDLVTVNGGVPIGFSTSPIISNACLYDFDNQLELYCKAHDLVYTRYSDDIIISGVENKLYGVDGVVGEVLGKCFGEMLSVNVSKTKFSSVGNKIKILGMVILPNGVITIDSKLKNTIEVLLHFYSSDKVKFNDRLETESAKLKGDNSLGLLQISGYLNYVNTTDPAYLNKLRKKYGAAVVDSFIRGSVK

SEQ ID NO: 4710 - protein, 316 aa, Luteimonas sp.
  source 1..316: note = Related to NZ_CP089507.1
MNKQPLRDLFDAMYHGKHQFADFMSCDVTARATAFQLNERTMYSPDKRLRAYHSFLTLFLFDYFPVESEVAFGYRKGSSAYDAVSPHARSRHFFQADITSFFGSLDSGVVANVIDEHKERSPIEDVEKYTARVRSLVLLNGSLPMGFSTSPVLSNACLYKFDRALRERCQTAGLHFTRYADDLIISSGDLELTRSAKAIVEEVLLHEFDGKLQLNAEKTKLTSIGRKVKILGMVILPNGRITVDQRTKDRIEVLIHFYRVDQERFLALVKNDRAGGLEHLAGLVSYVNTVDQEYLGKLRRKFGVTIVDSLLHKTIL

SEQ ID NO: 4711 - protein, 318 aa, Pseudomonas cichorii
  source 1..318: note = Related to NZ_QPDS01000008.1
MNRRPLEQLFFATFRGKQELNELLELDVRAAYSEKDFDGRVVYSPDKKLKLYLGFLSRVLFDRLPVEADVVFSYRKGVNVVNAVEKHSEGKYFFQSDIKNFFGSIDREMIRRSVLAALELCPISDIEHWLDRVLDLVTVDGVLPPGFPTSPVISNACLYEFDKKFLSWCKQNSLTYTRYADDLIVSGGVEEKMHLLIPCITQLLDTEFGGRIKLNTQKTKFIRPGEKVRMLGVAILPNGKVSVDGRLKKHSETAMHCLLKDKQIFTSFLKEKDFEKALKKFSGQLNYINTVDPSFLDKLRRKYGATAVDKIVHISVGS

SEQ ID NO: 4712 - protein, 318 aa, Pseudomonas anatoliensis
  source 1..318: note = Related to NZ_JACVHC010000006.1
MNKRPLEQLFFAMFRDKQRFADFLEIDVNSAYTKKDYDGRVVYSPDKLLKQYLGFLSRVLFDRLPVESDVVFSYRKGVNVVNAVEKHSANRYFLQSDIENFFGSISRSTIRKSILSALDTCPISDIEQWLERILDMVTVNDVLPPGYPTSPSISNACLYSFDKRFLDWCKKNNFIYSRYADDLIISGGGEDEMHLIAPKIIELLNCEFEGQIKLNTGKTKFLRPGEKIRILGVAILPNGKVSVDGRLKKHSETAMYCLLNDKDKFISFLKESDFDKALKKFSGQLNYINTVDPSFLDKLRRKYGATAVDRVIHVSVGS

SEQ ID NO: 4713 - protein, 318 aa, Pseudomonas sp.
  source 1..318: note = Related to NZ_CP023969.1
MNRRPLEQLFFATFRGKQDFADFSNLVVNEAYSKKEFDGRTVYSPGKALKLYLGFLSRVLFDRLPIEKDVVFSYRKGVNVVDAVEKHSGNKYFFQSDIANFFGSITNKMIARSVLAAVDQCPISDIEAWLDRVLELVTVDGVLPPGYPTSPAISNACLYKFDRVFLAWCHDNSLTYTRYADDLIVSGESEDLMHQACKKVIEFLYAEFGGDLKLNPKKTRFIKPGDKVRILGVSILPNGKVSVDGKLKKDSETAMHFLIKDKKMFTSFLKEPDLERALKKFSGQLNYINTVDPSFLDKMRKKYGAAAVDKMIHVSVAS

SEQ ID NO: 4714 - protein, 318 aa, Pseudomonas sp.
  source 1..318: note = Related to RHQR01000004.1
MNKRPLDQLFFATFRGSLDFSEFASLNVSQAYSRIEFEGRAVFSPGKTLKNYLSFLSRVLFDRLPVEKDVVYSYRKGVNVVNAVEKHANNKFFFQSDIENFFGNITKEIIKKTILSAIDQCPITDIETWIERILDLVTVEGALPPGYPTSPAISNACLLSFDKRLLAWCNEHSLTYTRYADDIIVSGTNDIWMNSLSYKVTELLNEEFNNFIKLNPQKTKIIRPGEKIKILGIAILPNGKVSVDGKLKKRTETAMHLLLKDKKMFQSFFKEADLDKALKKFSGQLNYINTVDPSFLDKLRKKYGTATVDKIIHISVAS

SEQ ID NO: 4715 - protein, 318 aa, Pseudomonas sp.
  source 1..318: note = Related to JAEKED010000001.1
MNRRPLEQLFYATFRGKQEFADFSKVNVNTAYSKKDFDGRSIYIPDKTLKLYLGFLSRVLFDRLPVAKEVVFSYRKGVNVVDAVEKHSENKYFFQSDIENFFGSINRELISNTILAAVELCPIADIEDWLDRIMELVTVDGVLPPGYPTSPAISNACLYAFDKKFIGWCDSNSLTYTRYADDIIVSGKSEEQMHLLIPKITELLDAEFGKGMKLNSNKTKFIRPGEKVRILGVAILPNGKVSVDGRLKKHSETAMHLLLKDKKMFASFLKEEDVEKSLKKFSGQLNYINTVDPSFLDKLRKKYGAAAVDKIIHISVAS

SEQ ID NO: 4716 - protein, 318 aa, Pseudomonas syringae
  source 1..318: note = Related to LIHT01000076.1
MIKRPLEQLFFATFRGKQDFQDFIKLDLAASSIKKNFEGRSVYAPEPKLKLYLGFLSRVLFDRLPLAEQVVYSYRKGVNVVNAVEKHSSSKYFFQTDIESFFGSINREMIRRSILWSLDFCPISDIDIWIDRILDIVTVDGLLPPGFPTSPAISNCCLVKFDEEFLSWCDSQGFIYTRYADDLIVSSKVDPGVDLLISKITEILNKMFDGDFKLNLNKTRVVRPGSKVKLLGVVILPNGKVSIDGNLKKNAETAMYHLLKNKEKFVSFLKEQELDRALQKFSGQLNYINTVDPDFLDKLRRKYGATAVDKIIHVSVAV

SEQ ID NO: 4717 - protein, 317 aa, Pseudomonas sp.
  source 1..317: note = Related to PGRY01000001.1
MIKRPLEQLFFATFRGKQDFAHFSSLDLSEMYEAKKFDGRTVYSPNRTLKSYLTFLSRILFGRLPVAEDIVYSYRKGVNVVNAVEKHAHNKYFVQTDIKNFFQSINRQQIKQTIEDSEHTCPISDLNESLERILDIVTIDGVLPPGYPTSPAISNACLYKFDQELASVCKEEKIIYSRYADDLIFSANAISVTESIIPKATKILDEVFMGHLKINESKTKVTLPGQKIRILGVSILPNGKVTIDGKLKKNIETCIYYFLRDKSVFIKLMKEADNEKSTKKISGQLNYINTVDPSFLDKLRKKYGIATIDQLLHYSAE

SEQ ID NO: 4718 - protein, 324 aa, Pseudomonas psychrotolerans
  source 1..324: note = Related to NZ_LDSV01000038.1
MIKRPLDVLFSAMYRGKLSFDNMKAASADQMFESFTVSGREVVRPNPELKSYLGFLGRVLFNKLPVDVESVFSYRKGVNLLNAVEKHAASKFFLQVDIADFFGSIDSSLIEQTVLRSMDACPISDVEEHLEMIVKLVTVNSSLPAGYPTSPAISNACLYEFDRKFKDICGNRNLIYTRYSDDLIVSGTTSESINGVYGLLQNKLADEFGGKLQVNQSKTKFTRPGQKVKLLGINILPHGAVSVDKKFKKDAEVKLFYYLKDRSIFIKMSGSTNLDKAVKNLSGTINYINTVDSVFLDKLRKKYGSTLVDMFLHRSAKLVDENKI

SEQ ID NO: 4719 - protein, 318 aa, Pseudomonas aeruginosa
  source 1..318: note = Related to CP017149.1
MKKRPLEDLFFAMYRGKQSFEHFANCSVEGLYEPVMVNGRLVYKTDKDLRAYHRFLNKFLFERLPVVDDVVFSYRKGVNAVDAVEKHAGSKFYFQTDLRDFFSSLTKSDVRRTLEWAKDVCVISDLDVWVERILKLVTIGDSLPMGFSTSPAISNACLYSLDGILKTHCLSNGVIYTRYADDLIFSSSNKQALDPLFGVVCRTLQSEFSGRMGINSQKTKYLRKGGKIKLLGLNVLPNGRVTVDMRHKKEIEVRLFYYVKDRARFLKIMGEVDDEKAIKKFSGLINYVNTVDPAYLDKLRKKYGLTIVDMFIHKSPKL

SEQ ID NO: 4720 - protein, 317 aa, Duganella sp.
  source 1..317: note = Related to JAHTGR010000011.1
MNAKPLKILFEAMYHGKYDFQDFLQGDICSDFDMFTVGERTIYRPNKKLKTYHSFINLFVLEKFPVNAEVVFSYRKGVNVYDAVSKHAFSKHFFQTDISKFFPSIGVDLVRDTFLQNKNCTPVSDFDTCIERIVELVMVDGFLPVGFSTSPLISNVCLFGFDNLVQKYCSENGIIYTRYSDDLIFSSLEKSKLIGIFEFLQRTMLDLFGGLISLNISKTKFTHAGSKIKLLGMVILPNGKVSVDKKFKDNIEVLLHFYVKNRTKFFNLVESDLKGGMEKISGYLSYVNTVDKDYLNKLRKKYGMTVVDMFLHYTPKK

SEQ ID NO: 4721 - protein, 317 aa, Pseudomonas sp.
  source 1..317: note = Related to LIRD01000002.1
MNKRPLKELLAAMHQGKFEFPELDTGDVSDLYEKKIYNDREIYIPNKRLKTFHSFLSLFLLEYLHTNNEVVFSYRKGVNAVDAVSKHTSSKYFFQTDITNFFNSIDADLVTSTILNSIETCPISDIQSHITNIVKILTINNSVPVGFSTSPLLSNACLFNFDNELQKYCIENKLILSRYSDDIIISSLEKAPILEAEIYVERLLSKHTNNKLSINTKKSKHTQTGNKIKLLGMVILPNGKVSVDIKFKKDTEVKLHFYLTNKEKFNEISGPDLDSAIEKMSGQLNYYNTIDPSYLDKLRKKYGATIVDMFLHKSDKL

SEQ ID NO: 4722 - protein, 317 aa, Pseudomonas sp.
  source 1..317: note = Related to NZ_MUNM01000090.1
MKKRSLKDLLDAMYQGKFEFPELDTGDISTLYETKNYNDRELHIPNKKLKTFHSFLNLFLLEYLQTNKEIVFSYRKGVNAVDAVSKHAHSKYFFQTDITNFFNSIDADLVTSTIINSADRCPISDIDNHITNIVKTLTVNGSVPVGFSTSPPLSNACLFNFDNKLQKYCLDNSLTFSRYSDDIIISSLDKTPLLEAEKYVAQCLSKHTDNKLSINTTKSKHTQTGNKIKLLGMVILPNGKVSIDIKFKKDTEVKLHYYLTNKEKFTAITGPDFDNAIEKISGQLNYFNTVDQDYLDKLRKKYGATIVDMFLHKSDKL

SEQ ID NO: 4723 - protein, 317 aa, Pseudomonas sp.
  source 1..317: note = Related to AKJS01000163.1
MKKRPLKELLSAMYQGKFDFPELDTGDISALYETKNYNGRKIHIPNKKLKIFHSFLNLFLLEYLQTNNDIVFSYRKGVNAVDAVSKHAHSKYFFQTDINNFFNSIDIEMVTSTIFNNIGLFPISDIERYIPNIVKILTVNDSVPVGFSTSPLISNACLLSFDNKLQKYCLANSLIYSRYSDDIIISSSEKASLLEAEQRVTTYLAENTNNKLSINLTKSKHTQTGNKIKLLGMVILPNGKVSVDIRFKKEAEVKFHYYLTNKDKFTEVTGSDFDSAIEKFSGQLNYINTVDPSYLDKLRKKYGATIVDMFLHKSDKL

SEQ ID NO: 4724 - protein, 317 aa, Pseudomonas sp.
  source 1..317: note = Related to NZ_FYEA01000001.1
MNKRPLIDLLTAMHQGKFNFPELGTGNINDLYETKIYNNREIHIPNKKLKTFHSFLKLFLLEHLSTNEEVVFSYRKGVNAVDAVSKHSNSKYFFQTDINDFFNSIDEELVKTTIIRDIEKCPISDINLHIDNIIKTLTIKNSVPVGFSTSPLLSNSCLFIFDNSLKEYCDKNSLTLSRYSDDIIVSGKKKEPILEAERYIAQLLSDTTKNKLSLNIKKSKHTQTGNKIKLLGMVILPNGKVTIDIKFKKDTEVKLHYYLTNKEKFIEIVDSDIETAIEKLSGHLNYYNTVDPSYLDKLRKKYGATTVDMFLHKSDRL

SEQ ID NO: 4725 - protein, 317 aa, Pseudomonas gozinkensis
  source 1..317: note = Related to NZ_CP062253.1
MNKRPLKELLVAMHQGKFEFPELDTGDITSLYETKKYNDREVHVPNKKLRTFHSFIKLILLDHLDTNEDVVFSYRKGVNAVDAVSKHSRSKYFFQTDIKNFFNSIDEDMVKETILKNIEQCPISDIQDHIEKIVKTLTVNNSVPVGFSTSPTLSNACLFTFDNTLQEYCKSNSLVFSRYSDDIIISSMEKNSIFEAEKYISQKLSEITKNKLSINDAKSKHTQTGNKIKLLGMVILPNGKVSIDIKFKQDTEIKLHYYLTNKETFKKIVGSDFDGAIEKISGHLNYYNTVDPSYLDKLRKKYGTTTVDMFLHKSDKL

SEQ ID NO: 4726 - protein, 317 aa, Pseudomonas monsensis
  source 1..317: note = Related to NZ_CP077087.1
MNKRPLKDLLNAMYQGKFEFPELETGEISSLYETKKINDREIHIPNKRLKTFHSFLRFFLLEHLKTNNDVVFSYRKGVNTVDAVSKHAHSKYFFQTDIRNFFNSIDTELVISTIENNLTNTPIEDIQLYIEKITKTLTVNNFVPVGFSTSPPLSNACLFDFDNKLQKYCLEQKLIYSRYSDDIIISSREKQAILDIDEYISQTLQTTTKGKLTINTSKNKHTQTGNKIKLLGMVILPNGKVSIDRKFKKDTEVKLHYYLSDKKKFYELTGPDTNNAITKISGQLNYYNTIDPSYLDKLRKKYGATIVDMFLHKSDKL

SEQ ID NO: 4727 - protein, 318 aa, Atopomonas hussainii
  source 1..318: note = Related to NZ_MPIO01000005.1
MKTKPCALLFEAMYHGKYDFQDFIQSDISNYFDVIYVKDRKIQKPNRKLKAYHSFLNLFLFEYLRTNERVVFSYRKGVNAYDAVSAHANNKHFYQTDISDFFSSIDSQLIKETIIASAELSPIEDLNEHLERVLSLVTVDGRLPMGFSTSPLISNACLYKFDAALEEYSISRHLTYTRYADDLIISSKNREDLEGIQEKISELLLKTFNGRLSLNHSKSKLTHTGRKVKILGMVILPTGKVSVDIKFKNKVEVLLHFYMKDREKFLDKVDGDMRGGMEKISGYLNYINTVDKSYLDKLRKKFGGTIVDMFLHLPTKKP

SEQ ID NO: 4728 - protein, 317 aa, Pseudomonas azerbaijanoccidens
  source 1..317: note = Related to NZ_JAHSTU010000002.1
MIKKPLKTLFDAMYHGKYEFVDFAQCDVSLCYERVKFKKREVIRPNKRLKVYHSFLILFLLEYLKVDDEVVYSYRKGVNTYDAVSKHAASSYFFQTDLSNFFKSIDVEMVRAVINEGISRAPILDGEDYIDRIIELVTVDGSLPVGFPSSPVISNSCLYAFDEKLKSYCRQRGLIYTRYSDDIIVSGKDKDELLGVKESITAFLNDCFQGKLSINHGKSKFTHTGNKIKLLGMVILPNQKVTVDIKFKKDLEVMLHFYINDREKFLDKVGGGYREGVEKITGYMNYVNTVDKDYLNKLRKKYGATVVDTLIHHPTKK

SEQ ID NO: 4729 - protein, 317 aa, Pseudomonas sp.
  source 1..317: note = Related to SCFF01000003.1
MTKKPLKDLFDAMYHGKLDFTDFAECDVSLCYERTRIKNREVVRPNKKLKTYHSFLNLFLFEYLKIDEEVVFSYRKGVNAYDAVAKHSGSSCFFQTDLTDFFKSIDARLVKDVIGDSLHLAPILDADNYIDRIVELVVVDGALPVGFPSSPLISNSCLYGFDKKLKSYCDKRNLIYTRYSDDIIISGGSRDALLGIKESVAGLLDECFQGKLSVNCDKSKFTHSGNKIKLLGMVILPNQKVTVDIKFKKELEVMLHFYINDRERFVDKVGGDFRVGVEKITGYMNYVNTIDKDYLNKLRKKYGSTVVDTLIHHPSKK

SEQ ID NO: 4730 - protein, 318 aa, Pseudomonas veronii
  source 1..318: note = Related to NZ_CP039631.3
MTRKPLKILFDAMYHGKFEFEDFAEGNVSRNYERIKLKNREIFRPNKKLKTYHSFLNLFLFEYLEIASDVVFSYRKGVNAYDAVSKHSANSYFFQTDISGFFTSIDSTLVKKTIAESMHLSPILDIEEYLERIVDLVTVNGILPIGFPSSXPLISNACLYGFDKELSSYCKSKDLIFTRYSDDIIISSLSRDSLSNIKDDVAGILHDCFEGKLSINESKSKFTHTGNKVKLLGMVILPNKKVTVDIKFKKELEVMLHFYATDREKFLDKVGGSYSEGIEKITGYMNYVNTVDKDYLDKLRKKYGATVVDILIHHPARK

SEQ ID NO: 4731 - protein, 329 aa, Aquabacterium sp.
  source 1..329: note = Related to JADMKF010000239.1
MSTTQTHSLPRRQPVEVLFNAMYHGKWRFADFAGASVEANISSKTFTQAGKTRNLLVPSEKLKSFHDFLRLFLLDFLPLNNNVVFSYRKGLSAYDAVAQHAASKSFFVCDIADFFPSIRRPRVKSTLLTAKDLCPIQDLDTWLDRIVDLVCVGNSLPVGFSTSPAISNAVLMAFDNALQTYCTSKELVLTRYSDDIIVSAQDSASLKGIQEQVAASLQDAMKGEFSLHPGKSRFLHSGSKIKLLGMVLLPNGAVSVDASVKSEIEVLIHFYLRDRDKFADRVEGDQRKAEARLSGLLNYVNTIDKAYLDKLRKKFGVTVVDYFLHRSFS

SEQ ID NO: 4732 - protein, 330 aa, Delftia tsuruhatensis
  source 1..330: note = Related to NZ_FOKN01000013.1
MSTQPTPQFSIKKQRIDVLFEAMFHGKWSFGDFVSASVQTNTISKSFTHGGRTRNLLVPSEKLKSFHEFLRLFLLDFLPFNEDVVFSYRKGMSAYDAVIKHAASKSFFVCDIANFFPSIKRDRIRTALLRAKECCPIEDLESVIERILDLVCTDSGLPQGFSTSPVISNSVLLDFDNAFHAYALGEGLEFTRYSDDIIISSRNSEAIQGIEAIVSHCLHDTMGGDFSLHYGKSRLLHSGVKIKLLGMVLLPNGKVSVDANVKDEIEVLIHFYLHDRSKFADKVDGDTRKAEARLSGLINYVNTIDQSYLDKLRRKFGVTVVDYFLHRSFS

SEQ ID NO: 4733 - protein, 330 aa, Rhodoferax sp.
  source 1..330: note = Related to NZ_SZVI01000009.1
MSTPISPLPASPKQPIEALFNAMYHGKKSFSDFANLSIDENFTRKSINRSGKTRELLKPSDKLKGCHEFLRLFLLDFLPLNDEIVFSYRKGSNAYDAVARHAKSKSFFVCDIEHFFPSLKRTRVKSTIATARDSCPIEDIDTWLERIVDLVCVDDALPMGFSTSPNISNAALLPFDNALQSYCESRNLILTRYSDDLIISGENFASLDGIEAQVATHLQETMNGELNLHPKKSKFLHGGVKIKLLGMVLLPNGTISVDAGVKEEIEILIHFYLRDKSKFADRVEGGLQKAEARLSGLLNYVNTVDQAYLDKLRKKFGTTVVDFFLHRSFS

SEQ ID NO: 4734 - protein, 328 aa, Ideonella sp.
  source 1..328: note = Related to NZ_BADL01000521.1
MSIAASPTTAKRPMADLFRAVYHDKRDFRDLIEMDVLLNCKREQYTKAGQVRAILVPNDVLAGCLEFVRLFVVDYLPINEDVVYSYRRGMSAFDAVARHRDGKHFLVCDISHFFPSLNRGRVRLTIDQGNDRTPIADFGHWLDRFVDLVCPESSLPVGFSTSPGISNAALKPFDDAMSIVCESRGLTLTRYSDDIIVSGQSKDALDGIEQIVAGTLQQVLPGEFTLNRAKTKRMHRGTKVKLLGMVLLPDGGVSVDAAVKDEIEVLLHFHSRNRSRFLERVGNDLAKGERRLSGLINYVNTIDKAYLDKLRRKFGAASVDYFLHRSFS

SEQ ID NO: 4735 - protein, 327 aa, Comamonas sp.
  source 1..327: note = Related to JACUZW010000001.1
MSTPLKTVAKRPLEDLFNAVYHDKYRFQDLAQLDVLLNCKREQYTKAGHTRAILAPNEILAACLDFTRLFVVDFLPINEDVVYSYRKGMSALDAVVCHKDSKYFFVCDISHFFPSITWERVGLTLAQAKDRTPISDFDLWLDRFVHLVCPETGLPVGFSTSPGISNSALKPFDDAMKRNCDDRSLRITRYSDDIIVSAKTKEPLHEIEKLIEGTLQETFSNDFTLNQSKSKHLHRGTKVKLLGMVLLPDGSVSVDASIKDEIEVLLHFHATNRSRFVEYVGHSLTKGERRLSGLINYVNTIDKAYLDKLRRKFGVATVDYFLHRSFS

SEQ ID NO: 4736 - protein, 329 aa, Ramlibacter monticola
  source 1..329: note = Related to JAEQNE010000002.1
MGAKTALLPSGPRSLEELFTAMYRGKRKVSEFASLNVAASCTRKSFTHKGRTRGIVIPSDKLRGCHEFIRLFLLDFLPVEIDLVFSYRKGVGAFDAVKQHASSRHFFVTDIADFFPSIKRDRVLSIIQTGRGISPISDLDAWMERIVELVCLDGELPVGFSTSPAISNAALRPFDQAMRKECGALGLVYTRYSDDLVISGGDAGVVERAQAFCECHLREAMHGEFQLRPEKSKFLHVGRKIKLLGMVLLPNGRISIDGATKSEIEVLLHFYLRDRAKFAAMGEGDERKVEARLAGLLNYANTVDQSYLDKLRHKFGAAPIDLFIHRSFG

SEQ ID NO: 4737 - protein, 308 aa, Cupriavidus necator
  source 1..308: note = Related to CP039287.1
MYHSKRSFDDFARGPVAQKYVRHRFCKQGKTREVLSPDDKLRAYHEFLRLFLLDFLPQNEEVVFSYRKGVSAYDAVSRHAQSKFFFVCDIADFFPSLKRHRIRQTILSGKDSSPVADLDQWLERILDLVSVDDCLPMGFSTSPTISNAALLPFDNAVQWYCASRGLIYTRYSDDMVVSAKEFASLDGIEETLGAFFVEYMDGDLALHPGKSKLLRTGSKIRLLGMVLLPNGTISVDASIKSEIEVLIHFYIKDRAKFADRADGDAQKVEARLAGLLNYANTVDQSYLQKLRKKFGAAVVDLFLHRSFG

SEQ ID NO: 4738 - protein, 322 aa, Sphaerotilus natans
  source 1..322: note = Related to CP035708.1
MPIVKKPLKTLFEAMFHGKRSFADFMREASEDDLGRTHIRQGAKRRELVSPSERLRAYHSFLRLFLVDFLPVHEKSVFSYRKGVSARAAVEQHAPSRHFFVTDIESFFPSLTRGIVRETITNAMAEIPIADLSDHLEHVLDLLCVDDAVPIGFSTSPGLSNAALYPFDAAFHARCQQLGVIYTRYADDIVLSSGERSAVQEGEVALNELLDRMFRGELRLHRGKSKYLHVGGKIKLLGMVLLPNRTISVDTSVKDEIETMLHLYLRDRERFNKMLEVGSAKTEARLAGLLNYVNTVDQSYLEKLRRKYGAAVVDMFLHRSFG

SEQ ID NO: 4739 - protein, 313 aa, unidentified
  source 1..313: note = Related to NZ_JPOQ01000093.1; note = Proposed Ferrovum myxofaciens
MLFEAMFHGKRDFTDFMRKVSEDDFGRAHLRQGTKQRVLINPSERLRAYHNFLRLFLVDFLPVHEEAVFSYRKGVSARAAVEQHALSRYFFVTDIESFFPSITRDIVRKTITSAMAEIPIADLSDHLEHVLDLLCVDDALPIGFSTSPSLSNAVLYPFDIVFHARCQELGAIYTRYADDIILSSGERATVESGEGSLNDHLDRMFEGGLRLHRGKSKYLHRGEKIKLLGMALLPNGTISVDTSIKDKIETMLHLYLRDREKFNTMLDAGTAKTEARLAGLLNYVNTVDQLYLEKLRRKYGAAVVDMFLHRSFG

SEQ ID NO: 4740 - protein, 311 aa, Ramlibacter sp.
  source 1..311: note = Related to JACORU010000006.1
MFHGKQKFADFIGADVTSLYTTTTPRIGSKRRTLHMPSDKLRAYHEFLNLFVFEFLPVNTGVAFAYRKGVSAADAVRIHKHGRHFLVSDLADFFPSIDVSLVRATLVGGAMASPVEGLESNLDRILQLVCIDDALPLGFSTSPVLSNAVLFAFDTALQKECESRSLVYSRYSDDLIISGSDRDEVHGAGQIVEGLLREHFGEKLRLNPFKSKSLHVGSKVRLLGVVLLPNGKVTVDAKLRANIEVLLHFYLKDRAKFADFAKKVTGEPDKAEARLSGWINYINAVDQEYLDKLRMKYGSALVDRFVHRSFG

SEQ ID NO: 4741 - protein, 348 aa, Herbaspirillum sp.
  source 1..348: note = Related to VSWE01000008.1
MQYSPVLYERQHILTMTKQPLQKLFDAMYHGKYSFEDFLQSPVEKNYEVIAPTEPGGRRLFKPKENLKTYHRFLNLFLFEFLPVNDRVVFSYRKGFSALHAVQKHAKSKFFYQTDIQAFFDSIDRALTEKAILSGQANCPISDLDIHLDRIVDLVCIDNSLPVGLPASAPLSNAVLLDFDNELERSCLERELCYSRYADDIIISGHRQVDVQEIGQSVQEKLHQFSSKNFSIHEGKTRYFHVGGKIKILGMTILPNGKISIDSKKKKDLEVLLFFYLNDKERFRKIVNQAKNRTETSRELSDDDYVAYLSGTINHVDSIDPDYTDKLRRKFGTATIDALKHSGFSKEK

SEQ ID NO: 4742 - protein, 333 aa, Herbaspirillum camelliae
  source 1..333: note = Related to NZ_KV880769.1
MTKQPLQKLFDAMYHGKHSFEDFLQSPVEKNYEVIGTSDFGGRKLFKPKENLKLYHRFLNLFLFELLPINERVVFSYRKGFSAVNAVQRHTQSKYFFQTDIQSFFDSIDQALTKRTILAGEPYCPIADLTAHLDRIVDLVCIDDSIPVGLPASAPLSNAVLLNFDNEMERLCQERDLSYSRYADDIIISGQNQGAVQEAGNAVQEKLHQFSSEKFFIHQGKTRFFQVGGKIKILGMLILPNGRISIDTKKKNELEVLLFFYLNDREKFKNIVNQAKQRTDAKRDLVEDDYIAYLSGNINYVDSIDPDYTDKLRRKFGAATIDALKYSGFSKEK

SEQ ID NO: 4743 - protein, 333 aa, Pusillimonas soli
  source 1..333: note = Related to NZ_SDQC01000001.1
MTKQPLQKLFDAMYHGKFSFHDFLHSPVEQNYEIVGGSTSGSRTLFKPKENLKTYHRFLNLFLFELLPINERVVFSYRKGFSAVNAVQKHTQSKYFFQTDIKAFFGSIDRLLTQKTILAGHEYCPIEDLHEHIDRIVDLVCVGDSIPVGLPASAPLSNAVLVNFDNEIERICKQQGLIYSRYADDIIISGQKHESLLGLKMLVQEKLHQFSSEKFFIHHGKTRFFQVGGKVKILGIMILPTGIISVDTKKKNDLEVLIHFYLNDRGRFKDMVNKTKKRSGADEELSEDDYIAYLSGNINYVDSIDPAYTDKLRRKFGSTTIDILKYSGFAKEK

SEQ ID NO: 4744 - protein, 335 aa, Chromobacterium violaceum
  source 1..335: note = Related to JAGKRE010000004.1
MNKEPLQKLFDAMYHGKIRFEDFLYSPMEQNYEQGLPNHNGRRRILKPRENLKTFHKFLNLFLFELLPINERVVYSYRKGFSAVNAVEKHRDGKFFFQTDISAFFESIDVSLAKRVILSGAEFTPISDVDSYIDRIIDLVFVNDSLPVGFPVSAPLSNAVLFDFDNVMESYCLNKGLVYTRYSDDIVISGNEREWYNGVDDFVQRSLHESASDRFYINRKKTRFFQVGNRLSILGVMILPNGKVSPDTRKRREIEVLLHFYLTDKDKFKKMIAEKRVKSGKISKIDDGVSDDECLDVLSGNLNYIDSIDPDYTNKLRRKFGVATIDMLKHRGFSK

SEQ ID NO: 4745 - protein, 332 aa, Undibacterium luofuense
  source 1..332: note = Related to NZ_JAGSPN010000010.1
MMEKQPLRALFNAMYHEKFNFDDFLTYSVSDSYEISSKEKLFERKFKKPKDMVKNYHRFLNLFVFDYLETNPRVVFSYKKGLSALNAVERHSLSKFFFQTDISSFFESIDKKLIRETIVAGCSACPVSDIDLYIDRIVDIVCIDNALPVGLPCSAPISNAVLLLFDNEIEKICAQRNLIYTRYSDDIIISGMERSSLDGIDKQVRGSLEVIYNNKFSINIAKTKFFKVGNKISILGVNILPNGKVTPDKSKKEELEILLHFYLTDRDKFISRASEMKRGNKNTLSEEDCLNLLGGNLNYVDSIDKDYTDKLRRKFGVVTIDKLIHRGFPVKK

SEQ ID NO: 4746 - protein, 323 aa, Vibrio parahaemolyticus
  source 1..323: note = Related to NNGJ01000068.1
MKKHTLERLFDMITHGKYDFSDFLHCNLDDEVKIFEISSKKLSSQSRIVYSASAKLKDFHSFLNMVVFEQLSSNEDVVYSYRKGVNALDAVIDHRNSKYFFQTDIRKFFPSIDRELIAKTINRNKERIPVSDFDNYFDRVLDMVCYGGSLTTGFSTSPLISNSVLIEFDDYFYKYCKSNHLVYTRYSDDLIVSSSKPFEIDIESTIIEKLDKLYRGNFGINKNKSRYSHIGQKVKLLGMVILPNGDITIDRKQKKEIEVLLHYYKEDKKRFDELIDGDYLKGMARISGILNYIKMIDEEYLNKLMKKYGVTLIDTLIRKAASK

SEQ ID NO: 4747 - protein, 323 aa, Aliivibrio fischeri
  source 1..323: note = Related to MAJX01000042.1
MKKHTLERLFDIIMHGKYNFSDFLFCKLDDEVQVFEIGSKKLSSQSRIVYSSSTKLKDFHNFLNMVVFEQLPSNNNVVYSYRKGVNILDAVIDHRNSKYFFQTDIRKFFPSIDKKLVSETIKKNKEKIPVSDFDKYSDRVLDMVCHGDHLTTGFATSPLISNSVLIEFDDYFYNYCKNNHLVYTRYSDDLIISSNNPFKEDIELLITKSLDEIYQGSFSINKSKSRYSHIGQKVKLLGMVILPNGDITIDRKQKKEIEVLLHYYKEDKNRFNELINDDYQKGMARISGILNYIKMIDEEYLNKLMKKYGVTLIDTLIRKAASK

SEQ ID NO: 4748 - protein, 315 aa, Vibrio jasicida
  source 1..315: note = Related to NZ_LNQW01000024.1
MKKSSLEQLFTLILHGKYSFSEFLECDLESELTEMTVRSRTLYSPSNKLKSFHYFINMVIGEQLNINGKVVFSYRKGKNALAAVQVHRKSKYFFQTDIRAFFSSINKQLIKEALLRSRDNIPVLDLDIYLDRIVDMVSVGNSLATGFSTSPLISNSVLVEFDDALVNYCTTNNLIYTRYSDDLIISSQNTIDHSIENVIESFLSQYYSDTFSLNDRKSRYSHIGQRVKILGMVILPNGDITIDRKQKKEIEVLLHFYREDKNKFRELLNDDMDKGFARISGILNYIKVVDEGYLHKLMRKYGVTVIDTLMRKASL

SEQ ID NO: 4749 - protein, 315 aa, Vibrio nigripulchritudo
  source 1..315: note = Related to CAOA01000134.1
MKKFPLESLFDIILHGKYKFSEFENCQLNEEVTRIQVRSRTVYSPSSKLKSFHYFLNMVLCEQLALNEFAVFSYRKGISTLDALKFHVSNKYFFQTDITSFYSSITRSIIDRVIEVNKPNLPISDIDKFHKRILDFISYDGILPTGFSTSPLISNSVLIDFDNLFAQYCMNKGLVYTRYSDDIIVSSKNEFDIDVEKVISGFLKELYGDTFNLNSSKSRYSHIGQRIKVLGMVVLPNGDITIDKKQKKEIEVLLHFYREDYSRFRDIIGDDLDKGMARISGILNYIKNIDESYYHKLMSKYGVTTVDILTKKAGN

SEQ ID NO: 4750 - protein, 327 aa, Thiocystis violascens
  source 1..327: note = Related to NC_018012.1
MTNAVTSGPKMPLESLFRAMYHDKFDFQDFVNGEISRNYERTQYLDREKTREILKPNQKLKTFHTFLNLFLFEHLPVNRDVVFSYRKGVSTYDAVIPHAKSRHFFQADISSFFTNINREMVNKTISFGYDSVPISDIDFYKERILDLVCVGDTLPTGFPTSPTITNAVLRPFDDQLQAYCNSNSAIYTRYSDDIIISALDRELPSDIKDYVTQTLSVITAGRLQLNERKCRHFHIGGKVKILGMLILPNGQISVDSKIRRETETLLYFYVRDKDKFLNKTGLDFDKGMKRVSGFLNYINTIDQRYLEKLRRKYGATVIDMFLHRSFD

SEQ ID NO: 4751 - protein, 316 aa, Janthinobacterium sp.
  source 1..316: note = Related to NZ_CP014222.1
MKKQSFEHMYNAMFHGKYSFSDFLNCDIDSEYTTINLRDRVIYSSSKKLKDFHKFLNLFIFDFLHISIDSVFSYRKGYNVVDAVQMHKNGKYFFQSDIVDFFPSIHENLVKSTLKHSLESTPILDLDKYLDLIIKLTMINNNLPIGFSTSPLISNAVLLDFDEEILSYCRKKNIQYSRYSDDIIFSAENIEEIIEVPIVVEKCLISHYNNTFKINKSKSKIKHIGGKVKILGMVIMPNGSLTIDSKLKNIIETLLHLYRTDKQKLKEISENDLENGIKKITNYLNYINAVDANYLLKLKKKYGPAIIDYFIHKKRN

SEQ ID NO: 4752 - protein, 316 aa, Deefgea sp.
  source 1..316: note = Related to NZ_CP081150.1
MKKPDLESAFNSMFHGKYKFSEFINLNTIDEYTIIQHNNRIVYSTTKKLKDFHKFLNLFVFEYLRINEEVVFSYRKGHNVVDAVKIHAKGKYFYQSDIIDFFSCINEQHIDHSLKISLSSIPVSDIEKYAMQVKNLILIDGKLPIGFSTSPPISNSVLFDFDKIIKQHCTLNDIKYSRYSDDIIFSANSLNLLDDIEKITEETLLKTSGNAFHINTKKSKIKSIGEQVKILGMVIMPNGELTVDSKIKNKTEILLHHYRTDKEKFKKISENELEKSILNLGSLLNYINAVDKPYLYKLKKKYGATTIDFFIHKTRG

SEQ ID NO: 4753 - protein, 333 aa, Pseudoalteromonas sp.
  source 1..333: note = Related to JACJDS010000010.1
MFDENQKRSLREIFISTFHEKMSFQDFIQLDVGSEFQKFNLKRRTLYAPSSKLKRIHRFLNNTIFEFADYNTDVVFSYRKGVNIRDAVEKHAGNNFFFQTDLSNFYSNIHESDVRRALSNQLTNTPVLDIEKYIDKIIELVVFDNHIPAGFSTSPILSNICLFEFDNQLNKYCNEHHLTYTRYSDDLIISSKTDHFSEDIESVVSNLLSEYINAGITINKLKTKLHKKGHNFKMLGFNVLPNGVVTIPSVDKKEIETLLYFYLTDSNKFENYFQSTFCNTEAELGEKSLRELAIGTLSGKLIAFNSMDKQYVSKLRRKYGNTMIDMFIRKSVK

SEQ ID NO: 4754 - protein, 311 aa, Catenovulum maritimum
  source 1..311: note = Related to LAZL01000002.1
MFKDFMQIDVNGEFQKINLKKRTVYAPTPKLKLLHRFINNTVLEFADYNADVVFSYRKGVSIRNAVEKHSHNNFFFQTDLSNFYGNIHQSEVQTALMNQLKNTPVLDVEKYIQRIVELVIVDDHIPAGFSTSPLLSNICLFSFDNELLKYCQAHDLTYTRYSDDLIISGQTNEFAGDIEPVINNLLAEYVNTGISINKSKTKLHKKGHKFKLLGFSILPNGVVTIPSADKKEIESLLYFYLTDNNKFENHFKNTQNPKDIESYDKSLREHALGTLSGKLIAFNSMDKQYVSKLRRKYGNTVIDMFIRKSVK

SEQ ID NO: 4755 - protein, 333 aa, Pseudoalteromonas sp.
  source 1..333: note = Related to LKDV01000028.1
MNENNINRNLKDIFNSTFHGKMSFEDFLSLDVQSEYGTIALKKRLVYVPSPKLRLVHRFINKTILEFADCNKNVVYSYRKGVSTRDAVEKHSGHTYIFQTDLTDFFNNIRKSNVVNSLKKQLSSVPIKDINTFIDVIADLVVIDDHIPAGFSTSPLLSNICLFDFDNELEKYCLSNNLKYTRYSDDLIISGSSIDFTTTIEAIIETFLKKNVNNALSINEAKTKIHKIGHNFKILGFNILPNGIVTIPSADKKQVESLLYFFLTDEKKFEDFFLGFTNKIKQGSDDKTVREKAISMLSGKLIAFNAMDKKYIAKLRRKYGNTVIEMFIRKSVT

SEQ ID NO: 4756 - protein, 333 aa, Pseudoalteromonas sp.
  source 1..333: note = Related to NZ_QNQN01000070.1
MNNESTKRSLKDIFSSTFHDKMSFDDFLRLDVNREFKTINLRKRLVYAPSAKLKQVHRFINKTILEFADCNTNVVFSYRKGVSTRDAVERHSHSNYIFQTDLSKFFNNIHRDDVMTALKSQLSNAPVSDIDLFIEKIVDLVVIDDHIPAGFSTSPLLSNICLFRFDNALEAYCEANELKYTRYSDDLIVSGSLNDFTESIETVIDNLLIEHVNNSLCINKAKTKTHKVGHSFKILGFNILPNGVVTIPSPDKKEVESLLYFFLTDDQKFEDFFKKCADSKTPETDDKTIRERAIGMLSGKLIAFNAMDKQYVAKLRRKYGNTVIDMFIRKSVT

SEQ ID NO: 4757 - protein, 333 aa, Vibrio diazotrophicus
  source 1..333: note = Related to JAATOR010000004.1
MDNNDKNRSLEEIFVSTFHDKMSFKEFLSLDINNEYHTIDLRKRVIYAPTPKLKQIHRFINKTILEFADYSKDVVYSYRKGVSVRDAVEKHSNNTIFFQTDFSDFYSSIHAENVKTSLYKQLSNTYISDIEKYIDRILELTVIDNHIPAGFSTSPLLSNICLFDFDQELLKCCNDIGLTYTRYSDDIIISGSDKTFTDDILSIIKDLLGKHVNSEISINDSKTKINKKGHDFKLLGFSILPNGIVTIPSEYKKEVELLLYFYLTDNEKFEDYFKKLNENKKLELEDKTLREHAINSLSGKMIAFNSMDKKYISKLRRKYGNTVIDMFIRKSVK

SEQ ID NO: 4758 - protein, 312 aa, unidentified
  source 1..312: note = Related to SAAR01000301.1; note = Erysipelotrichia bacterium
MSFEEFLRLDVKNEFHRIDLKKRIIYAPSLKLKQIHRFINKTVLEFADYNSDVVFSYRKGVSIRDAVEKHSSNNIFFQTDFSNFYRSIHLSNVESSLNNQLSDTLISDIGFYINRIIELTVVDNHIPAGFATSPLLSNICLFDFDKELLKYCNDNNLTYTRYSDDIIISGVNDVFVESIKDLIKNLLAKYVNKDIHLNDSKTRINKKGHSFKLLGFSILPNGMVTIPSRDKKEVELLLYFYLTDNSKFENYFSTIADNKKLGSGDKSLREYAINSLSGKLIAFNSMDKCYISKLRRKYGNTVIDMFIRKSVK

SEQ ID NO: 4759 - protein, 333 aa, Photobacterium alginatilyticum
  source 1..333: note = Related to NZ_RSEJ01000003.1
MEANQKRPLIDIFISTFHDKMSFNEFLTLNVSNEFKRIQLNKREVYAPSPKLKTIHRFINKTILEYADYNTEVVFSYRKGISTREAIEKHSASNYFFQTDISNFYNNVRLENIYTSLRKQLNNTPVLDIENYIDNIVNLVVVDEQLPTGFSTSPLLSNICLLDFDNALLKYCKDNFLIYTRYSDDIIISGSDDGFAVEIESIVSNYLNNFVNEKIKINSAKTKFHKRGHDFKLLGFSILPNGIVTIPSSDKKEVESLIYFYLTDNEKFEDLFKKISVNKKLENTEGKPIRDLAISSLSGKLISFNSMDKDYISKLRKKYGNTIIDMFIRKAVK

SEQ ID NO: 4760 - protein, 328 aa, Shewanella sp.
  source 1..328: note = Related to JADWMP020000001.1
MEKRSLDKVFLSIFHDKFSFNDFIVFDLSSNYKKLMVNNREVFSASKELKYIHKFINSSILAYAKYNKDVVYSYTKGVSIRDAIEKHSGSKFFLQTDISNFYGSLNRDNIEISLRYQIDNFPISDIEDYIDLIVYLTVVEDKLPAGFSTSPLLSNLCLLDFDTALLKYANENKLVYTRYSDDLIISSVNDRLDNDIVLKIESLLCEHVNDSISLNQSKTKFNHIGNSFKLLGLNILPNGTVTIPSSEKKKLETLIYLYFTDKDKFIDFTNNNIKYNKESKERTVVEVGTRYITNKLVAFNSMDPEYVNKLRRKYGNTVIEMFLRQSVN

SEQ ID NO: 4761 - protein, 345 aa, Idiomarina sp.
  source 1..345: note = Related to CP027188.1
MKHYEEKPQEFVLTSIQKKRSLQEVFLSTFHSQLTFDDFLNLNVAHEYKKVEIQKRVIYIPSYKLKRIHKFLNNTVFNHARFNTDVVFSYRKGISVRDAVTPHAKNKFFFQTDIVSFYQSIKTNDVERALKNQLSDVPISDIDRYIDHIVNLVVVDDHIPAGFATSPVLSNICLVNFDDALLEYCKTQHLTYTRYSDDIIISGEYELEHKVIEIFVTELLKANLGRAAELNIQKTKRYKRGHDFKLLGLNILPNGVVTIPRESKNEIEVMLYLYLTDAKGFDDYVKHTFFSSETDIDSSTLRERGIAKLSGKIISAKSMDNNYISKLRRKYGNTIMEMFIRKSVK

SEQ ID NO: 4762 - protein, 330 aa, Planctobacterium marinum
  source 1..330: note = Related to NZ_JAJEWQ010000006.1
MPEKRQFIEVFRSTFHEKISQEELITLETENEYKIFQHKSRKTYAPTPKLKNIHRFLNNTVFEYADYNKEVVFSYRKGKSVREAVELHAGSKIFFQTDISNFYGSITRENVEHSLREQLNNVPISDIKEYIPLILKLVVVDNHIPAGFSTSPVLSNICLYEFDNALQVHCENNGLIYSRYSDDIIISGESSEFVDRVTKTTEDLLHKYINTNVSLNPDKTKVHKKGRYFRLLGFTILPDGKITIPSQDKKEIETSLYFYLTDSSKFVDLFTKTNQVALNEVDSVSIRERAIASLSGKLIGVNSMDKNYISKLRGKYGNTVIDMFIRKAAK

SEQ ID NO: 4763 - protein, 333 aa, Shewanella ulleungensis
  source 1..333: note = Related to BMQW01000002.1
MELSKERRSLEEVFISTFHEKVNFDDFVNFSINKEYKTFEVNRRKIYAPSKKLKQFQRFINSSILEYADYNRDVVYSYRKGVSIRDAVEKHASSNFFYQTDISDFFGSITGDDIMKVINTSLLNVPVSDVLEYKQLLFELMVVDNNLPAGFATSPLLSNITLVDFDNALKKYCDRSNIIYTRYSDDLIISSVNEGFVDNINEVIKSFLHEHMGERFNLNYNKTKVRRKGQKVKILGFTILPNGIITISKSYKEEVESLLYFYLNDTDKFSDYVKNKINPRDNQIGDRTFEEFGISSLSGKLIAISSMDSLYISKLRKKYGNTIIEMFLRKTVN

SEQ ID NO: 4764 - protein, 326 aa, Salinimonas sediminis
  source 1..326: note = Related to CP031769.1
MKRSFEEIFISTFHNKVSFDEFLTLDIESEFKKIPLQKRTVYAPSSKLKQIHRFLNHAVFEYAEFNKDVVFSYRKGESTRTAVEKHANNRVFYQADIKDFFGSLKKENILHTIEAQLENTPVLDIVDYRDRLLDLTVVDDHIPAGFATSPILSNLCLFEFDNALDNICKKEELTYTRYADDIIISSQTDAFLPEIEEKIQKLLSKKVNPEIFLNLAKRKVQLQGQRIKILGFNILPNGIVTIPNKDKKSVETMLHFFINDEEKFKDYVSKNIKSNSDGEPSLRDIGISSLSGKLISLNSMDKNYISKLKKKYGNTVIDMFIRKSVK

SEQ ID NO: 4765 - protein, 356 aa, Vibrio vulnificus
  source 1..356: note = Related to DACQGG010000011.1
MSSTGYAFKIVIHFNLSINIGLALLIKIQKQRTLKEVFKSTFHDKISFKEFINLNLDEEYTISTFKKKKIYSPSDKLKKIHRFINSSILEHADFNREVVYSYLKGSSVRDAVELHSQSQYFFKTDIHNFFGIITTRNIKKSLEEQFSNVPISDIDMYKEFLFKLMVIDDVLPVGFSTSPLLSNICLFEFDNHLQAYCSSNNFKYTRYSDDIVISSNKSFDIEEMSENIQALLSKHVNEGAKLNKSKTKVHSKGERINILGYNILPNDEITISSKDKKETEILLHFYLNDLDKFDDYVTKNIINRFRNSDKKSIRDIGLSSLSGRIIGINTMDKKYLIKLRKKYGNTLIDMLLRKTV

SEQ ID NO: 4766 - protein, 332 aa, unidentified
  source 1..332: note = Related to JAAEYZ010000024.1; note = Vibrionaceae bacterium
MSYIKNQRTLEEVFKSTFHDKITFEDFINIDLNSEYKITIFKNKEIYSPSDKLKKMQRFINGSILEYADFNKDVVYSYLKGNSVRDAVELHSKSQYYFQTDIHNFFGTITGYNVKKSLEEQFSNVPISDLDNYKDFLFNLMVVDGKLPVGFSTSPLLSNICLYNFDNALYKYCESNGFLYTRYSDDIVVSSDSHISIDEISEKIQSLLLIHVNESAKLNKRKTKAHSKGEKINILGYNILPNDEITISSKDKKETEILLHFYLNDLDRFDNYVRNNISPRFRNVDDKSSREIGISSLSGRIIGINAMDRKYLTKLRKKYGNTLIDMFLRKTV

SEQ ID NO: 4767 - protein, 335 aa, Vibrio parahaemolyticus
  source 1..335: note = Related to JWSV02000003.1
MLLLSYIKHRRTLEEVFKSTFHSKLAFEDFIGINICDEYSVSTYKKREIFSPSDKLKKIHRFINGSVLEYADFNRDVVYSYLKGRSVRDAVEVHSKSQFYYQTDIYNFFGSISPSNVKKSIENQFSNVPISDIKDYQGFLFSLFVVDGKLPIGFSTSPLLSNICLRDFDNALNQYCIENSYRYTRYSDDIIISSDNQFCIDKLSKHIQNFLLQYVNENTKINKSKTKVHTKGDKFNILGYNILPNDEVTISSKDKKEAEILLHFYLNDLDKFDDYVRKSIYPRFKTSSDKSMREIGTSSLSGRLIGINAMDKKYLTKLRKKYGNTLIDMFLRKTV

SEQ ID NO: 4768 - protein, 334 aa, Shewanella algae
  source 1..334: note = Related to NZ_LVDX01000004.1
MENNRNFRTFEEVFNSTFHNRVSFDDFVNGSINTEYSIVKFKNKSIYSPSLNLKKIQRFLNKSILEYALTNERVVFSYRKGASVRDAVEVHSKSKYFFQTDIKNFFGQIKKDVVENIIGTQLGCVPIIDIEEYHDVLLRYLIVDGHVPIGFSTSPIISNLSLFYFDNDLEEYCLKNDFKYTRYADDIIISSTDYEIDLHKTKSLIKSFLLRNNFVGELINDKKTRIQVRNGVIKLLGFNILLDGTVTIPSKDKKEVEIMLNFYLNDKSKFDDYVSKLKTRSGRLNEGKSLRENGISSLSGRIIGINAMDKKYIGKLKSKYGNAVIEMFLRKTVK

SEQ ID NO: 4769 - protein, 335 aa, Vibrio anguillarum
  source 1..335: note = Related to NZ_CP091185.1
MENIEQKRSLEEVFNSTFHSKLPFSALTELTIDSEFKHKIFNNRDIYLPTDKLKKIHRFVNGSILEYAEINRNVVFSYRKGVSIRDAVEKHTCNKFFFQTDIKNFYGSISKKNISDIFDHRFDMVPISDLDNYRKKLLDLMVINDQLPAGFSTSPMLSNICLFDFDNELEQYCNESHLTYTRYSDDIIISSSEKENLTDLSEFIQSLLYKHVNKETLINDNKTKIVKHGSNVKILGFSILPNGELTISSKDKKEIEILLHFFLNDAEKFNNYIESKLSFKHDDSSDRNAYDSALSSLCGRIVALNSMDKKYLDKLRRKYGNTLIEMFLRKTVLKN

SEQ ID NO: 4770 - protein, 333 aa, Vibrio cholerae
  source 1..333: note = Related to AAXNPA010000001.1
MNIANYNRTLEEVFKSIFHDKLKFEEFLKLDVKNEYQVFDIKGRKVYSPSKKLKKIHRFINGSIFEYADYNKNVVYSYLKGVSVRDAIEKHAKNNYFYRTDIKDFFGSITGENVIRSLENQLGNVPISDISNYVNHIFNLVVVNGRLPAGFSTSPILSNICLFSFDKELEVTCQRDDMVYTRYSDDMIISSINEIDEEKITGLIQSLLFRFVGDNVFLNDKKTKIHKKGTQGTLLGFNILPNGEVTIPSRDKKEIEILLHFYLSNSDSFVNYVSKNIQPRYANSDNKTLNEIGVSYLSGKLIGINAMDKKYLTKLRCKYGNTLIEMFLRKTVL

SEQ ID NO: 4771 - protein, 333 aa, Raoultella terrigena
  source 1..333: note = Related to JABXGE010000012.1
MDRTNNNRTLEEVFTSIFHDKLKFKEFLELNITKEYEVFEVKGRRLYSPTKKLKQIHRFINGSIFEYAEYNKNVVFSYLKGVSIRDAIEKHALNQYFYQTDIRDFFGSINGENINHSLSSQLDNTPISDISDYINLIYNIVVIDQKLPVGFSTSPILSNICLFNFDNELEKICISNNMTYTRYSDDIIISSGNEINELETTSIIQSLLFNFVNNEFIVNDKKTKTYKKGSGNSLLGFNILPNGYVTIPSKDKKEVEILLHFYLTSPKSFEDYIIKNIVNRYKNQEGKSIDEIGKSFLSGKLIGINAMDKKYLTKLRGKYGNTLIEMFLRKTVL

SEQ ID NO: 4772 - protein, 328 aa, Colwellia sp.
  source 1..328: note = Related to NZ_CP034660.1
MSEKRSLEDIFLSTFHNKYSFKEFIELDISKEYEIFNINDRTIYSPSAKLKAFHRFIISCILEYAEFNKDVVFSYRKGTTIRDAVERHSNNSFFFQTDIKSFFTSISTNDVKSTLLHQLVDIPVSDVNHFIDLLIKYCVVDNILPTGFSTSPILSNLCLFKFDNQLEKLAKEKHLHYSRYSDDLILSSKSLDTLNEIELTIQRYLTQYINSTIKLNQSKTKITKKGQRIKLLGLVILPNGIVTIDKKTKRQMETLFHLYLTDDEKFENYISTHFKNKKDQQTSLKEYGISILSGKLMAINSMDKGYLNKLRTKYGNTVIEMFLRKTVK

SEQ ID NO: 4773 - protein, 334 aa, Alteromonas mediterranea
  source 1..334: note = Related to NZ_CP041170.1
MKTNTNESYRTFQEVFVSNFHNSLLFDDFLNLSVDNNIAVTQVKEREIVQPSKRLKRILHFLAKNVFDYGNIANEVVFSYRKGVNVRDAVLPHSKNRFFFQTDIANFFGSITKPLVSKSIRNGLGSVPIADIHEYADVILNIVSYKNCLPLGFPTSPAISNMCLLNFDKELLIQANELDVSYTRYADDIILSANNDEVLRMLAARVGGLLQEFLGAEIKINEAKTRYLQQGQKIKLLGLVVLPNGQVSIDRADKIEIETLLHHYLTNDDKFLGYGVVLKNKKAKNDKVLTRENVISMLSGRLIGANAMAPEYLLKLRQKYGNTIIEMFLHKSAK

SEQ ID NO: 4774 - protein, 322 aa, Methylomonas sp.
  source 1..322: note = Related to CP033381.1
MPFGIVQMKKTSISLREAFDSTFHQKFNFDDFLSLNISQEYKQLSNEKVNPSLKLKKYLRFLNSFVFDYAKINENVVHSYRHEKSTYTAVVPHCHSKFFFQTDIKDFFHKISKQDVEKIVDTALDKAPIYDINRYKSELLNITTIDDVLPVGFPTSPNISNSFLSSFDDTLEGYCIKNNIIYTRYSDDVILSSEYKNSLINIQDVISNYLKEIYDGRIEINTYKTKHTHKGSKIKILGMVVLPSGKISVDIKFKQHLEILFHFYINDKNKFADYLKNHYQGDFSKISGQLNHINTIDKSYLDKLRKKYGNFIVDSFHHQSID

SEQ ID NO: 4775 - protein, 315 aa, Methylovulum psychrotolerans
  source 1..315: note = Related to NZ_CP022129.1
MKKTSLSLQEAFDSTFHHKLNFDDFLNLNLPQEYQKISNAKVNPSPKLKKYLRFLNSFVFDYVKINTNVVHSYRHEKSTYTAVVPHCHSKFFFQTDIKDFFHKITKQDVEKILDTALDNVPIYDIHQYKSELLNITTIDDILPVGFPTSPNISNSFLSDFDDALEGYCIKNEIIYTRYSDDIFLSSNAKDSLMSIQNTISDYLNELYDRRVKINAYKTKHTHKGSKIKMLGMVILPSGKISVDIKLKQQIEVLFHFYINDKDKFADYLKNHYQGDFSKVSGQLNHINTIDKSYLDKLRKKYGNFIVDSFYHQSID

SEQ ID NO: 4776 - protein, 316 aa, unidentified
  source 1..316: note = Related to MGYX01000019.1; note = Gammaproteobacteria bacterium RIFCSPLOWO2_12_FULL_47_76
MKKLLLKEAFNSTFHKKLNFDDLLNLEIINEYTSFNIRNKQILNPSEKLKKYHRFLNSFIFDYAKINTSVVHSYRKEKTAYTAVSVHANSKYFFQSDINDFFNSITATDIKNVLNSNLDDSPISDIVNYKDQLINIVTVNNILPIGFSTSPNISNTCLYNFDNSLETYCNERDINFTRYADDIILSSNTKESMVGIEEIVSKILNEFFNDRFVLNQHKTKRLRKGNKVKLLGMVILPSGKVTVDMKLKKQLEILLHFYINDKDKFSDYLGKVYSGKLSTISGQLNYINTVDKNYLNKLRKKYGNYIVDLFFHSTVK

SEQ ID NO: 4777 - protein, 312 aa, unidentified
  source 1..312: note = Related to JACUUH010000036.1; note = Gammaproteobacteria bacterium
MPLQDVFTSTFHQKLDFNDFLNLDVKSEYEPLKNTQKLILKPSPKLKKYLRFLNSFIFEYAKINTNVVFSYRKDNSAYTAVRKHANSKYFFQTDLSSFFYSITAEDVKNVLENYMGNSPINDLREYQEIIINMVTVDGVLPVGFSTSPKISNSCLYEFDNELEQYCLDDGIIYTRYSDDIILSSKDNDLKTVEKVISGMLNKFFGARFQLNPNKTKHTHTGKKIKLLGMVILPSGKVSVDIKLKKQIEILFYFYINDKTKFTDYLVNKYQGDLGKISGQLNYINTIDKSYLNKLRKKYGNFIVDSFIHQTVS

SEQ ID NO: 4778 - protein, 329 aa, Psychromonas sp.
  source 1..329: note = Related to PJBZ01000069.1
MNEITHTNFKKNTLQTIFESNFHDKFSFHDFLHFNQEKEYTKVNIGREKIGSKEILKASDKLQSYLRFLNNYIFQYADINKNVVYSYRKGANTYQAVKKHSDNNFFFQTDIKGFFKNVKSADIKFILENNLHNTPISDLKKYEERILSIVTVNDTLPVGFASSPILTNSLLKDFDNELENYCTQNDIVYTRYSDDLILSSKVKDSLIDIEKMISNILNKFFNDSFQLNKEKTKLTHKGNKIKILGMVILPTGKVTVDIKIKKQIESLLHFYINDKDIFIDLVGGNYDDGLAMVSGKINYINTIDPEYLIKLRKKYGNYVVDLFFHQSFK

SEQ ID NO: 4779 - protein, 326 aa, Psychromonas sp.
  source 1..326: note = Related to NZ_WTKU01000003.1
MNDITHSEKKSLQSIFKSHYHEKYSFEDFLNFDQEKEFSTIEIDTKKGAKKEIFKPSDKLQDYLRFLNNYIFQYADTNTNVVYSYRKGTNPYQAVVKHSANNFFFQADIKGFFSSVKRQDIEYVLNNKLAQSPISDLNIYINRILNLIMVNDSLPIGFASSPILTNSLLNDFDNELEKYCLDQDVIYTRYSDDLILSAKTKTPLINLEDYISEMLVKFFNERLKLNEEKTKLTQKGNKIKILGMVILPTGKVTVDIKVKKNIEILFHYFINDKNKFVDISGGNYEAALDKLSGKINYINTIDPDYLIKLRKKYGNYIVDMFFHKSY

SEQ ID NO: 4780 - protein, 316 aa, Methyloprofundus sp.
  source 1..316: note = Related to JACUUF010000373.1
MALTLKNAFEATFRSNYRFEDFLALKLEQTATRKKLGGREIVQPNAELKAYLRFLNRFIFSYADVVDEAVFSYKKDASPKQSLIKHCQSRCFYKTDIARFFESITFDDVLQVFTNKLSQAPITDWPDYQAHLQSLVLVDGRLPIGFPSSPVISNSVLYEFDQAALAWAQRHDIIYTRYSDDLIFSAQHDEVLKSLPQRIEKWLNDFYDGRFKPNPYKSFFTHTGEKVKLLGLVIQPNGHISVSRSLKNKIESLLHYFIEDQAVFDRLLAQHFSGNAVGLMSMLSWVQSIDQPYIEKLRKKYGNYTVDLFLHGAARL

SEQ ID NO: 4781 - protein, 329 aa, Escherichia coli
  source 1..329: note = Related to CP028745.1
MKPLSLEKAFNIAFFEKDSFQNFLSFEPFQQTKFITFDERLIAEPTSKLKEYHKFINEFVLSYLKVNKDVVFSYRKGSSTYDAVKLHACSKIFFNTDIKSFFPSITREYARSVLVDNLSNVPISDLNIHLDKILDYIIIDNSLPVGFPTSPAFSNACLYDFDVEMQQYCINHEYIFTRYSDDIIISSENDEGFENIHSVVSDLLGEFGKGHFKLNSAKTKLIKKGSKIKLLGMVILPSQIVSVDIKIKRKLEHLIHFYVTDKDKFIDSIIKDPKVKTSGLNDSEILEKGVNTVSGLLNHINTIDKSYLDKLKRKYGNTIVDMLFYKNVN

SEQ ID NO: 4782 - protein, 329 aa, Enterobacter ludwigii
  source 1..329: note = Related to NZ_CP006580.1
MKPLSLEKAFHIAFFDKDSFHNFLSFQPFQQTKFSTFEERLIAEPSSKLKEYHKFINEFVLSYLKVNKDVVFSYRKGSSTYDAVKLHAKSKVFFNTDIKSFFPSITREYARAVLFNNLSNIPISDLNVHLDKILDYIIIDDSLPVGFPTSPAFSNACLYDFDVALQQYCAEHDYIYTRYSDDIIISSENDEGFDNINSVVIELLGEFGKGHFSLNPTKTKLIRKGSKIKLLGMVILPSEIVSVDIKIKRKLEHLIHFYITDKDKFLDSISKDPKIKTTGLNDSEILEKGVNSVSGLLNHINTIDKKYLDKLKKKYGNTIVDMLFFKNVN

SEQ ID NO: 4783 - protein, 328 aa, Pantoea vagans
  source 1..328: note = Related to NC_014562.1
MKALTLEKAFSIAFFEKDTFENFLTFEPLSQIKFSSKNERLITEPGSKLKEYHKFINEFIFSYLKVNKDVVFSYRKGASTYEAVKLHAKSRVFFNTDIKSFFPSVSREYARYVLDDNSSSVPITDFSSYIEKILDFIIIDDALPVGFSTSPSFSNACLYHFDLGMQSYCFEKGYLYTRYSDDIIISSEHELDDDIYAVVSGFLNKLSSANFELNPSKTKLIRKGSKIKLLGMVILPTGVVTVDIKVKRKLEHLIYFYLNDKEKFVDSVKKESGNKQKYLNEGEVLDKGISMVSGLLNHVNTVDKSYLDKLKKKYGNTIVDLFFHKNLN

SEQ ID NO: 4784 - protein, 353 aa, Yersinia frederiksenii
  source 1..353: note = Related to NZ_CQDT01000017.1
MSDQFVNVDDNILPTNSSSPIKPKKSLPLEKVFNIAFFEKDTFENFLNFDVASGYECADFKGRTLLKPSPKLKDYHKFINDFIFPYLSVNETVVFSYRKGSRTYDAVSRHSESKVFFNTDIQNFFPSITRDFAKLVLLDNLKNIPISDINNFIPKILDFVVVDNVLPVGFSTSPSFSNASLYTFDCRMFDYCQEINAVYTRYSDDIIISTNNDSDLNDIYRIVAHFLSQVNDGKFLLNKRKTKIVRRGNKIKLLGMVILPSGKISVDIKTKNKIEHLIHFYLTNKESFKNAVLKYDKDGKIKNLPENEIIIKGVGMVSGILNHINTIDQEYLNKLRRKYGNVVIDMFFHQNAS

SEQ ID NO: 4785 - protein, 328 aa, Photorhabdus luminescens
  source 1..328: note = Related to NZ_JXSK01000013.1
MNTPDNPIIPKSKKILKLETIFSIAFHEKTKLDDFLSFNIKSEYKKLEYNGRIIYHPSTKLKSYHKFINDFILFYLNINKEVVYSYRKGSSTYEAVKKHSDKKWFFNTDINNFFSSITKNFAREVLEDNTSAIPIIDIQEYYDKILDFIIVDDILPIGFSTSPAFSNACLYKFDNNIQYYSSENNLIYTRYSDDIIISSDNKEIIHSIYTTVSNFLSKENNGNFSLNKYKTKIVNKGNKVKLLGMVVLPSGKVTVDIKIKKKIEYLIYFYITDKDKFKDAIGKDIDKGIEMISGNLNHINTIDKSYLNKLRKKYGNVIIDMFFHKNVF

SEQ ID NO: 4786 - protein, 327 aa, Pseudomonas sp.
  source 1..327: note = Related to NZ_LR733826.1
MNKKKLEVLFEAMYHGKYSFKDFIESDISAEYASFKAKERTIYRTTKKLKTFHSFISLFILEYLNINPRVVYSYRKGFNSLDAVSKHAQSKYFFQTDIEHFFENLTTPLIRKTILNNSDNSPVLDIENHIDRIVELTTLNNSLPLGFSSSPVMSNACLYDFDNELEKLCIQNELIYTRYSDDIIISSQNQEKIEPIESTIEFILNKHHNGQLNLNKQKSKHTRKGNKVKLLGLAILPNGKVTIDIKIRNEIEVLLFHYVNDRDKFLDHEKIKQDMTKGVDLLFGYLNYVSTIDKNYLEKLRKKFGATVIDMFLHRTKKKEDRHANNF

SEQ ID NO: 4787 - protein, 323 aa, unidentified
  source 1..323: note = Related to NZ_JAJOYU010000011.1; note = Proposed Pararheinheimera soli
MKDNSLESVFNAYFNNKKNFSDFYTLRTEEEASLIPLSKSKVELYRCSEKLKVIHTFLSLFIFNEMPLRKDIVFSYRKDVNITDAVRPHCNSEFIFKTDISKFFNSISAECVYHSLSKYCENIRTVNSGEIRENIERIVYLCTINNHLPVGFSCSPSISNFCFYDYDNIIDAYCNENGYIYSRYADDLIISSQDEMNKDKITDDLTAILSSDAFLRLSINHKKTKLITKKFERQILGISILNDGKMTVSKATKTDIEVKLHLLKTNREKLVDYTGMEEKSSILSIAGVLSQINNIDSDYLFHLRKKYGNAIISKLLKGKELLK

SEQ ID NO: 4788 - protein, 323 aa, Serratia liquefaciens
  source 1..323: note = Related to CP048043.1
MKDNSLENVFNSYFNNKKDFADFHTLRTEDEASLIPLSKSKVELYQCSARLKVIHTFLSRFVFSEMPVRKDIVFSYQKDVNIADAVRPHCNSEFIFRTDISKFFSSISAEAVSHMLSKYCENIRTVDAKEVRENIDRIVYLCTIDNCLPVGFSCSPSISNFCFYDYDNIIEAYCNEKGYIYSRYSDDLIISSQDEMDKDTITGDLTTILSSDVFLKLSINHKKTKVITKKYERKILGISILNDGKMTVSKVTKTDIEVKLHLLKTDRKKLMDYTKMDEMASILSIAGVLSQINNIDKDYLFHLRKKYGNAIISKLIRGKELLK

SEQ ID NO: 4789 - protein, 323 aa, Klebsiella pneumoniae
  source 1..323: note = Related to FWGN01000003.1
MKNKSLENVFNAYFNNKKDFSDFHKIRTEEEAHLIPLKRNSAELYQCSDKLKAIHNFLARFVFSEMPVRKDIVFSYRKEVNITDAVRPHCESDYIYKTDISKFFPSISADAVSEKLKKYCAHISTVDAEDVRENIGRIVYLCTLNNQLPVGFASSPSISNFCFYDYDNLIESYCREKNYIYSRYADDLIISSQSEIHKESITADLSVILTSDALLRLSLNHKKTKVITKKYERKILGVSILNNGKMTVSKTTKKDIEVKLHLLRTDRVKLVDYTGMDEMSSILSIAGVLSQINNIDKDYLYHLRRKYGNAIISKLLRGKELLK

SEQ ID NO: 4790 - protein, 323 aa, Escherichia marmotae
  source 1..323: note = Related to LR134270.1
MKDNSLESVFNSYFNNKKNFADFHTLRTEDEVRLIPLSRAKTELYQCSARLKLIHTFLSRFVFSEMPVRKDIVFSYRKEVNITDAVRPHCNSEFIFKTDISNFFPSISGDVVSDKLSKYCATIRTVDAEEVRDNIKRIVFLCTIGNRLPIGFSSSPSISNFCFYDYDNLIDSYCHNNNYIYSRYADDLIISSQHEISKDTITTDLKSILSSDPLLKLSINHKKTKVITKKYERKILGISILNDGKMTVSKATKTDIEVKLHLLKTDRNKLVNYTGADEMSSILSIAGVLSQINNIDQDYLFHLRKKYGNSIISKLLKGKDLLK

SEQ ID NO: 4791 - protein, 323 aa, Cronobacter sakazakii
  source 1..323: note = Related to NITI01000005.1
MKNNSLESVFNSYFNHKKNFDDFHNIRTEEEVRLIPLSRTKADLYKCSDRLKLIHTFLSRFIFSEMPVREDIVFSYRKEVNISEAVKPHCNSEFIFKTDISNFFPSISSEAVSNKLSKYYDYLSTIDIEDVKKNIERIVYLCTFDNRLPIGFSSSPSISNFCFFDYDNIIESYCKDKKYIYTRYADDLIISSQHEILKKEITNDLIGILSSDPLLKLSINHKKTKVITKKYERKVLGISILNDGKMTVSKATKTDIEVKLHLLRTDRGKLMNYTGMDEMSSILSIAGVLSQINNIDQDYLFHLRKRYGNAIISKLLRGKELLK

SEQ ID NO: 4792 - protein, 335 aa, Escherichia coli
  source 1..335: note = Related to NZ_ADJG01000004.1
MDADIVLPIGGCNDRKKTLEALFNSYFNFKKEFSEFNSIQTINEVEKIALLKNNKIIYKCSDRLKSIQSFLNKFIFNEMPIRKDIVFSYRKDVNIADAVRPHSHSNFIYKTDISNFFPSIKPQIIKNRLLKHRDKIEFIEREEIEKYCDRIIDICTIDDHLPIGFPSSPSISNFCFYEYDSIISDFCIKNSLIYTRYADDLIISSTDELDKDNLSQTLEQILHSDDQLRLKINYKKTKLITKKYERHLLGISILENGKLTISKKMKRDIEIRLHLLKTNRDKLVDYTNSNEMDSILSIAGTLSQINNIDKDFLYQLRKKYGNAIISKLLKGKDLL

SEQ ID NO: 4793 - protein, 317 aa, Escherichia coli
  source 1..317: note = Related to ABBXOP010000094.1
MKIKDAFDFYYNGKFNFDLFSDLVFSDHVKEVILNKKLFFSASDDLKVIHNFLSKFIFDSLGVRDDIVFSYRKGVNVFNCIEPHKFSNFIYKTDIESFFPTITKPAIEEAIKKSVCNISYIDHEDIINNLDRILELTTVSERLPVGFSSSPSISNFIMYDFDCDIYKYTTDHGLVYTRYSDDILISSDKEIDKNEMTRIISDILSKKKGLNFKINNKKTKIITKKYERIIFGISISPVGTLSVSSKLKKEIEVKIYYLLNNREKLSMFSNMDEKNAILSLSGSLSYVLGIDPGYVTKLRGKYGNAIITKLLSNKEDL

SEQ ID NO: 4794 - protein, 317 aa, Proteus mirabilis
  source 1..317: note = Related to CP021694.1
MKLEEVFNFYFNGKESFEQFYTLSLNDHIKEFNFNNKKCYSISDELKTIQLFLSKFIFENIEFRKDLVYSYRKGVNVVDCISPHRFNNYIYKTDIENFFPSIGYDLIKNKIIEKVKDISFLDTNDVMVHLSRILELVTIDKKLPIGFSSSPAISNFVMYDIDCKIDCFAKNNDLIYTRYADDIILSGKNNLDKNSINQEINNILNYNQDNIFHLNDKKTKIITKKFERNILGISISPVGTLSISRQLKKEIEVKIFFLINNKDKFVKFSEMDEMSAIFSLAGKLSYALGVDPVYINKLRRKYGNSIINKLIKNKGDL

SEQ ID NO: 4795 - protein, 315 aa, Pectobacterium atrosepticum
  source 1..315: note = Related to ALIV01000029.1
MNKNRFEDVFKAYFNGKLNFSDMLNLNIDENIEILSLGNREVIKCSEDLKKIHSFFNLFIFDYLEIQADSVFSYRKGVNVVDAIRPHAKNKFIFKTDIKRFFPSISHSLIHNCIFSQIENIPFLDFPTYLDRVCDLVTYNGKLPVGFSTSPNISNAIFNPLDIKIKEYCSYNKLTYTRYADDLMISSNNYLDKEDYIKIISNIIKLDDGHHFTINIEKTKLIKKSKNMDVMGVKIHPDGTLTIGKKLKNEIETKLYLFSKNQDDFVKFSKQEKESSKAKLTGQLNYINTIDPDYIVKLKTKYGNSLVELFFRKAI

SEQ ID NO: 4796 - protein, 315 aa, Enterobacter hormaechei
  source 1..315: note = Related to CP029126.1
MNKSKLDEIFNAYFNGKLDFSEMLTLNITNNINTISVGSRQVVKCSSNLKRIHSFLNLFIFDLLEIQTDCVFSYRKNVNVVDAIRPHSNNKFILKTDIKNFFPSITRMSIYECINRQIEALPFSDLCDYLDKICDLVTYNGHLPMGFSTSPQISNAVFNLIDIEIKSFCIKNNLTYTRYADDILISSNNYLDKEEYIDKLTKILSFDDHQCFTINTEKTKLIKKGKNTDIMGVKIQPDGTLTISKKLKNEVETKLYLFSKNQDDFVKFSKQDKNQSKAKLTGQLNYINTIDPDYIVKLKSKYGNSLVELFFRKAI

SEQ ID NO: 4797 - protein, 315 aa, Pantoea agglomerans
  source 1..315: note = Related to CP077366.1
MDKYYLEHTFNAYCDGKIDFNDFLNIELKTNIEEIKVEKREVVKCSEKLKRIHSFFNQFIFDNLEIQEDCVFSYRKNVNVLDCIAPHSKNKFIFKTDIHSFFHSISKKTIHNCIFTQIDNQPLSDIESYLDRICNLVTYKDRLPQGFSTSPVLSNAVFNNFDIKIKKHCNRNNMIYSRYADDLLISSNNYLDKEECIHDIDNILNSCFEQKFKINTLKTKLIKKGKNMEVMGVQIHPDGSLSIGKRLKNEIETKLYLFLKNQNDFVSYSSLDKNHAIARLSGQLNYINTIDPKYIDKLKYKYGNSLVDLFFRKAI

SEQ ID NO: 4798 - protein, 316 aa, Escherichia fergusonii
  source 1..316: note = Related to NZ_CP042942.1
MISENKFESIFNLYFDGKLNFSDMLSLNKEKELKHLTIENREVIKCSEKLKKIHHFLNLFIFDNLSIQSDVVFSYRKNVNVVDAIIPHAQNKFIFKTDLNNFFKSIKRSEIYNNLISQTDQIPIIDIVDYIDLICDLVTYHDELPLGFSTSPNISNAIFNQYDIKIKEYCLSKKIAYTRYADDILLSSDNYIDKNEYIELLNNILTIDGKRIFSLNSKKTKLIKKSKNMEIMGVKILPDGKITVSKKIKNQVETKLYLFIKNQSDFIKYTKSNKISSINKLSGQLNYINTIDPEYIEKLKSKYGNSLVELFFRKAI

SEQ ID NO: 4799 - protein, 322 aa, unidentified
  source 1..322: note = Related to nan
MAGNKSFEKIFDAYFHQKISFEEFNEIEIEKEIKRINIGSKIVYGCSSKLKKIHSFLSVFVFDRVSIREDVVFSYRKNNNVLNAIYPHAKRRAIYKTDIESFFPSIRMENVKEQLKEHCKESIFFDLEEHLDSIINVISVNDRIPIGFPTSPIISNFAFIRFDNEISSYCKKRRYIYTRYADDILISSDDFLDKEELTKDINEIFKKLHSDYKLNIPKTKILTKGRPRIIFGVSIFPDGKLSVSRKLKNEIEVKLYLYLKDKKEFLSYSKANTMEGAIVNLSGILNYVNTVDKTYLNKLKSKYGASVVGLFFRKTIENEYRN

SEQ ID NO: 4800 - protein, 316 aa, Providencia rettgeri
  source 1..316: note = Related to CP096258.1
MSVQIKDIFDIYFNNSMEFNELIHLNKDDYLELKTYKGKEIIAYKKGFNKLKLLHRFLNEAVFNRIEIMNDVVFSYRKGVNVLNCVMPHRNSNFIFKTDINNFFPSFSSKFIEVKLINKFNNFIISDINQYLPEIVDIVTYNNTLPIGLSTSPSLSNILFSDIDFKIKLFSNENEYYYTRYADDIIISSNRDINKNTIFDDLQQILTSENDNFILNKSKTKLLRKGNLRKIMGVCIMPDGHITVDKKLKNNIETKLYYMSKLNNIHSKDSETTEIKRYLSGIINYVSTIDNSYINKLKRKYGSTIVEMFIRKSLIK

SEQ ID NO: 4801 - protein, 316 aa, Musicola paradisiaca
  source 1..316: note = Related to NC_012880.1
MSIKIKEIFDIYFNNSMDFNDFFNLNKMEYLEKKIFRGREIVAYKKGFNKLRLLHRFLNEAIFNRVDIMDDVVFSYRKKVNVFDCVYPHRANPFIFKTDIKNFFPSFNRDFIESKLESVFKEFIISDINEYLFKIVELVSYNDFLPVGFSTSPSLSNILFSDADKKLKSFSISNGYIYTRYSDDIIISSESEIHKKDIFTTVQGIINSECDSFVLNFDKTKLLKKGGVRKIMGVSIMPDGYISVDKTIKNNIETKLHYISKLNNVNSQEPELIEIKRYLSGMINYISTIDDGYINKLKRKYGSTIVEMFLRKSLVK

SEQ ID NO: 4802 - protein, 318 aa, Haemophilus haemolyticus
  source 1..318: note = Related to LZDL01000007.1
MKDRKPNLKFFFESYFNKKVSFDAFENISIEKNYHIQCINKREIYVPSNELKLILSFFSDFIFKLLPIEGDVAFAYRKGINVKDCLLPHVNSKFFYKTDIINFFPSISSYLIRENIYEDILKLSYLKKDDVDFYLDKILSLVTIDDKLPIGFPTSPFISNYVMRKYDLMLKYFCNMNGFVYTRYSDDIIISSNMNISKDFITRNIDGIFRKEKSPFYLNKSKTKIFTKKHKVKILGLTINNGEISIDREIKNNIEIGIYFFINNREKFINYFGLNELSAKKKLAGNLSYAINTEPDYLLKLVKKYGSSTIKEILRASV

SEQ ID NO: 4803 - protein, 318 aa, Mannheimia granulomatis
  source 1..318: note = Related to NZ_CP015030.1
MKDRKHNLKFLFESYFNKKISFDIFENISIEESYDKLCKNKREIYIPNYELKLVLSFLSHFIFKSLPIEDDVAFAYRRGINVKDCLLPHANSKFFYKTDILNFFPSISSSLIKENIYQDIHKLSYLDQEDLALYLDKILSLVTVDDKLPVGFPTSPFISNYIMRKYDVSIKSFCSNNKFIYTRYSDDIIISSNTDIDKDYITNNIEKVFQQGENLFHLNNSKTKVFTKKNKIKMLGLIINNNQISVDRKVKDEIEVGIHFFIKDRLKFINFFNDSELSAKRKLAGNISYAINIEPDYLQKLAKKYGLLTIKEILKVNL

SEQ ID NO: 4804 - protein, 318 aa, Haemophilus sp.
  source 1..318: note = Related to NZ_KV801828.1
MKDRKPNLKFLFESYFNKKVSFDIFENISIEKSYYKICKDQKDIYIPNDELKLILSFLSHFIFKSLPIENDVAFAYRKGINVKDCLLPHVNSNFFYKTDIINFFPSISTSLIKENLHQDISKLSYLDQENLMFYLDKILSLVTIDDKLPIGFPTSPFISNYIMRKYDINIKSFCNNNNFIYTRYSDDIIISSNDDIDKDYITSNIKSILQQEYSPFYLNNSKTKIFTKKNKIKILGLTINNQEISVDRKIKDEIEVGIYFFTKDRLKFIDYFSDNELSAKRKLAGNISYAINIEPDYLQKLARKYGLSTIKEILKVNL

SEQ ID NO: 4805 - protein, 331 aa, Yersinia frederiksenii
  source 1..331: note = Related to NZ_CPWN01000004.1
MANLNPPIYRNNTHSSSRKFSELFDSYFYGKYSFDDFLSIDISKETKKIQLKDNKIIYSCSGKLKNIHRFINIFIINKLCIKEDIVFSYRAGKNVVDTILPHSENKFFLQTDIYNFFPSISINLIKETILRGISNLEITDIDDYVDYILKLITIDNSLPIGFSSSPPMSNSCLYDIDNKISIYCEQKRMKYTRYADDLIISSMNLFDVNHVKNSIAKILNEQKNASFILNERKTKFFSKSQKIKMLGVVILPTGRVTVDIKMKKKVESMIYFYLNDKDKLLDLSGLNYEDTLKNISGLLNHINTIDKKYLDKLRMKYGNTVVDMFFHKSVK

SEQ ID NO: 4806 - protein, 311 aa, Photobacterium kishitanii
  source 1..311: note = Related to PYNG01000071.1
MKKKELKLIFNLMYHGKYDFNDLINCNIEKEYIKIKIKKRVIYKASNKLKNYHSFLNLIIFNYLDVDKDVVFSYRRGVNTVDAVRPHVNSCFFYQTDIKNFFPSLKKDLIKKTIINCKDSIPVIDIEKYIDRIVDLVTIDGVLSTGYSTSPIISNACLFNFDNEIKRKLANNNVIYSRYSDDIIISSNENIIVDDMNKIILLALKNNVSPDIEINKNKTKLSKKGCKIKILGMVITSDSVITVDNKYKREVEYLLYLYIRDKNRFKSIGKSISQVSGVLNYIQTIDPEYIKKLKKKYGSTIVDVFLHQSMK

SEQ ID NO: 4807 - protein, 327 aa, Sulfurimonas sp.
  source 1..327: note = Related to NVXO02000002.1
MHKKELENIFNSYFHNQYNFQDFLNIIPKQNIHYKFNKYKNYKFISYIKENNSFSKDSMKMREYHTFIKNIFCNYMKVHAAVFSYRKHINIYDLAKIHNEHQNFFTTDIKSFFYSISTQMIHEVLIQNKVNFPFELDVKYYKNIVNITTVNNSLPVGYVTSPSISNAILYKFDELMDNYSQEHSISYSRYSDDLIFSSDDYNAIKSLPAVIESTLNSLYSSAFKLNISKTRFFDKTEKVSFLGISILPNGHITVEKWTKENISQLIYFYLNDKNKFTVLLQKRFKNNLSRAYGTLNYINDIDKQFILKLRKKYGNFIVDKFLHGVKH

SEQ ID NO: 4808 - protein, 317 aa, Frischella perrara
  source 1..317: note = Related to QGLM01000007.1
MFQEKHSLEMLFNAMYHGKYSYQDFISSNIENYIQHINNKIVKTNKTFQVYHSFLNLFLFDYLPINENVVFSYRKGVNIYDLLIVHRNSKFFFQTDLKYFFPSITSEDIKKLIEKNIDMFPVVKKDIETHIDRIISLTTINNYLAVGYSTSPNLSNSILFDFDNSLSDFCQKLNIKYTRYSDDLIFSSLDKENLQKVEIEIRRLLKILFGGRIQLNTKKSKYNHQGNKVKILGAIILPNGQISVDKKIKTKIETAIYLYLNDRNKFDDFLEKNYRKGVNQISGTLNYIKTIDYDYLKKLKKKYGSTVINMFLNQSIG

SEQ ID NO: 4809 - protein, 324 aa, Aeromonas sp.
  source 1..324: note = Related to CP077210.1
MIQRTFKQAFNAVFHEKENFEEFLALDIENEVEKISVENKIKKQHRLFFRQSEKLKKYLRFVDRVILRNLAKDNDVVHSFTKDKSTLTAVSAHSNNDYFFQTDISSFYSSITKDDVLRILKRDINLIPIIDLSDYIDFLVSIMTYDGVLPVGFSTSPQISNAFLFEFDGELNEICRRRNIIYTRYADDIILSGMDLEHLKDMSSVIDSLILKLFSGQITLNKGKTKLTWKGNKVKILGLTILPNGVVTIDKKYKNTIETLLHLYTTDIDRFEKHLSVTDGFNKRSLFGLLHYANSIDPQYISKLQRKYGSLAVYKLMEDSQNDD

SEQ ID NO: 4810 - protein, 324 aa, Aeromonas veronii
  source 1..324: note = Related to JAEHHQ010000003.1
MTKRTFRQAFNAVFHDKEAFEDFLSIDIGNEIERVVILNKLKKQQRVIFKQSDRLRKYLRFVDRVILRSLARNDDVVHSFTKDKSTLTAVIAHAKNDFFFQTDISSFYSSITRNDVLMLLKRDVDLVPISDLSDYLEFLASVMTYDNTLPIGFSTSPQISNAFLFEFDRQLNDICREREIIYTRYADDIILSSMTLNVLEDMSHVIDSLLSELFLGNISLNRDKTKLIRKGNKIKILGLTILPNGVVTIDRKHKNTIETLLYLYTTDIERFHEHLSIMDGFNQRSLFGLLHYANSVDPHYISKLQRKYGALAVHKLMEDSQNDD

SEQ ID NO: 4811 - protein, 318 aa, Aeromonas veronii
  source 1..318: note = Related to NZ_MVPS01000007.1
MKKRTLEQAFNAVFHEKEQFQDFLKIDLELEVELINVKDRVVVRQSDKLKKYLRFVDRTILRSLAKDDEVVHSFIKEKSTLTAVQAHVESKYYFLADIKEFYQSIKRKDVVNILERNQAEIPIEDIVEYIDYLSYVTTYKDTLPIGLSTSPQLSNAFLFDFDREVKAYCIENSLIYTRYADDIIISGDNMDVIAMLSDRIQGMLQLYGSSCFTLKESKTRITWKGNKVKILGLVILPNGRITIDKKYKKIIEALLYFYSSDKSEYQSLLSKVMHGDEKSLFGLLHYANSVDPLYINKLQRKYGALSLHALMESDRDDN

SEQ ID NO: 4812 - protein, 328 aa, Alteromonas sp.
  source 1..328: note = Related to SIHL01000004.1
MTHEADSNQTKKKTLEQAFNTIFHDKEDFSEFCSLDVISEVEPFTISDREVFKTSDRLKRYLRFIDRIILRHLSIDTDVVHSFSQEKNTYTAVKEHVGNDYFFLTDIESFFSKIKTEDVKKILYRNINNIPISDIENYIDFLSSVVSFNNQLPVGFSTSPRLSNSFLYDFDIALKTYCSRESLTYTRYADDVIISGASFEKLERLKTTIQDFLKIHASNELRLNKSKTRITHLGNKVKILGLMILPNRTITIDAKYKSRLELLLHFYSNNKEKYQSYLEENFNGSEKSVFGMLHYVQSIDPDYLDKLQRKYGIYAVRFFMEKKSNDNR

SEQ ID NO: 4813 - protein, 319 aa, Paraneptunicella aestuarii
  source 1..319: note = Related to NZ_CP074570.1
MTKRTFEQAFNAIFHDSKAFVDFCGLDVASEVETFTVSGREIFKTSDKFKKYLRFIDRVILRHLAKDKNVVHSFTKDKNTFTAVRAHTDSNYFFLTDIRNFYSNIKITDVLRILERDKERIPISDIDSYINLLASLMTFNGSVPVGFSTSPQLSNGFLFEFDCAVREFCESNVLTYTRYADDIIISGKSFEELSDLKEIIQTFLNKYASSTLLLNEEKTRITHLGNKVKILGLSILPNRKVTIDTKYKKKLELLLHFYVTDESKYKSFLEEEFKGSEKSLFGMLHYVQSIDPDYLEKLQRKYGVFALRTLMEERWNESR

SEQ ID NO: 4814 - protein, 326 aa, unidentified
  source 1..326: note = Related to NMRX01000072.1; note = Methylococcaceae bacterium CS5
MTGKRRWQVGKRNFEQAFNAVFHDKQAFNDFCSLDVRSEIETFVINSRTIYRTSKKFKKYLRFIDKVILRHLDKNEQVVHSYLKEKSVLTAVKAHSSSKCFFLTDIKDFFTSVKTQNVLHLLTRDKLRIPITDFERYIETIVNLTTFAGSIPVGFPTSPSLSNSFLLEFDAVLEKYCCEHGFIYTRYSDDIIISGKSFEGFDNLENDVQSMLYKSASEDFFLNTKKTRLTQIGNKVKILGLVITLGGSVTIDSKYKKTLESLLHFYINDKEKYKDLLERTLHGKEHSLFGLVHYVKSIDQAYLEKLQRKYGAYALSALMEDRWSDK

SEQ ID NO: 4815 - protein, 323 aa, unidentified
  source 1..323: note = Related to QNFQ01000482.1; note = Gammaproteobacteria bacterium
MRWQVSKRTFEQAFNAVFHDKVAFEDFCTINVQEEVEEFFYDDRKIFRTSKKLKKYLRFIDRVILRHLANDDEVVHSFIKGKSTLTAVKAHTSSKYFFITDIKDFFSNVKTIDVLRILERDKYLVPIDDFENYIDTIVSMTTLGGSIPIGFPTSPQLSNAFLFEFDRKTKFFCADNSLIYTRYADDIIISGQEFNDVAGLKSQIQLLLSEHVSPNLSLNQDKTHITQIGNKVKLLGLVIMPNGRVTIDVKYKNRLETLLHFYVNDKDKFNDLLKKTMKGNVKSLFGLLHYAKSIDPEYLEKLQRKYGVYTIRLLMEDKLSDNR

SEQ ID NO: 4816 - protein, 317 aa, Endozoicomonas numazuensis
  source 1..317: note = Related to NZ_JOKH01000004.1
MSKRTLEQAFNAVFHEKESFNDFCAMNHSQEVLSFSANSRDLFHPSPKLKKYLRFIDKVILRYLERDDVVVHSYIKGKSALTAVEAHAGSSHFFMTDIKAFFSNITDVDVREILTRNEGNVPISDIKEHISLLVEMMTWQGSLPVGFPTSPQLSNAFLLRFDQKLHRYCEGRGYTYTRYSDDIVISAKSFDGFEHLSETIQLLLNTAVSPLLRLSDDKTRYTHTGNKVKILGLVVTQGGKVTIDSKYKRQLETLLHFYVTDRERFGRVVDETLAGKEHSLFGLLHYARSIDPSYLEKLQRKYGAYALRSLMEDKWHG

SEQ ID NO: 4817 - protein, 338 aa, Acidithiobacillus ferrivorans
  source 1..338: note = Related to LT841305.1
MWFVILTRQDYFYFSGNLKVDNRTLQQAFNAVFHNKESFSEFCSLEQRKHIVEFLYRGRKVYKTSAQYKHYLRFLEKVVLRHLATNANVVHSYIKGKSALTAVTTHSENSAFFLTDIKSFFPNITELNVKHVLNRDKNLVPISDFEHFIPYLAKIMTWDDSIPAGFPTSPQLSNGFLFDFDNALYDFCKTNELTYTRYSDDIIISGKYKDKLLCLKDTVQDLLHNYASKNFFINNEKTRITHAGNKVKILGLIITPKGRVTIDSKYKRTIESLLHFYTNDRSRYNDLLQNEFDGKEHSLFGLLHYAKATDPAYLEKLQRKYGLLALRQLMEDRWNGSR

SEQ ID NO: 4818 - protein, 335 aa, unidentified
  source 1..335: note = Related to NVXL01000289.1; note = Alteromonadaceae bacterium
MSINSLKSEGDEVSVTDRSLEQAFNAVFHDRESFNDFCTLPLAPEVSEIPLHLRKVYRPSDKLKTYLRFIDKVVLRHLKYNASVVHSYIKGSSALTAVQAHAKNQAFFLSDIKSFFPNIGDQDVRKVLMRDSHRIPILDFDQHIERVTKLMTLDGVLPVGFPTSPKLSNGFLHEFDNALAAYCDSTGLTYTRYSDDIIISGMDRAKLTVLREKVQMMLEEHASKSLRLNDEKTRVTHRGNKVKILGLVITPDGQVTIDVSRKHALEGLLHFYATDTEKYKNLLEKTFKGEDKERSLFGMLHYANSCDSEYLVKLQKKYGVLILRTLMEDRWSGNR

SEQ ID NO: 4819 - protein, 320 aa, Pseudoalteromonas aliena
  source 1..320: note = Related to NZ_CP019628.1
MHLKSLEKAFNTMFHNPQLFEEFLCSDLSNEVEEFYIGKEKPRKVIRVSDKFKTFLRFIDKVILQHLKINEGVVHSYIKEKSAMSAVQSHVNGKYFLVSDIVSFFSNVSSEDVKKILVANVSNIPIEDIEDYIPRIVTLVCWNDCLPVGFVTSPKLSNAALFQFDSAMADYCKKQSLTYTRYSDDLIVSSQAREPLIELQTQLQSLISQNTNGQLEVNLDKTKIYTIGQPFTILGLVITQYQTLTISRKHKNHLEVALHYFVTDKLRFKDYLEEHFAGKEQSLFGLLHYAKSVEPRYINKLQRKYGAYAITDLLENKWND

SEQ ID NO: 4820 - protein, 321 aa, Sulfuricurvum sp.
  source 1..321: note = Related to JAFLKV010000025.1
MTQTSLQNAFVSYFHTRYQFDDFLSILTNEHYTEIFYSKNTFSPSKKLKDFQKFLNLFLFELLPLNQDVVFSYRKGVNAQDAISPHKNSKYVLNTDIKSFFANINTSKLKKLILDNKNNFLILPSDIEKHIDTIMNIVTYNSILPVGAPTSPAISNGYLFDLDSALQSYCLRNEIIYTRYSDDFIFSSETKESLTKVLPIINDMFIHLGFETFTLNESKTRIQQRGSKIALLGLIITPQGYVTVDKNLKKEVEILLHFYLTDKEKFRDYFLKKFSSNIDKVSGLLSHINAVDSYYIAKLKKRYGSFIVNSFTHRDIHNVTF

SEQ ID NO: 4821 - protein, 319 aa, Sulfurovum sp.
  source 1..319: note = Related to JAJPEU010000001.1
MNKTSLETAFNSYFHNKHSFQDFLNININNEYTQIFYSKNTFSPSKKLKQFQQFLNLFIFDHLNINKDVVFSYRKGVSTIDAIKPHKNKKFIYTTDIQSFFTHIETEKIKHIILENKNNYIIIEEDIEKYIDNILSLVTYKNVLPIGAPTSPKISNAYLLRLDNLVQEYCEKNEIIFTRYSDDFIFSSDSKEKLINLDDTLEDFLKQSEYLNLTINRKKTKLQRQGSNITLLGLTITPQGHITVNKKIKNDLEILLHFYLTDKSKFNDVFESNYSSKIEKVSGIISHINSIDKTYISKLRKKYGSYIVNSFIHRDISYE

SEQ ID NO: 4822 - protein, 319 aa, unidentified
  source 1..319: note = Related to FXLF01000023.1; note = Candidatus Thioglobus sp.
MINKKPFQEIFNLYFHGKYSFEDFINTDIKRCVTPHQFNQKTMLSVNKKLAEFHKFINVFIINKLAYNSFVCFSYIENTTIRNCLEPHKNNKYFLSTDISNFFGSIQSVDVMNTIQSNINEGSLNISDIEKYKDSIIKLITFNDSLPIGFSTSGRLSNSILFKFDQVVLDSCNAQNITYSRYADDLIFSSNDKNIKQTQLMVENALAALFNKRLKINIDKTKIYSKRAKIKILGMTITPNGSITIDKKIKSDIELAMHFYAKNTEKFCSIIENKFDGNIQKAFGTVAYINSVDKAYLNKLRKKYGNYTVESFLRKSAKQ

SEQ ID NO: 4823 - protein, 317 aa, unidentified
  source 1..317: note = Related to JACCHT010000001.1; note = Candidatus Thiodubiliella endoseptemdiera
MQKKSFQETFNLYFHGKYSFEDFINTPIKDNITQHQFDQRTVLSANKKLTEFHKFINVFIVNKLTYDDSICFSYAKNTTIRHCIEPHKNNKHFLSTDISNFFASIQSVDVINTIQHNIDEGNIGIADIDQYKDSIIKLITFEGALPIGFSTSGRLSNAILFEFDKVILTECQSKNITYSRYADDLIFSSNNKNIVQVKPIVETALSNIFDERLKINDKKTKTYSKKSKIKILGLIITPNGDITIDKKIKSDIQIAMHFYANDTNKFDSFLRKRFDGNIQKIFGIVGYINSVNKDFLNKLRKKYGNYIVDSFLRKSAK

SEQ ID NO: 4824 - protein, 320 aa, unidentified
  source 1..320: note = Related to VCHC01000138.1; note = Gammaproteobacteria bacterium
MTKTKIRPFQEIFNLYFHGKYCFEDFIATDVKKHTKKHDINNKIILSADKKLKEFHQFINVFIVNQLEFNDSVCFSYAKNTTTHTCLEPHKNNTYFLSMDIVNFFGSICNTDITRVIEHNIKQKKINISDIEKYTASIVKLITFEGVLPIGFTTSGRISNAILFEFDKKILDYCSPKNITYSRYADDLIFSGNDTNIGQVKSTVKNILTDLFDTRLNINNDKTKTYFKNTRIKILGMVITPNGKITIDKKIKSDIEIAMYFYVSDSVKFEAILEKKFNGNMHKIFGIIAYINSVDKDYLNKLRKKYGNYTVESFLRKSAK

SEQ ID NO: 4825 - protein, 552 aa, unidentified
  source 1..552: note = Related to JACOND010000012.1; note = Bdellovibrionales bacterium
MKKKLYNVVGHLPKIWFVCGAKFEGKNSIRKLFIKYIQKNHQEICTARNRNSNSLSFSPKKIILAEDVLEQSKTKDTKILDYEEHISEFSTNVIFFLESPSVFMEIGRFTKTITDPLKFLFCVDQKHKKKKNLINKLLSDPKYTVLHYTTNNDIIINSDDFFKKVLNCLNKTTPTISYYEDNIHSFYSFLISFLQKEASLEQIIRKVELERKKTGFFSNFLNKIKFHLKLLIKSGLILKQDCFYFSVIRGDILKGVKFQALTERQKELLFDVEMNYSYEHIKDLVYEPNSTLKNYQAFIKTRVFDPLEEEHKVIHKRCFSYKKKHSISNLVELHIGNNYLLNMDLKNFFNSIKREDFIKCMVTLGLFEERFRTKITDICFKTKSNEINGLPIGARTSPFISNLVMREFDNLVYNLCEKKEVVYTRYSDDLSFSCKKKGVLQDIEKEIYKVIKKLPYPQNLKINEKKTKHMSKKGRRKICGLYITPESHISIGRKNKNKVKNILKNFNKTEKIYHNKEMIKIIQESFLDSEEKGYLYYVNSVEKEFLKSQIYL

SEQ ID NO: 4826 - protein, 306 aa, Clostridium sp.
  source 1..306: note = Related to NZ_AP024849.1
MKEKDFKVFYIPKKNGYRKIITYNDENRKLREFHQRVGDILYKRILPSKFAKAYIKKRSIIKNAKTHMYNDSFLLFDIKDFFQSINHNWLIEKLYYEINLNHKKKISKITCAKIVDSCSVSNRGLAVGLIPSPFLANIYLKDFDNILYGNLKKLGIKRIIYTRYADDLVISYNGIEPKNIDDIKKIVCENLKKFGLKLNDKKTRIIDFKQSNHVKITGINITKTEDDGRKLSVGRKRKDDLYVLAVELAKRKPDERKNNEILTLKGLQSFILSVEGVKYEECYSKNMISVINGLGYNALKDLIDSL

SEQ ID NO: 4827 - protein, 310 aa, Clostridium tyrobutyricum
  source 1..310: note = Related to JAHHUY010000039.1
MRKIKGKIFFIPKKHGYRKIITYNQSDSDIELRKFHVKIASLLYKRVLPSKFAKAYIKNRSIIKNAKTHMYNDIFIMFDIKDFFQSINHNRLIKKLYYEINLNNRKKLSMVSCSDIIKSCSISNRGLAVGLIPSPFLANIYLKDFDNILYGNLKKLNLKNIMYTRYADDLTISYKSDTPLKIEKIEKIVCENLKKFGLKLNCRKTRSINLNKSNHVKVTGINIIKMFDNYRQLSVGRKRKDDLYNLAIKISKKNFKEHKENEINKIKVKGLQSFILSVEGEKYEQCYSENMMSVIHDLGYKSLKQLIDNI

SEQ ID NO: 4828 - protein, 307 aa, Clostridium botulinum
  source 1..307: note = Related to SWQT01000003.1
MIKEADLKEFYIPKKNGYRKIVTYKDGDNKRREFHQRVARLLYKRILPSKFAKAYIKKRSIIINAKCHMYNDIFLTFDVKDFFQSINHNWMIEKLFYEINLNHKKKVNKVICSQIVKSCSVSRKGLAIGLIPSPVLANIYLKNFDNILYGNLRAMGMNHVIYTRYADDLVISYRGTDIKNIDKIKKIVCENLKKFGLKINDNKCRVIDLNKSNHVKITGINITKEIDNNRKLSVGRKRKDDLYRLAIELAQKSPEERSEYEIGKIRGLQSFVLSVEGKEYEKCYSKNMMTIVNKLGYSTLKDLIDSM

SEQ ID NO: 4829 - protein, 305 aa, Clostridium perfringens
  source 1..305: note = Related to UFXA01000002.1
MDNNFKVFYIPKKKGFRKIVTYGKSNIKLRETHKNINILLYRRVLVSKFAKAYTKNRSIIKNAKTHMYNDIFIMFDIKDFFQSINHNWLIDKLYYEINLNHKKKVSKKNCEKIVKSCSISNKGLAVGFIPSPFLANIYMKDFDNILYGNLKQLELKNILYTRYADDIVISYKSNKTEKFLEIKSLIDKNLSKFGLKINNEKTTIINLNKSNHVRITGINVIKDTFNNRSISVGRKRKDDFYNLALKIAKEKKEEVNIYERKKIIGLYHFIVSVEGKGFEKCYSEKMNHAINNLGYKNFEELIKNI

SEQ ID NO: 4830 - protein, 310 aa, Anaerotignum propionicum
  source 1..310: note = Related to CP014223.1
MNNDLSTFYIPKAKGYRKITTYKDRNGDLIKYHDKVNISLQKRLKQSIFAKAYIKKRSIVTNAKTHMYNDIFISMDIKDFFQSITHDRLINTLYYEINKNSVGHFTLEQCRDLVKSCSTGQRGIAIGLKPSPILANIYLKDFDGVLYGWLKKLDLDNVIYTRYADDMMVSYRSNSKDTVPINKEIISKVSELLKLSYLRLNASKTRIINLNISNHVRITGINIIKNDDNFRMLTVGRKQKDDLYYRSIGLFIKETKDDKWYLEAKKIQGMQSFILSVEGERYLNTYSKKMNIVINDLGFKNLKDLIDNLI

SEQ ID NO: 4831 - protein, 306 aa, Paeniclostridium sordellii
  source 1..306: note = Related to JAASHB010000001.1
MYKEKFNIKYIPKNKGYRKIVTYKNSDCDLKKFHIKISRTIYNNTLPSKFAKAYIRKRSIITNAKAHKYNDIYIFFDIKDFFQNINHNKLIEKLYFEINIKRKKKISKLDCYRIVKSCSLSNKGLGVGLIPSPILSNIYLKELDNILYGRLKKFGLPNVIYTRYADDMVISFKKCDKYNLDEIELLVKNLLTRYGLKMNNNKTKVINLEKSNHVRITGINISKDSQNKRYLTVGRKRKNQLYHDVIKLLNIKKEDRDKKEINRVKGMQSFILSVEGISYEDSYSLGMIKIIEEFGFTNLKEAINSL

SEQ ID NO: 4832 - protein, 306 aa, Clostridioides difficile
  source 1..306: note = Related to AAXVUS010000010.1
MKNNNFKIMYIPKSKGYRKIITYKDNDVEIRRYHIDISKFIYNNTLPSKFSKAYIKKRSIITNAKAHMYNDVFLYFDIKDFFQNINHNKLIDLLYHEINKGSKIKTSKIDCNNIVKSCAVSGKGLGVGLIPSPLLSNMYLKEFDNILYGKLKKMDLPNVIYTRYADDMVISFKYIESYDMSEVKNLIGILLRRYGLKLNDKKVKIINLNKSNHVRITGINLCKDENNNRRLTVGRKRKNELYYKAIETISKPAKDREDIQIKKIKGLQSFVLSIEGEMYENTYSQNMISIINNYGFKNLKSLIDNL

SEQ ID NO: 4833 - protein, 306 aa, Cellulosilyticum sp.
  source 1..306: note = Related to NZ_FMMP01000006.1
MKDELLIKYIPKKKGYRKIVSYNVANQKLRQEHKHINKFICDETIPSKFAKAYIKNRSIILNAKMHMYNDIFIYMDIKKFFASINHTMMVNLLFKEINKRKPKIIITKDTCYKIVKSCAISSKGLAEGVIPSPTLSNIYLKEFDNILYGYLNKMHLENIRYTRYADDMIISFKDTENYNVVDIVNAVTTLLKRYKLELNKEKTKIISLNRSNHVRLTGIIISKDSDNNRSLTVGRKRKNELYNKAISLAKKNKDIRLQGEINKVKGMQSFILSVEGIKYEEIYSDKMISIVRELGYEKLKQLIDNL

SEQ ID NO: 4834 - protein, 304 aa, Blautia sp.
  source 1..304: note = Related to NZ_JACOOV010000022.1
MIKEDLVVKYIPKHNGYRKIVTYKENSELKKFHTKAKNVLDKKIIPSKFAKAYIKKRSIISNANVHRYNDIFIALDIKDFFANIKHKKLIDLLQFELARNGRRVYKKDCIKIVKSCSNTDRGLLVGLKLSPILANIYLKEFDNILYGKLKKMNLPDVKYTRYADDLVISFKNCEANLHDIISLIQKLLKRYGLRINEKKTRIINFNVSNHVRITGINIVKDEKNFRTLSVGRQRKNELYYLAKEILDGQLNDPVKIRKVKGLQSFILSVEGVNYQKTYSYAMINEFTRRGYIDLKDFIDKLDYK

SEQ ID NO: 4835 - protein, 326 aa, Crassaminicella thermophila
  source 1..326: note = Related to CP042243.1
MYRKEQIKRILFSRKVNAMDEKLFQIKYIPKKNAFRKIVTYREDNNIRVMHEKITSFIVKNTLPSKFSKAYIKNRSIVTNAKAHMYNDIFLMMDIQRFFSNINHNKLINVLYYELNKKENIISKVDCTKIVDYCSVGNKGLPIGFVTSPVLSNLYLKEFDNILYGKLKKYNLENVIYTRYADDLTISFKKNSSYANDIIVNIQNTIANLLKRYSLKINERKTKIIDLNKSNHVRITGINIIKDDNNFRRLSVGKKRKNELYWSAINYFLTDKDNRNDAELDKIKGMQSFILSVEKTGYENSFSKAMKSKINELGYNSLKELIDKLE

SEQ ID NO: 4836 - protein, 312 aa, Ruminococcus sp.
  source 1..312: note = Related to NZ_QUEQ01000010.1
MNEQLTVKYIKTKNKVRKIVTYTENGELRKYHENVVKYLEKYATNSIFAKAYVPKSSIFKNAEAHMYNDIFIKMDVKNFFPNINHKYMAECLFFELNKNTQISRKECYSIVKKCSVGEKGLPLGLVSSPALANLYMKEFDGLLYGSLKTMDLNNPIYTRYADDLVISFKSGTNDIDKIDAIKQEVRRLLKKVHLNLNEKKTKSYILNKTNHVRITGVSITKDEKNYRHISVGRKLKNQIFWNAINMHDQEIKDYVQIEHLKGIFSFALSIEKKDFEACYSKNMKQLIKERGYDSLRDLIKDLGNDNKSMITN

SEQ ID NO: 4837 - protein, 317 aa, Roseburia sp.
  source 1..317: note = Related to FMEB01000016.1
MKEQLVVKYIKTKNKVRKIVTYTENGELRRYHEEVVKYLEKYTTNSIFAKAYVPRSSIYKNAKAHMYNDIFVKMDIKNFFPNINHKYLAECLFFELNKNTQISRKECYDIVRKCSVGEKGLPLGLVSSPALANLYMKEFDGLLYGKLKKMELNNPIYTRYADDIVISFKTGKDDFEKIDNIKAEVQSLLKKVHLTLNEKKTKSYTLNKSNHVRITGISITKDENNYRHISVGKKLKNQIFWDAINMYDQKVKDYTKIEHLKGIFSFALSIEKKDIENFYSENMKHLIKIRGYDSLKELIKDLGSDVDKNDNKAVITN

SEQ ID NO: 4838 - protein, 318 aa, Roseburia sp.
  source 1..318: note = Related to JAGZZD010000009.1
MDEELVVKYIKTKNKVRKIVTYKERGELRKYHEKVVEYLDKHVIVSKFAKAYAPKTSIYKNAYAHMYNDIFLKMDIKDFFPSINHNYLAECLYHEINKNTSISRRECYDIVKKCSVGKKGLPLGFVTSPALANLYLKEFDGLLYGKLKKMDIKRPIYTRYADDMVISFQSQEDYLEKIELIRSEIDNLLKRVHLSINHKKTKIINLEKTNHVRITGVSITKDKNNYRHLSVGRKLKNHIFWSAINQYDKEEKDYNEIAHIKGLYSFVLSIEKNGVENGYSDKMKSLLVERGYETLKQLLSSLGNDELNKNEIDDLGSH

SEQ ID NO: 4839 - protein, 303 aa, Agathobacter sp.
  source 1..303: note = Related to JAFQBJ010000029.1
MDEQLVVKYIRTKKKVRKIVTYREHNDLRKYHEAVAKYLQKNTFNSIFAKAYVPKSSIFSNAKAHMYNDIFIKMDIRDFFPNINHEYMAKSLYHEINKIAQISNKECHDIVRKCSIGEKGLPLGLVSSPGLANLYLKEFDGLFYGQLKKMCLKNVIYTRYADDLVVSFKYCDDYEKYAEKIVAQAEHLLQRFCLKLNMEKLQIVNLKKSNHVRITGVSITRNSQNYRHISVGKKLKNEIFWKAIELYDNPEGHNMIEREQLKGLFSFVLSIEKRGVEESFSEGMINLLKIRGFNSLKELINTL

SEQ ID NO: 4840 - protein, 307 aa, Roseburia sp.
  source 1..307: note = Related to NZ_MJHW01000008.1
MNKELFLEEKYIKTKKKYRKIVTYVDGENLLREKHERIVSLLKQECSDSIFAKAYIEHSSIVKNAKAHMYNDIFLFFDVKDFFPSINHNYLIQRLYKELNNNGNASINSCSKLVELCSVNDKGLPLGLVTSPILSNIYMKEFDNIIYGKLKKLSLDNIIYTRYADDIVISFKAEKIDPDINVNIKECVIRCLKQVHLKSNENKERVYDIRKGGHVRITGINVIVENDNYRKLTVGRKRKDRLYNDVMSYYMRRIKDREKALSIKGNESFILSVEGKEYEKCYSENMKKVIKEYGYDSLHDMIKAIKY

SEQ ID NO: 4841 - protein, 309 aa, Intestinimonas butyriciproducens
  source 1..309: note = Related to NZ_JADMQW010000015.1
MNVQHPDIKIRYIRTKNKTRKLVTYSSDDCELRVRHKRINDFIEARFIPSIFSKGYVKNRSIYHNALAHLYNDYFIMLDIKDFFPHICHKQLADKLFYEMNLLSREQISMKECKNVIELCSVSSRGLPLGFITSPLLSNVYMKEFDGIFFGQLKKLGLENPIYTRYVDDITVSFKYSNRIPPIEVENQVVDLAQSLLSKYGLQLNNRKKRSYNLNISNHVRITGINITKQPDNKRLLTVGRATKNELYWGAIDCLKSRDPEKIAHIKGMQSFILSIEKNGYEKCYSKAMIQQIRNLGFFSLKELIDSLD

SEQ ID NO: 4842 - protein, 310 aa, unidentified
  source 1..310: note = Related to RKGG01000020.1; note = Clostridiales bacterium
MNVQNPDIKIRYIKTKNKTRRITTYVSDDCNLRLSHTRINVFLKENFIPSVFTKAYVSGCSIYHNALSHLYNDCFVMMDIKDFFPSISHRQLEKKLYFEINAKAPNQISMLECRELINLCSVGNVGLPLGFITSPVLSNIYLKEFDGIFYGKLKSLSLKNIIYTRYADDIVVSFKPEDVKNIDDAKSSIINIAKQILSRYNLHLNERKTRFYSLEISNHVRITGVNITKNDDGKRLVTVGRSLKNKLYWDTINYMESDNKDAETVNHIKGLQSFVLSIEKNGYEKCYSKQMIENVRKHGFRTLKDLIDSL

SEQ ID NO: 4843 - protein, 308 aa, Ruminococcus sp.
  source 1..308: note = Related to DNFS01000014.1
MNINNPDIVVRHIKTKNKTRKIITYRSEDCELKTKHRRINTFLQERFIPSIFTKGYVKGRSIYDNALPHMYNDYFILLDIKDFFPHICHKQLAAKIFHEINLVKENQINKKECNYIVDCCSIGSRGLPLGFITSPILSNMYLKEFDCILYGYLKKMELNNVIYTRYADDIIISFKTDSFVEFKEIENDIVDTSKLLLSKYGLQINNRKTRAYNLDVSNHVRITGINITKSEDGYRHLTVGRKLKNELFWNAIECFETKNQENIQTIKGLQSFVLSIEKQGYESCFSEGMLKKVNDLGFESLKELIDSL

SEQ ID NO: 4844 - protein, 308 aa, unidentified
  source 1..308: note = Related to JAGAMN010000013.1; note = Oscillospiraceae bacterium
MNSTNPDVRISYIKTKNKLRKIVSYRSNDCELRTYHQQINDFLEQRFIPSIFSKGYVKGRSIYDNAQAHMYNDYFIMLDIKDFFHNICHKQLSSTLFYEINLAQANQISQKECNDIVSACSVSKRGIPLGFITSPLLSNIYLKEFDGIFYGKLKQMALSNIIYTRYADDLTISFKTDCTAKLPDVESLIASTADSILKRYGLHLNGHKTRSYSLYVSNHVRITGINVIKDQSGYRSLTIGRSVKKQLYWDALRCLESKDGELIRHVKGIQSFILSVEKQGYEDCYSSAMKRRLSDLGYKSLKDLIDAL

SEQ ID NO: 4845 - protein, 309 aa, unidentified
  source 1..309: note = Related to FMXS01000006.1; note = Ruminococcaceae bacterium FB2012
MNEQHPDITTYYIRTKNKTRKIVSYISDDCELRNTHLKINNFLERRFIPSIFSKGYIKNRSIYHNAQSHMYNDYFILMDIKDFFHSICHKQLAQKIFYEINLTKSNQINLLECYKLISLCSIDSRGLPLGFITSPILSNIYLKDFDNIFYGKLKELNLDNIIYTRYADDLTVSYKTKSTVKDVNMEAKIAETASNILKRYGLKLNNRKTRSINLNVSNHVRITGVNITKNNYNFRHLTVGRSIKNQLYWDALKCIDSDNDLLKNKVKGMLSFVLSIEKAGFETCYSDLMMAKVYSLGFSSLAELIMSIK

SEQ ID NO: 4846 - protein, 308 aa, unidentified
  source 1..308: note = Related to JAFZJT010000006.1; note = Clostridia bacterium
MTELHPDIIIRYIRTKNKTRKLATYRSVDCDLRKKHEQIEQFLTAWFVPSIFAKGYVKNRSIFHNAQSHMYNDHFVMLDIKDFFPHICHKQLSEKLYYELNRSGKNVVAKSECNDIVDICSIGSRGLPLGFVTSPTLSNLYLKEFDGIFYGKLKKLGLNNVIYTRYADDLTISFKTVTAPELSKIEESIVQIAQQLLKRYGLQLNMHKTRSYDLRVSNHVRITGVNVIVSEGNRRRLSAGRSLKNKLFWDAIECAETRDPVKTAHVKGMQSFILSVEKEGYETCFSKAMIQKVESLGFSSLKELIDSL

SEQ ID NO: 4847 - protein, 324 aa, Clostridium botulinum
  source 1..324: note = Related to QPZU01000011.1
MKKSEDVIIKHIKTKNKIRKIATYVSEGCKLRKEHENILKYLNKNFINSKFAKAYVKNRSIYSNAKVHLYNDCFIMLDVKDFFNSINHKNLIEKLYYEINKPNKKIYYQIDESNRKLISKIECANIISKCSLYNKGIPLGFITSPILSNIYMKDFDGILYGQLKKFKDYNIIYSRYADDMTISFKDNQDKKEIENEIINITEDLLKRYGLKLNNKKTRSYDLTISNHVKITGINIVKEEDNYRRMTVGKKVKNKLFWDALKCYRDGNHDYKCIEGLKGMQSFILSIEKKGYEECYSENMKNIINELGFSSLKELIDSLFYIEKN

SEQ ID NO: 4848 - protein, 316 aa, Bacillus cereus
  source 1..316: note = Related to LJIT01000071.1
MSEQNVFYQVKYIKTKNKLRKIVTYKDELPDIKLKHEEIAAFINKNFIPSIFSKAYVKNRSIYHNAITHMYNDVFIALDIKNYFNSIDHKLLLSALYYELNKRNKSTISKLECGKIISICSIFKKGLPLGLVTSPILTNVYMKEFDNILYGKLKKMKLKDVMYTRYADDLVISFKRDVYLDSNQIRKNTDVIVHQVSSLLSRFKLKLNPAKTKITSFEKSNHVKITGVNIIRDSSNHRKLSIGRKIKNNLFHDAIKCFEEKNKNKSDVMKIKGLESFVLSIEKRGYEEIYSRNMKKKIKDLGFDSLHDLINSLYYE

SEQ ID NO: 4849 - protein, 311 aa, Bacillus toyonensis
  source 1..311: note = Related to NVJL01000019.1
MDVQTNYYQIKYIKTKKKTRKIVTYTENYPEIRVQHEKIADFINKQFIPSLFSKAYIKKTSIYHNVLPHMYNDIFILLDIKDFFNSINHKILIDLMYYELNKKKKNTINKLECAKIISRCSITKKGLPLGFITSPTLSNIYMKQFDNILYGKLKKLELTNVIYTRYADDLVISFKRDVLSSSNICVEKIINQVKSLLLRYKLQLNTSKTKVINFEETNHVKITGVNIIRDSSTNRKLSIGRKIKNDLFHKAIKCYENENTNKYDILRVKGLESFILSIEKKGYEETYSKNMRAKVKSLGFNSLHELINNLL

SEQ ID NO: 4850 - protein, 315 aa, Priestia aryabhattai
  source 1..315: note = Related to NZ_JAIVKS010000001.1
MNEQNTSFRIKYIKTKKKLRKIVTYKSDNPELRIRHEKIAAFLNSNFTPSKFTKAYVKNKSIYHNARTHMYNDIFISLDIKDFFGNINHKLLINLLYYELNKKDKDTINKLECGKVVSHCSVSEKGIPLGFITSPILSNIYLKEFDNILYGKLKKLNLKNVMYTRYADDLVISFKNSFNGDSKLKSDNDENIISIVQKLLSRFNLKLNPSKTRRVSFEKSNHVKITGVNIIRDVYNQRRLSVGRKLKNDLFHMAIKCHEQEIKDMYEVMKIKGLESFIISIEKKGYEEIFSINMKDKIGELGFESLHDLIKNMRY

SEQ ID NO: 4851 - protein, 313 aa, Cytobacillus oceanisediminis
  source 1..313: note = Related to NZ_VEEP01000002.1
MDYQETKKGYIVKYIKTKNKIRKIVTYGDNAQEIKKIHTEIAEFINENFMPSKFSKAYIRHKSIYQNALAHMYNDIFISLDIKDFFRNINHQKLINALFLELNKHSNNTINKLECSKIVSNCTVSKKGLPLGLITSPTLSNVYLKEFDNILYGKLKRMKVENIIYTRYADDLVISFKDIESKTKIIDDIIMLVKKLLSKYNLRLNSSKTRIISLDKSNHVKITGINIIKSPSNYRKLTVGRELKNDLFHTAVKYYEDGNTNKYELLKIKGLESFILSIEKNGYEEVYSKNMKLKIKDLGFKSLNELIKGLTSK

SEQ ID NO: 4852 - protein, 316 aa, Bacillus sp.
  source 1..316: note = Related to LR134328.1
MEKDDWYVEKFIKRKNKLRKIVTYNNSDIRNRHTIINNFLNGNLLFSKFSKAYIKGKSIYDNAYAHLYNDYFISLDIEKYFNNIDHNILIETLYYELNKTSEKKMVMNKIECTKLVNLCSTSKKGLPLGLITSPTLSNIYLKEFDNILYGKLKRLGLESIIYTRYADDITISFKYSEEDLNIVQNNIYDIVSSLLKRYKLKLNYSKSRFIDLGKSNHVRITGISIVKDENNYRKLSVGRKSKKELFYRAIDCYRTFLEDPSNVDYLEVLKIKGMESFFLSIEKRGYENFYSKGMQKELKELGFDNLNDLIRSLPHE

SEQ ID NO: 4853 - protein, 316 aa, Bacillus wiedmannii
  source 1..316: note = Related to NUQK01000037.1
MKMQNEWYKEKYIKRKNKVRKIITYNDESVREKHSQINRILNEKLMFSKFSKAYIKGTSIFYNAKSHMYNDIFICIDIKKFFNNIDHKILLQTLYYELNKTEENVIKYGRVELKKLIEVCSISSKGLPLGLITSPALANIYLKEFDNILYGKLKKLQLNNVIYTRYADDLTISFKYIEDYLSIKDVIINEVSKLLKRYRLEMNDKKERIINLNKSNHVRITGVSIVKNVDNYRQISVGRKVKKELFYKAINAYLTFQENPSRMDFLEMKRIKGMESFILSIEKNGYESCYSVGMMRQLEELNFNNLHDLINSLPIK

SEQ ID NO: 4854 - protein, 318 aa, Bacillus thuringiensis
  source 1..318: note = Related to NUNG01000033.1
MNTDYKVRYINTNGKKRKIVTYANEAKRKEHIEIKKFLEKKLIFSKFTKAYISKSSIYKNARAHMYNDIFVKYDIEKFFNNINHKILVEILHEQLNLNSEKNENSMLEVAELVSSCIVDKKGLPLGIITSPILANIYLKKFDNILYGKLKKLGLDNIIYTRYADDLTISFKNPDEWEIERFNDELTYIEEVITKQLKKFRLKLNLKKKSIINLKVSNHVRVTGISITKITDDKRRLSVGKKKINKLYDDALELYIKTQNKEYVLTDEDFYHISRIKGMESFILSVHKTGYNHFFSGMMQKKLEELGFSSLGELIKNLN

SEQ ID NO: 4855 - protein, 318 aa, Bacillus cereus
  source 1..318: note = Related to NZ_CP085511.1
MNIDYKVRYIDTNGKKRKIVTYANEEKRKEHIEIKEFLERELIFSKFTKAYISKSSIYKNARAHMYNDIFIKYDIEKFFNNINHKILVEILHEQLNLKNEQDENSILEVAELVSSCIVGKKGLPLGLITSPILANIYLKKFDNILYGKLKKLGLENIIYTRYADDLTISFKNPNEWGVASFNEELTYIEEVITKQLKKYRLKLNLKKKSIINLKVSNHVRVTGISITKVTDDKRRLSVGKKRINKLYDDALQLYIKQQNKDYVLTDEDFYHINRIKGMESFILSVHKTGYNHFFSGMMQRKLEEFGFDSLGELIKDLN

SEQ ID NO: 4856 - protein, 322 aa, Cohnella faecalis
  source 1..322: note = Related to QXJM01000039.1
MEKKINMADYMVRYIVTKGKRRRIVTYGNEEKRQEHNEIKLFLEEKLIFSKFTKAYIAYSSIYKNAKAHMYNDIFIKYDIEKYFDSINHKILVRILHEQLNLGQEKEIYTIFETSELVGNCIFGKKGLPLGLITSPVLSNIYLKTFDNILYGKLKKMKLENVIYTRYADDLTISFKNSSRKSLEDLDHVFSEIESLINLQLKNYKLKLNANKKSIISLDVSNHVRITGISITKLVTGKRRLSVGKKKVIKLFDDALQLYYKKIVDADELSNEDLYNIQRVKGMESFVLSIHKTGYNHMFSEKMQDKLLNLGFKSLHELIESL

SEQ ID NO: 4857 - protein, 318 aa, Bacillus subtilis
  source 1..318: note = Related to NZ_AEHM01000023.1
MNKDYKIKYVEINGKLRKVVTYNNEAKRLEHIEIKRFLERNLIFSKFTKAYIPRSSIYNNARAHMYNDIFIKYDIEKFFNHINHKILVEILYEQLNLKSEKEIYSMLEVSELIGRCILGNKGLPFGLITSPILANIYLKEFDNIFYGKLKKMELNNIIYTRYADDLTISFKNPNNYGLVEFNEKLTVIENVITKLLKKYRLRLNSNKKSIINLKVSNHVRITGISITKISNDKRRLSVGKKKINRLFDDALQLYLKKQRTDYTLTDEDFYNIRRVKGMESFILSVHKTGYSHFFSEMMLEKLKKIGFNSLHDLIKTLD

SEQ ID NO: 4858 - protein, 324 aa, Fictibacillus nanhaiensis
  source 1..324: note = Related to JAFHKR010000035.1
MNKVDATWYKIKFIRRKGKIRKIITYTDQSVIEKHTRIKEFLEERLIFSKFTKAYVKNSSIFNNAKAHMYNDIFIKLDIKDFFISINHKILLDLLFSQLNVNPDQTKVSKMEISRLISICSIEKKGLPLGLITSPILSNIYLKEFDNILYGKLKKMNFKNIIYTRYADDITISFKSEDTNEFIQGLKVEILNLVEVLLKRYKLKLNRDKISLINLNISNHVRITGVSVTKDSNNYRRISIGRKRINKLYHDALNLFIKIKVRNMSLDNHDFLKIRQIKGMESFIFSIEKNGYDTIYSEKMKLRINELGFESLSQLIKNLPEKNF

SEQ ID NO: 4859 - protein, 320 aa, Bacillus cereus
  source 1..320: note = Related to FMJM01000007.1
MNEKKMWYEVKYIRKKGKIRKIITYKDESIRRLHVQIKEYLEERLIFSKFTKAYVSNSSIFYNAKAHMYNDIFLKIDIKDFFNSINHKILLEVLYSQLNLDSKQKETTKIEISKLIDVCSLDKRGIPLGLVTSPILSNIYLKEFDNILYGKLKRLGLENLIYTRYADDLTISFKSISNIPDTLLKVILELVSGLLKRYKLKINPNKVSLVDLNISNHVRITGVSVTKDANNYRKISIGRKRINNLYHDAINMYIKCRTGSLSDADYLRIKQIKGMESFVYSVEKHGYDRVYSLKMHEQIKNMGFDSLSELIKNLPENIRA

SEQ ID NO: 4860 - protein, 319 aa, Thalassospira sp.
  source 1..319: note = Related to JAJJZD010000002.1
MNSDYKKIVIVKNGKKRFLVTYNNPEVRLKHEAIKRFLEDNIYYSIFTKAYRKKSSIYINAKAHMYNDIFLKYDIKNFFDSIDHKILVQLLHMELNKLNKNSFSLLDVATLVEECIIDKKGLPLGLITSPTLSNIYLKEFDNILYGKLKKMDLSNVIYTRYADDLTISFKGNLTSEELSEFNQQLIIELQKLLKKYKLTLNKNKISIINLNISNHVKVTGINIIKKNDNYRELSVGKKRVAILFDLALNIYSRIMNDDYTLNKDDYYEISKVKGLNSFILSIHKKGYENMLSQEMRNKIFEKGYSSLTDLISNLPNSNN

SEQ ID NO: 4861 - protein, 322 aa, Lysinibacillus fusiformis
  source 1..322: note = Related to NZ_VEEI01000002.1
MNKSWYKIKYIRKKRKIRRIVTYSDNSTEIKNKHIGIKEFLEKNIYMSKFTKAYKKDSSIFKNAKAHMYNDVFIKLDIKDFFQNIDHKILLEILYFELNKSKSLSTIKYSKKQLLSLIELCSVSKRGLPLGLVTSPILANIYLKEFDNLLYGNLKKFGLNNIIYTRYADDLTISFKKTSQINIVNEKKNIELLVSSLLKKNRLKLNFSKSKMIDFEISNHVRITGLNIVKDTNNFRRITVGRKRINDLFHQSMNLHLKLKEYSLTDSDKLEILRIKGMESFIYSIEKKGYEYVFSNNMKESIYNEGFSNLTELIDALGARLE

SEQ ID NO: 4862 - protein, 308 aa, Streptococcus salivarius
  source 1..308: note = Related to FR873482.1
MVNNSGFAIFKLKKNKKIRKIVAYTSNSELKNIHKLINDHLKERVIYSKFTKGYREGVSIFDNAKAHLYNDIFIQFDIKNFFPSINHHKLINLLYKEVKHNGYNISKSQSYEIVKKASQGLKGLPLGFITSPLLSNIYLKKFDTILYHRLKKQGLDNVIYTRYADDITISFRCIPDKTDYSDIRSTIEKIISNLLKRYSLKLNNKKTRVTNLLKSGNVKVTGVYIVNKRDDYRHLTVGRKFKKELLWDAIQTLDNIERDESLVKQIKGRYSFVLSIEKEGIENMLSPCMRRILNEKNISSINELFSVL

SEQ ID NO: 4863 - protein, 308 aa, Streptococcus sp.
  source 1..308: note = Related to NZ_VMMH01000009.1
MRPNKEFKVFKLTKNKKVRKIVAYTTDSNLRREHVLINNYLRERVRYSKFTKGYRKGISIFDNVKAHMYNDIFIQFDIQRFFPSINHRKLTKLLYQEVKYNNYNLSKSQSYEIVKKSSQGLEGLPLGFVTSPLLSNIYLKRFDNILYGHLKKEELDNVIYTRYADDITISFRGIPDKLDYSDIKSRIEKIIFDLLKEYGLKLNNKKTRLTNLLESGNVKVTGVYIVNKQNSVRRLTVGRRFKKKLLWDAIQSLDNIESDDFLIKQIKGKYSFVLSIEKEGIENMLSPCMRRILKGKNISSIDELFSIL

SEQ ID NO: 4864 - protein, 675 aa, Coprobacillus sp.
  source 1..675: note = Related to QRWY01000002.1
MKEVYMLFFKNNQEKFKPSFFIAFLCGVKYKSNSPEDKRNVLYDYLKQNRKIKPVILEKSFDIDSFDNINTLNYKDIGLNNLRDIEILTSLYSHLIFVIHESMSTASEIGMFSYDDHTAKKICVIYPDEFSINKNVIGDFFTYAFFSDRNPIINNKFPFYPRTKTVHHASNNVEAYTYFINNQITKDLENKINTYIENNSKRTYDLKLHKKFQRFQSYYLLKNKNKDKIDMNLTAEFFFYHMLALLNTNEVKEIFEENNHDFHKCVTKIGNLFLETLKMTILYNRKNITANKITCHVNNYPFKQALFYLFYVFHDIGVVEIKENKIVKIENKQYDGYISKLHKLLISYKEERTFEKINVGKNAYKQFYIKKKTGLYRKITTYNDNEEGYKLKEYHDRINDFLNENITFSQFTKAYLKDTSIVKNARCHLYNNTFIQIDIKDFFPSINHHKLLNRLYFEINRGNNMRYIISKKDCLDVLKTCYFSKKGIPIGLVLSPTLANIYMKSFDNELYGKLKKLNLNNIIYTRYADDMVISCKDKLDQEKILKIKELVSEQLSYLGLKINEKKFRNVSLYTSNHVKITGINICKVKMKGNNNYRYLTVGRSKRELLYKLAFELLELNKDSFIYQYKLKKLKGYYAYVYSVEKGKVDRLCPPKYVDKLRKYGYSSFSDLIREL

SEQ ID NO: 4865 - protein, 662 aa, Eubacterium sp.
  source 1..662: note = Related to QUDZ01000002.1
MEYTLLENIKITRPILFLCGPYYNKNNKSDRRLILQEKIYEIHKNKFLPLVIDDFLTEKNIKDNTIDIQLMEEICAAVSAQTYIFLDTMSSAAELGIFANSAFFNKIKVYIPKKSDIYNKSNVGYFVRDVVLMKHSDKIECLEYRPAVERNAIATDYILEYYKFVNNQLPKNIEDDIRNDEIFNESDEHFIEYLDSNMMPDNPYQICYQIRNNKIDVNISIKILFYITISVISIEYKNDIKEKNFSVFDINKIIEQVKSIIINSLSEKTNKDLNTIDEININTVSKHKIEKIIQHIVKFAHIYYLYSQFHSVYLMEKPIGKIIRKIEVGNHPYTLLQLSDSQLDLLQDINNDKDKYYEKIVIEKNKKKREIIKYINNNDGDNAKKIHEYILKKIYSYYRFNDNSYAYQKGKSIKECVNKHIEGKSFIKYDIKKFFESIKEENLYKCLVDIFGIDKRFIGALKRIFNSCFYENTLPLGLTLSPVLSDMYLKKFDDTISRQLEEKGITYSRYADDIMISSKEIIDEKLYHEINKMVTDELVKVNLILNVKKSVFVTFNSKCNFIRYVGVNIVQGINGNYLSVGKKYIYSIAKEYLKYMDKVNVLNSELSSESDEELEELKKNVFYRRMAIIGKVSFLKQIEGDKGCKRLKKRLEKYVDIDLEKI

SEQ ID NO: 4866 - protein, 662 aa, unidentified
  source 1..662: note = Related to DXGH01000009.1; note = Candidatus Acetatifactor stercoripullorum
MEYTLLDKITITRPILFLCGPYYEKSNKSDRRVILQNMLYDTYKNKYLPLVIDDFLTEKNIRDDNISIQIMEEICAAVSYKTYIFLDTMSSATELGIFANSAYVNEISVFVPKVSDIYNRKNVGYFVHDVVLKKHEDRVKCLEYRPGLERKALATDYVVEHYKFVNDSLPSNLARHIKEDPIFGQEDSHPINLREDDVVIPQTPYQICCQRKGNNLTVSISLRLLFYVTVSIISHEYKTFLQSGDEDFSKFDIDDIVDKVNQCIKNFISGKTGKDLSACVIAKLNTVLQEEERTLVYHIAKFVHVYYLYSQFHRFYLVEKPLGNVVDKIAVGNHPYTLCGLKEKDITLLEKIQADQEKYFEQIIVRKNKKKREIIKYREDKNGDQARELHNRMLQGILEYYTANQASYAYRRGRGIKQCVQQHLDGVDFMKYDIRKFFNSIGLEKLTKCFGAALKIDERFFKELYRMLGSCFYHGTLPLGLVLSPILSDIYMNEFDRRAEGFFSSLGFTYTRYADDILVSAKEVMEEEAKEKAEEFVERELKRLSLSINREKVRKARLEKQGDQIRYVGLYIVRGEKENFITVGKSYAYETARECLDYFHKVRRLLVEELPAAEKEKLEKDTFFERRILLGKLGFMEQMEGQRGIDRVEARLKAHGLSILEI

SEQ ID NO: 4867 - protein, 666 aa, Acetobacterium wieringae
  source 1..666: note = Related to NZ_VSLA01000025.1
MDYILADKLKITRPFVFLCGPNYERNKIADRRNILRENIHRIYKMQGQEVLPLIVDPFLAGKYIDFNKYSVQLLEEICAAVSCQTHILLDTMSVATELGIFANSTYSNELCVYIPKNSDVFNQGNVGTFVREVVLKNPAANIRYFEYRPRIIRRAYSSVFTAEHYAFNNDRIPKNIKEVLKEDAKGNKLICDLPIIYDDSTSIPSEVNHIAYTYKNSKLDINISIKLLFYIVTSIFQQEYPEITKGKIDDLTQAQLHNICTYTENAIINSVSFFLGIDRKSLTETHISTILKIDNKDAIQHIAKFILIYYTKSQFKFMELITSSEYTAIKMKIGEHPDVIFNLSKDQMQVVNFVVKNPELCYECVNLKLGKKVREIIKYAKSEEGDNAKKLHQSMNEMFREEYKHSIYSYAYHQGSSIRKCVDCHINSRSFVKMDIKNFFNCISKDILLKKIENDQNIDKRYEHLLNDIISSIYYNEKLPLGLVMSPIISDYYLFEFDGQVGKYCESKALIYTRYADDIMISSSSTIEEQLYMEIMDFVSNLLNRLNLKLNKDKCESVHFDKNQSFIRYIGINIVKGENGALNYLSVGKKYIYALAKDYLKYDNFCSALENITSEEKEKMQTNVFYMRTELIGKISFIRQIEGERGIERLKVRLCKYYPDIDLKAL

SEQ ID NO: 4868 - protein, 657 aa, Butyrivibrio sp.
  source 1..657: note = Related to FPCD01000008.1
MKEYMLLDQISIERPIVFLCGPYYNKKDDGDRRKILKQTISNQYSNRILPLIIDDFLTEENIDDKTISIQLMEEICAAVSVKTYIFLDTLSSSAELGIFANSTFMNKIQVYIPKKNDIYNKSNVGYFVREISLKSRPDTIKVLEYRPGVKRNAIASDYIVEFYSFVGNKLPLNIHQSIINDEDLKESKGKTNIEIIESADMPQSHYQICYSITNQELQVNTSIKLMFYVTLAIVSCEYKELFDNKESDFSKISLEEVEQQVKDALYNLIESKTLINKNDLKKISVKTVLKQEQNDNLIRHIVKFLHVFNNNSDYGVLRLFKNPINKIIKQVIKGKTVFDVIKLTQEQIELLMKINSNPDLYYETIEIRTGNKVREIVKYRNDKNGDSARKIHEAINQSLKNEYMYSSNSYAYKKGENIKKCVINHLDGMGFLKYDIRKFFNSISIELLAKKMIIEFDIDPNYVYQLKSVLMACSYNNQIPLGFVTSPIFSDIFMKDVDNKICSVAEKNDCIYTRYADDILISSKQMIGDDMYKNIDLTVKATMLENGLVTNEKKNQFINFDSSHSFLRYIGVNIIHQQTGNIITVGKTYINDVAKDYIEYDQKKNNCQQQLNEELFYSRLRIIGKIAFIKQIEGDVGVERLKRRLYKYDPNIDFDAV

SEQ ID NO: 4869 - protein, 663 aa, unidentified
  source 1..663: note = Related to FR882517.1; note = Firmicutes bacterium CAG:65
MGYILRDEIIIRRPIVFLCGPYCQKTNKSDRRNILRKCFKDNFKDGVLPLIIDDFLTEENIKDPQINIQLMEEIFASISQKTYIFLDTLSAASELGLFMNHAFLNKVVAYIPKESDILNKKNVGYFVKDVILKMNSRQAKYIEYRPAITRSVIATDYAVEHYGFIDDIVPENIRRDLLDDIALKTKKVHLICLDEKETTPMDDYRICYRRKENRIFLNVSISLVFYIVASLMYEKYSAKLVTNPNASIKDFDVDDILRMTTDTFDNYLLRKGLPTNEDIEINTILKCSFRDLIYHIVTFCYIYHCFSTYMGLRLVDRHMDTILEPYADKKMGNPLEIFDISVQDYDFLIQCQKNPEEFYSKFYLLKNGKRREFIKYSETETGKKLRKIHERINDALRKNYVSSEKSYAYKKGSSIKKCVELHQNNNGFIKYDISSFFNSIDMDILLDAVMNIFSINFAYKKVMRNIISSFYYEGMLPLGLVISPVLSDIYMLKFDQQIIEYCEKKNYKYTRYADDILISKETEFETVEYDEIDDLVIKWLRQLKLKLNSKKKKRLFLQKDGQHIKYIGVNIVHFAKGNKLSVGRQYIYDVVKEYYNYREQARKLREYGIGDETHLFYEERRISGKIAFIKAIEGADGWEKVRKRIGDKEGLYIDEKLKFYHIS

SEQ ID NO: 4870 - protein, 668 aa, unidentified
  source 1..668: note = Related to MNRK01000283.1; note = Clostridiales bacterium Nov_37_41
MGYVLRDEVLIKRPIIFLCGPYFKKGNKSDRRYLLRKCFRKHYGDGVLPLIIDDFLTEDNIKDPNINIQLLEEIFAAISCKTYIFLDTLSAASELGLFMNHAFTNSVVAYVPKKSDILNKSNIGYFVKDVILKMNSEQAKYIEYRPAITRNVISSDYAVEHYGFIADIVPENIEKEIASDIIFKDKKEKLLYTEENEQYPDDDFHIFYKKRDGKMILHISIGMLFNVVMSLMYELNQSKLVTNKEATIADFNVDVIQRITKEVFLNYLIKKGIPCGKEIELYTKLSYSFDSIVYHMVTFCYIYHCYSTYRGLRLVDRHMDTVLDACEEISGNNPLQVFGISEEDYSLVECCAREQQKFYTSFTITKGGKKRELVKYVDTEMGDAMRKIHEKMASSLQGKYTSSELSFAYKKGGSIKKCVELHKNNDAYIKYDISKFFNSIEFEKLFEKIKKVFNIDSAYDVITKKIIASFYFQKKLPLGLVISPLMSDIYMLDFDEIIAEFCSMRNCIYTRYADDILISKKTMFIESEYQEINQKVELFLNDLKLKINSKKTKRVFLEKDGQHIKYIGINIVHFDTGNKLSVGRKYIYDVVNEYYQYLEDLEMLKVNDYEDERERLFYQERIIAGKLAFIQSIEGSDGWQRIRARFGKNAYLCENNRLSLNNLRDKVG

SEQ ID NO: 4871 - protein, 905 aa, unidentified
  source 1..905: note = Related to JAFVBO010000076.1; note = Lachnospiraceae bacterium
MSKTKIADIYAGLPDAKEAIQYEGIRDFMDAFVIPPEFPLDEGLARGNKMFITGNKGMGKTAALRYLNDYLSRMNKSTKSSFMLFEQDYNDRRKAEMLNQARSSLCLLGIEPDEKINQDDFSYIWRWHIFMTILRQNGENMREAIFLQDDTWKRFNKLLFSVIKPDFTPTLSGSLSVGLPFFGPIQPEITLNLPEIRLGKGKGTFEEIMEEATDCFKELIRFNSPYYLFIDELDVYRGQREEYLRDLRMVRDLIREVKFLNRLMQTAGWNNTKLFCTIRPEVIHAIDRELSGNIGRQITGFDCPLTWFRNTRETYTQPIMHLLMRRIELAEEKNGERIGSEEERYKRWFPQGETGEEPSDIFRRITWSRPRDIVRFLICAGNRCGGQKAFSETVFQAVKKDYSFGSLEEVKTELLALYTVEEVEAMFDCLRGLPACITLADVARRTESMKCKPVSVYGLQRVLGDLYRVGVIGQKKGNILRWQHEGDDGLFYSGDWEIVIHPGLCDALYIQEVETSAQEQAQLETQQHTSGTKSTNQELQVKDSATKPKDPVMSSELSHEMKAHQEEAREAPIFGLSEEQYQLLLDSRKTPSLYFQAFTLKTNGKTRELIRYKDNEYGEKIRQVHETAANDLQKQYRQHEASYAYRAGGSIEKCVSAHVGSTCFLKFDIHHFFNSIDAALLASEIRAQLHLTALSKESVEEFVQCFFIDGILPLGLVISPLLSDIYLHSLDENMETFCRQQRCIYSRYADDIMISGVGLQMDQMETVFSGRLSNLLKEKKLEINPLKTQKMFLKESGQYIRYVGINIVRAAEGNVLTVGRSYIHQLAKDFLDFARRKDDARTKNGEALSEADQQYLFYQGRRLAGKVQFVKQVEGDAGVEKILRRIQPHWIVEDEADLMRFCLGK

SEQ ID NO: 4872 - protein, 666 aa, unidentified
  source 1..666: note = Related to AP018794.1; note = Lachnospiraceae bacterium KM106-2
MCKIMILVLKKKIKIDRPIIFLCGPFYKASDKNDRRNILKDFLLTESDKKCIPLIIDDFVTEENIKDTTISIQLLEEIFAAIALKTYVFLDTMSAATELGLFTNNAFINKVQAYIPVENDIIYKNIGYFVKDVVLDNKSGRVAYMEYHPRIKRVPIATDYVVEHYEFINNILPLNIQEGVRKDLHSSLWNEKEVEINESAELPSDHYKINYKYDVEDNILRVNLSVQYLFYIVGGLIYSEYSDELVKNETIDFDDSCIEILEEKIKLMLRMFIQMNIFCGINQRTYVQVNTVIKDKMSNIIRHMVKFIFLYHQKSRLNGYFLVNKKSILKEVIVGKSPIDFFHFTENDISYIKDINSNKGKYYECLNLKLKGKKRELVTYSENDREGKANYAKYIHKKVVSIILENYQYSNSSYAYRKGYSIKDCVAMHKNSTFFLKFDISKFFNSIDLDILVMTIMEEFSIGKSFKMHVEEIVSTCFIDNEMQLGLILSPILSDIYMKKFDQVLERMGKECGFIYTRYADDILISSSNIIADQDIQIIKNAIQSELKLLKLKENSKKYKKIYLKSIGQHIKFLGLNIVRMMDENKITVGKEYKNYIAKEYLQFIDMKVNDEEDKKCKFYWGKRIIGYLSFVKMIEGEKGENEVYIRILKSTGGRIAFERERLQGE

SEQ ID NO: 4873 - protein, 681 aa, Clostridium botulinum
  source 1..681: note = Related to SWPB01000023.1
MYVIDDKIRIDKPIVFLCGPYYDPKDKCDRRTILKKYLIDKGNFLPLIIDDFLIDDNIKDKNINIQLLEEIFSNISVKTLIFLDTFSTSAELGLFANNSFSNKITVFLPQKSDILGVDNIGFFVSDIILKQDPNRINYLSYRPKILRVPVASDYVKEFFGFINNEVPKNIKNELDKNLISKRENYYINIEFDDLNLRNNSSNINIEKISVNDNGRDITFYISIHMLFYLVVAIVYKNYYEKLDGDKKLSKGKNISNKKDNTKIKNNKNFTVNQVKNVERLVREYIFNTYCNHKGSYNKNTNVVIETKLERKLFEIIKHMMKFIYVYHAHAKYMSNNFISDPNNIIKDVSEENPVKMFNISKEDFGLINDIKNNPDRYYEKRIIITNKKKREIVKYRNNDFGMQIRKLHTKIANVLEKIYIFHESSYAYRKRKSIVDCINTHRINNYFLKYDIKSFFNSINKKILLAGVCHELKIDIKAYGKEIESIFSTCFYNNKLPLGLITSPILSDIYMKVFDVKLTNYLTEKYNTCVYTRYADDILISNGEMLEKEKEDEIDNYIINELKGISLKLNDKKIRKVKISETGDHFKFLGVNIVKGEEDNYLTVGRERINDVAKLYLKYRHIKDTYLNDKTNDKWIFYTQKRIVGQIAFINQVEGIIGYKKLENRILKCSKGNVILTNNIQ

SEQ ID NO: 4874 - protein, 659 aa, unidentified
  source 1..659: note = Related to JAGZEQ010000023.1; note = Firmicutes bacterium
MGENKMAYILKDEIKINKPIIFLCGPYYNDLDKSDRRKILQDFLLENFPKKCLPLIIDDFLTKENIGDNEISIQLFIKIFAGISFKTYIFLDTMSSAVELGLFTNSAYNNSLYIMLPYEKERNCGNIGVFTSNVVLEDNADRITVRYYHPKIERIAFSTDNVGEFYKFINDCLPEKIRKDILQDYAENINLEHEIQIAHKEDYPQNDYCVNYQYNNTENSLIVFISVKLLFYIICGIVYSEYTENLRKKEKLDFDSYNIYTTVAHLKSLIMAFLMKHTFVGINSKTKVDIQTVLTRNIEDIVKHIISFIFTYHKNSRLKGYFLVGKNEIIKELELQISPVDFFDLTVKDIEILNLFKNKPDDFFSTFEIKTGYKKRKITTYKNNIYGNAMRELHQKICLVLNKQYVFDIHSYAYQKNKSVKKCIECHKKSKSFLKFDIHKFFNSIDKRKLSQKLLYEFELDEIYEEQLLNVLDICFDEEKMPIGLITSPILSDIYMKKFDVEFSNELGENYIYTRYADDILVSSANNISLEEEIRITRLLVSKLKVLGLKMNNKKYMKRNLKAIGDYVKYLGINIVVAKNGNIITVGKTYKNYIAKTYLRYIEIDDENREEKFYLGKKIAGYLSFVNMIEGEDGLKKIYTRIEKSTKGEIKIEGKITDL

SEQ ID NO: 4875 - protein, 587 aa, Clostridium sp.
  source 1..587: note = Related to FMEJ01000011.1
MVYALNDKIKIERPIVFLCGPYYKSGDVSDRRRILNKVLLDEYKCLPLIIDNFLTPDNIGDDTISIQLLEEIFAGISFKTYIFLDTMSSAVELGLFTNNVYNNSISVFVPHLEDRNCGTIGVFVNDNVLTNNKNVKKICYHPKIERVAFSTDYVGEYYKFVNNQLPTVIKNSIDQDFEEIGDREFKIKLKCFNDYPKDDFVINYRFNEKENTLIVFISVKLLFYIVGDIIYAEYSNNLASKKNLRITSDHIRLVMAQLNSLIRILFLKNSLVAINGKTNIVIQTVLKRNIDEVVKHIVSFIFTYHINRRVKGYYLTHHGDILKELNLKLSPQDIFKFNDIDIDLIRKIDKSFYKEFEIKSSRKKRKIVTYNDDENGKKLRELHKKMALNLQKKYKFSEYSYAYQKGKSVVNCIERHINSVHFLKFDIHKFFNSIDIHRLSKQISNLYQLDKFYEKQLLEILKTCFNDEKMPIGLITSPIISDVFMHDFDVEFASKLNKDYVYTRYADDILISCSHAISQDELDNIILILKIMLNRKGLSLNEKKTANVLLKDKGDYIKYLGLNIVKCEKSNRITVGKNIKMILLRII

SEQ ID NO: 4876 - protein, 328 aa, unidentified
  source 1..328: note = Related to JAFVYW010000089.1; note = Clostridia bacterium
MFGYLTLYFKDMERALSVANGYLADPDKYTKVHVVPMNGKVRKLRAYADNKEGKRLRELHEAVARFVWDAFQSSNMSYAYKKGRSIVDCVRAHINGKVFLKTDIHAFFDSTKLSTFLQMFLRSPKFMADKPKLTTILSACFYDGTLPLGFVSSPAISDFFLHEVDRRMQMLSGIVYTRYADDFLISSINVGAQFVLENALKVLKGEIQKLGLELNERKTFYRPLKNIGDSIHFLGLNLVRTSYPFNRVTVSNSYIRETSIDLAAALQKSDQKAYEAARGKISFVSMCSPESFEKLKKLVMIKFHLDLEEMLDSKTVQEAKLAIHLNRK

SEQ ID NO: 4877 - protein, 308 aa, unidentified
  source 1..308: note = Related to DXFX01000070.1; note = Candidatus Borkfalkia faecipullorum
MKMPEKCFSTAKEYQCNPAEFVREHVVTINGKKRTLRAYAYGSGGEELRALHTAVAQIISSGYMPSNASVAYKKGDNIVKCVSRHLSGCVFFKSDIVSFFESITLEKFMDRLKDSLLDKNSDLKKLLPACFYENMLPLGFCCSPILSDFYLSDIDKKYENGQGYVYTRYADDFIVSSRVESGEEILEELREKLWDDMESVGLDLNEKKTYIRRLDHDGDHFHALGLNIVRREKGKNIITVGDAYLRETCKQLTAIVGGETNNEEDICAVRGKIEFIRMASQDSYRKFERLVKVKTGSSLQAISERLSD

SEQ ID NO: 4878 - protein, 319 aa, unidentified
  source 1..319: note = Related to JAFSFB010000001.1; note = Clostridia bacterium
MKKIDKLIRVAEGYIANEDAYIRHFVVVINGKRRKLATYANSENGNALRELHTYMASFIRRLYQQSNASFAYAKGKNIIDCIKVHIRSDVFLKTDIHSYFNSITFEGAERVLNRHKTYQKNSDSMGILLKACFYNGRLPLGFVSSPVISDIFLVALDRKYSKRKDILYTRYADDFIISARGENSVSVLDEVRETLSDDLGKQGLFLNTKKTYIRTLKQAGDAIHLLGVNLVKTENEENRITVSDRYIRETSKGFSDLMNFNGDIEEKTELCNTVCGQISFIQMCSQDSLNKLQKMVRVKCGYSGSLQAKAICRACGLEK

SEQ ID NO: 4879 - protein, 331 aa, Mogibacterium sp.
  source 1..331: note = Related to JAFWGQ010000010.1
MRGKYSKSWSIDTMYTDARSTVEQYNEDPEKYVRSFTVRINGKKRNIITYTPDRNGAALRNIHSRFAFTISHCYQSMPDSFAYKKGSGILTCLSQHLQSDTFFKTDIHDYFNSIKFETLLSMFQEDKTCKRRMKKIKALLSLCFYNDHMPIGFITSPVLSDLYLHKVDESFLGRYDVIYTRYADDFIISGKNNMSSLEKAKNELEESLSEYGLSLNAKKTYFRTLHRPGDAIHVLGVNLVNNDPDPNRITVSDRYIRETSKDICRFLSEYQDQTKEENEIALSSAIGKIEFIRFVSPSSYSKLEKMVRIKHGEAVDLSRAMLEGLIKKNNS

SEQ ID NO: 4880 - protein, 700 aa, unidentified
  source 1..700: note = Related to JAFUFH010000088.1; note = Bacilli bacterium
MALSFFLFMYITNFICSLDSRRPLVFLCGPAYSPNPQDRRWILSHYIQSKWSEKEKDKYVHAFPIVVDELFKPDEIKEKKLDIRLNILEEIVSKISYKTYIFLDTMSTSYEMGQFTNFAYNNDSVTIFVDKKYRGRKNNAIGEYIRLSIDKSFVEYTASYDNNGLIYFPEKDGKGKTRIPKEILKVLEDDNPVKKGCFLNKILFSTYINDLNKPGYIVYHRSKDLLSFNFCIRNLFYYISSVYKLLSKSSQALLNEIPQSPRDYRFKEFVKFFKQELLKTFVCVNNSSNISFLLTADFSIEVNVENLDCDELIYHMLYISYKLFNIKSSSSRYLIPEASDQSSFDSIYFVDGLEMFGLFDNETMCALDKNRYLPHKQCISFRTLKIKNKTRNILAYRNNFFGERLRGLHQTILDSFLSKLPTSKSSYAYKKGKNTLVCLKQHEGNYYFAKFDIHKYFESIRLKMLGNKIQNYFYKKINALLSNLSLSYSNKKRINSKLTSILKPLFYKYQLPIGFVSSPKISDFYLFECDERMNKQKGIIYTRYADDILISSKSKGELDEGIRLLKSLLREEELVLNEKKTRFAVLNHENDSFKFLGINIVRRKGDLFDYTISNTYLVQTCKMFFKVFEEWEWKKDINEVIKVNGRISYIKNISNNSFKRFLHLLKVKFKDGTTISDLYWRLIWMDCPLYLELPKDIIMS

SEQ ID NO: 4881 - protein, 610 aa, unidentified
  source 1..610: note = Related to CP074575.1; note = Tenericutes bacterium
MEEILAKVSASTFVFLDTLSTAAEYGMFTNAQANNFTYTLLPYEEDIINDAVGYYVKKSIRENRDIREIVDLVRYHPKVNRYAKSSDVVDEFFGFIKDELPISIEESVKKSLLRNKEKYEIDFSITNESSSDFFIKLTSDVLEPQRYNILCSTKLLFYIIEGFLKDEYGNKSEILINQFKYNLDDYVSSVIGNVNSLVINSLVTHNTITPLEAVNSKFDIDVDLSESIFDVVKHMIEFLILFRNGGNKYSKRRSLISNPNEIFTRFKSKISKNDSSFTNMITNDKQLINFTKIALQKPSYEYNKLAYSSFIVSSPKKKRRIVTYSKTEYGQNARVLHKNIVAFLNNHVLSDSNSYAYKTGRSTYDCVLPHLNSQYFFKADISSFFNSINSDILVSKIVNHIEDFNVQQSTIRDILHTQIENMVNNCYYLNKLPIGFVSSPKLSDIYLFEFDKEIGEYCKNRNRIYSRYADDIMISSENEIDIESIKKSVIDSLSKVKLTINSKKLENKKLLSIGDNVKFLGLNIVKKELGNTISVGKSYVSEATIEFCDIVLNKDINQRVKKVIGKLKYIIYQDPTKSKQIERIIKSKLLSSYNFTSSNDFMTLYKQLSE

SEQ ID NO: 4882 - protein, 690 aa, Enterocloster clostridioformis
  source 1..690: note = Related to JAIWZC010000001.1
MLVPSFPISIALPVSQSSFIKWLFFVWEKMMNRTPEEVINLRPLVFLCGPLYDPSDKKDRRKILRQYLTRYKTTLSYNGKDYVIEPFALIIDKVFNTEDLENNQNIALIEEVIAACAYKNYIFIDTMSTALELGLFANSYSQNRTTALLPKDFRSFKPSIGYFVQQTIKKSDNIALCIYGNKRINKFIDGGRQVIENLVAFKSHQIPREIERDIKKDFSKGIESFILRIEFTTNIKDAEKILYQVNTEGIRMVIPPRILFYLVETFGSINNIKNALLDYFEYYECEKDKELVIMSILIRKGLCILELDSPFEYSIIDVIGSMSYFIEKLKTRVAFHQNYERLRYAPIKRWRSRKRFSACELLGLDIIEMRQMQSLFGYNKKKSVISKNLLINGKKRKIKMYSCTSEGFALRNFHLRLMKQLQKLFELQPYSYAYRKDRSILMCMNQHIDSKFFLKIDIRDFFNSISKGKMNKIIKCHLCYDPKQAYEDNVIWRKSRYLGEYVKEWLGIKEITDICFVNGRLALGMVTSPILSNIYMDFFDARFHDNYPELVYTRYSDDILISSGKWFDYKSILNFIAKELCYLGLEMNEHKVGFYKLKQAGDHIKFLGLNIVHGPAEENYITVGKQYIKDVCSNISQYEKKIGLFKKSQIIGQIEYIKFISTRDYLQLQKIYRIKNHKDLNVEELNRVGL

SEQ ID NO: 4883 - protein, 1740 aa, unidentified
  source 1..1740: note = Related to SVBB01000024.1; note = Erysipelotrichaceae bacterium
MAKFSYEQYKKVVGKATVKPEINVESVKGYLDNPNQYVFPFAINEKNGKTRTIITYNESSDGKNLRKVHELLAKDFEDNFAERNQYSYAYHKGIRCYNALEAHLKSNYFIKLDIHHFFESITLENFLDIYGEYFNKNWREILQYLFYFGSLSIGFVTSPLLSDFYMKKFDNAIEEYLKDYPELHFSRYSDDIMISSESKDNDTSLEALFIFIKEQLKQLRLETNESKTKKIKLNLEKHNSFSFLGLNLSKIDEENNKVTISKRYILFILFLIAKQKRYKNNCTPLDNEIKSRVAYLAYNSEISFERFQKKHINIYGEPYNFIPKVLEKREVGQTTDTIKDYSEYKDEFEFNIHSKADGANTSGYQIKNGITLTKYLGKKEEVIIPDFVDIIGDYVFMGHKIKKVILGNNVKIIGNDAFRNSTIEEIVMNDSLRHIGNGAFQNCKNIKKVVIPSYIKYVSNNTFAESGLEEITLPEGLIKIKMGAFAQSNIQNINFPTTLEAIEYNAFTECTKLSRVDLSKTNITSLGVGAFSNCVQLKEAILPEGLSTIENNLFSNCSLLKEINIPAKVGYINNSAFSNCYSLSSIKVSDGVAFLSRKDNASIVKKNHELLFTLKDKIDEDIQIIGRGLFAGVAIKNIVIPEGVKIIKEDAFKGCLWLKSITLPESLEEIGNNAFEKCISLEEIVIPSKVKALPNGLFANCSNLVKVVMGEEVTSIGDNCFANDKKLSIKLPKELMLIGEGAFKNCYNIKDLYIPYKVKEIKKNAFIGMSKHLNSIKVDNKNLVYSSGEDNNILFLQKKGSLILGTNHSTIPGGIKSIGNYAFAYNSELEEIDLPETVTTIGESAFKGCTNLRKVNLHYVSKIEKHAFENTPNLKDIFLPNSLTHIEECAFLNSGLTSITLPNSLVKLDKKAFRGCRNVKDIHIPASYTRSLSALLTTGSEEINYIEIDPDNSMYRCVDNKVIIIKAINNDPEKILFVCNGVKEIPNVPVIMDMAFKGVKGLKEIVIPNKVCVIGSNAFESCPDLEKVTFKYDDDIEIKDNAFKNCPNLKEVVLPKLLTIISANLFYNCPNLKKVKIPEGVKVIGDRAFSYTGLEKVTIRKDLVNIGNDAFASTNLKDVIIEEGVKKLSYGLFTETKISNITLPNSLEAVPGNLFAGCKELTSIVIPDKVASIGSSSFSNCTSLKEVKLPDNLEIIEESTFYKCVNLENINFPTKLKEIKSFAFYHCHKLNVPAFNEGLESIFSNSFNSVETLKDLALPSTLKYFNNSAFAYCPIESIKVSPGGMYQSNNNALTYHNKNAFNELILGCKNTTLDDSINFIAPYAFNNIDSLLEVVLPKNVTTISSNAFSDCHNIKRIILNDKLESVQSGAFDSNLCIDELKIPANTKYFGYLPKEVNKIAIDKNNILYSDFGIGVFATKDGKILMTTPTSSLPVEGITSINRDCYNNRKFTKVELPSTLISLGGFNNCEIDELFIPDSVKTISLFAINSIIKKITVSENNPYYIASEDGTMILTRSKKQIVYLGENTVIPEGITVATTNDLITSIHYPSTISDRALSLEPRGIKQIDIAKDHPTVAANNNTLYRKLDGGLIYAVNGEEIADEVTKITNLNLGKFDNVIIPKNVNLILPRALGGLIIDNIAAHKDNKMFDSRDNCNAIIHTSTNTVLFIARNGRVPDGCVVTPTTIDQRVKDVTSIEIENNYSGYETLSYNVIQRLNNNPQTTTKSSFSTIAFDSDDDLPF

SEQ ID NO: 4884 - protein, 332 aa, unidentified
  source 1..332: note = Related to JAFSUM010000023.1; note = Bacilli bacterium
MIEVVAYSLSFSPQFVAECAGSSPWSRSFYRRVSIPKKNKPNERRIIYLPSPEIKLMQHFLVERYISKLPVHGSATAYRRGSSVVKNAKAHTGNSHFLLMDIESFFDSIQRGRVKRMLLNNGVFVNPADAEMLISLCTYDGHFVQGCVSSPSVANAYLYEFDNKMDMLARGLPNGVYTRYSDDIVLSSSERIPGQIAAEVAAALAEFGLRINHKKTHFISNRQRIHITGIRLKDNKKLGLNTLFKKELKNDVYQFWKKCSLSGADLKDKNRLYGKLAYLKMADPSYYNTIITKYRFGCRTLLDFLHCLVLENDHLMLPPDKRFTDCSSNRIE

SEQ ID NO: 4885 - protein, 319 aa, Paracholeplasma sp.
  source 1..319: note = Related to NC_022549.1
MGIVREDISDTFNMDMKRVSIYVNKSNQFYKKIAIPKRKGGTREVYLPSSDIKMLQHYISEKYFSKIQLSSNATAYIKSKSIIDNARPHIKNKHFLFTDISNFFDNIKRNLFSEILLKELPFLSPYDVEDILSICTYKNRFVQGAVTSPIISNIYLKSFDEFLQGVVKNIPNGVYTRYSDDITISSSEFLNENITKIIADELSKLGLFVNNTKTYFSSFVDEIEITGLKISGNRISLSNKKKREIKNMIYHKFNKKSNSSETAEQIIGHMFYLRQIEPQYYNTLNLKYKKKKKLLIDRLFLLKNEENIQKCTATSNIQT

SEQ ID NO: 4886 - protein, 322 aa, Olsenella sp.
  source 1..322: note = Related to NZ_NFJF01000003.1
MIPVSTAIARGVGVSTDYVLGLPERVDSLYRSRIIAKDRSGQGKARVISVPDPSLQLVQEWIADFVRENTSELPPYVAAYETGRSIVQNALIHASHRHLLTLDIHHFFPSCTREMVVVKVFSGMSARDGETGQRHQLGADDVDLLASLSCYKGALAVGSPCSPFIANRIMLPVDGEIIAALPDGYAYSRYSDDISISSDSRINTGLITQIVEKILSDHGFSLNRSKTHCRGTGNARRVTGVFLTSDGSLSIGRDRKKELCRQLYALLKKQEGSPSRVLGMLFFCKQVEPEYFNTLVAKYATYGLANDYGGVIPALQALRRKM

SEQ ID NO: 4887 - protein, 313 aa, Collinsella sp.
  source 1..313: note = Related to VOWY01000007.1
MSIVEEIASDLGFSKSYIKEIAEGAGGRYRKVLLNGRRIDVPSSDLKLVQGWIACLLQECMPCDAGYITAYEPGRSVISNALLHSENAHLITLDITGFFRSCTTEMVKSVFSQLRFVSHGSNNKTAVSKKDIELLTQLSCYRGSLPMGSPCSPGIANRIMVPVDQEIIRVLPPDCSYSRYSDDIAISSSQWLDIQGIVGLLEVVLAEYGFNVNHKKVHCYGKGDARKITGIYIHPDGTLGIGKSRKALLSRSLYLLLTRQTGSASELLGHLNFCKQVDPDLFVRLIAKYSSYGVAVEYGGVMPALVEMANREG

SEQ ID NO: 4888 - protein, 303 aa, Atopobium sp.
  source 1..303: note = Related to JABZGZ010000043.1
MSIIKMISSDLSMGQNEILSIANSADSSHYHKFISGGRRIDAPDQMLKLLQFWVADFVCMETPELPDYVTAYEQGRSIKNNASMHAQNAHVINLDIHHFFQSCTKDMVKNLFASIEGYNLTSEDLKLLVSISTYKGHLTIGSPCSPFIANRIALPIDYDIKLKLPNDMEYSRYSDDISISSNNYIDYEVIVDIIGNVLSSHGFEINRKKTHCFGKGGRRHVTGIFINPDGTLSLGHRRKKQLESMLYKYLMRSKGNPNEILGFINFCNYVEPDFTRRTLLKYSKYGFARNYSSVVDYLRQIKG

SEQ ID NO: 4889 - protein, 312 aa, Adlercreutzia equolifaciens
  source 1..312: note = Related to NZ_QVPV01000001.1
MTKTSISALIQSDLGLETGYIESLAERASALYSRIKLKGRRIDAPSPELKLVQCWSSDFLHSADGDLPSFVAAYEPSCSVIRNASMHADHAHIARLDISDFFHSCKHAMVETVFRGIRFQPLPDGEWLKLEEADVTLLARLSCYKGALSVGSPCSPALANRIMLPFDRDIEANIPSSCRYSRYSDDMVFSSNCWIDIAALESTVDEILSTSGFRLNRRKTRCSGKGDRRRVTGVFVTPEGELSIGSKRKHEIKRLLYDYLTKGQGDADVILGLIQFAIQVEPKWASVLLAKYAKYGEARQYGVIGALRNASE

SEQ ID NO: 4890 - protein, 318 aa, Collinsella sp.
  source 1..318: note = Related to QSBV01000001.1
MEALPVSIADRICFDLGMTNRQLLGLVSSTADRYHCFSAGGRKIVAPRPDLKLVQCWISDYINTEFDIDLPYATAYKKGSSVCRNAGLHAKSSHFLLLDICHFFESCTQQMVRNLFSGGTYRPTNAEFRSRLTADDVDLLVALSCYRGSLATGSPCSPFIANRIMASFDHEIAARLGERFVYSRYSDDICISSTEWIDSAEISTFVGSRLRQKGFDLNSDKTRCFGRGHLRKITGIYLDCDGVLRLGPQRKAELKRSLYQVLMRECDRECALRVLGHLSFCKQVEPDFCNALLAKYASYGKAVSSGGVMPALVELAYG

SEQ ID NO: 4891 - protein, 302 aa, unidentified
  source 1..302: note = Related to JAAXUU010000117.1; note = Actinomycetia bacterium
MADDLLLDEEYVTKLVNSSARYYLTHLLEIKGKKRKVHKPLPDICLLQYWVIENILSQAPTPARCATAYEKGSCILANAAVHKDNSHIMQLDIKHFFDSITSDMVFDYYIGLDARLSDADARALQRISTYRGTLTVGSPISPFLANRIMIPVDIEIQECLPSGITYTRYSDDMCFSSPEFIEPQLIDAIQEVLSRYSLRLNTAKTHFSGRGDRQKVTGVVLIAGGKLSLGSMRKSALKKMLYEFVRYGKGNPSKILGHINFCKSIDPESVESILMKYSTRGPAVELLKAAIARSESERISEG

SEQ ID NO: 4892 - protein, 306 aa, unidentified
  source 1..306: note = Related to DMNP01000113.1; note = Eggerthellaceae bacterium
MSVLDLMAFDLLLDRDYLESILHNKRGQYRRIRLQNDRVVWQPSATLALMQYWLVDWISEMDKRELPFATAYEPGMGIVVNAKRHIGAKHALAMDIHKFFPSIGAHMLGGYFASTIEESGASAGIEDRDIGLLLDIALFNGGLVMGSPCAPYLANRVMAPVDERIWLEVANTRGLTYTRYSDDLFFSSPEWIEPSIVGEIAILLQECGLQVNSSKTRFMSEGTGINIAGVYVGQKRITLGQKRKRELKERLYQFCTNDNPTPDSARSLLGFLSFCKSVEPSYVGFMLTKYSTYGGDIMLRIKDACS

SEQ ID NO: 4893 - protein, 321 aa, unidentified
  source 1..321: note = Related to JABLXJ010000013.1; note = Firmicutes bacterium
MSLIERISRSLDIDENLIKTIARTSNKYYRVFSISKKFGGVRSIYHPSPILKVFQYWLVQNLISHLPVSEHATAYGLGCSIKRNAQLHAAAKHIVRMDVKNFFPSIRFQLLADRINAFRDTIPGGASLTEEDLQLINGICFVRGRLVIGSVCAPAISNAVMYPFDCEVSQQARALHLTYSRYADDIVFSSNEWIHPSIVEDIDGRLGKFGMKLNREKTIFMGGSDRKMVTGILLNTGRLSIGRARKESIKKMLYQKLRTGAGDNRKILGYLNYLRDIEPDTFNRMVVKYNSFFGRNIMRVLTEAPADTRKAQAEAAPTKKP

SEQ ID NO: 4894 - protein, 303 aa, unidentified
  source 1..303: note = Related to SVEQ01000005.1; note = Lachnospiraceae bacterium
MGIENRIANNLGLDPQYIINISKRNDLYRKFYIKKRNGKLREILHPSKELKIIQIWLVKNIFDEFPVSEYSYAYSKGNSIKNNAKEHCYSNYIFQADISNFFPSIDRAKLETYFDENKFIVDKLGLTDEDIDFILDVCLYKGEYLVVGSCASPCISNLIMYKFDNELNKKLLKEGKYIYTRYADDIAISSKNYISVTIRDIVESELKKMGFSINNQKTHFSNKKSRRRITGVVLDNNSCKMTIGNKKYKGFQRKLYNYLVKGEGDEGYIKGYLSFIKDLNIEQYKQLKKTYKRYDKKKKFFTD

SEQ ID NO: 4895 - protein, 307 aa, Coprococcus catus
  source 1..307: note = Related to QVFD01000002.1
MRLSERIAKGIGIDESYVIIIASRNNLYAKYYIPKKNGRYRLILQPSKELKVLQHWLLRNIFAYFPVSEYSSAYSKGNSVRKNAAVHKEGRYLLHTDITNFFPTISRTMLKQYFQSNESLTRKLGMADEDIELILDICLYRGENLVVGSVASPQIANMLMYAFDLELKQMLDGFGSFRYTRYADDIVISSMSFIDEQVLKQTEQLMIKYGFKMNHEKTYYMGKNGKRQVTGIVLDNNRNALTIGNKKYKKFQRMLYDYLVKGHGDLGYIKGYLAYIQEVSRQQYDQLAEIYKRYDIENVLFHNANGR

SEQ ID NO: 4896 - protein, 300 aa, unidentified
  source 1..300: note = Related to JAFTQC010000025.1; note = Clostridia bacterium
MNLLEQMNRDLGIDKQYIRNCAKRNNLYARYYIKKKNGGRREILQPSKELKVLQYWLINNFFNQFPISPYSSAYQKGCSIRKNADCHKYGKYILHTDIVHFFESITSKSMNSFFLRNKDILGDMHLTFDETRLILNLVLYKGAYLVVGSVASPMISNCFMYEFDMKLGEIITKRNMKYTRYADDIVISSDNYIDNSILDEIDILLNEYGFKRNIDKTYFMCKRKKREVTGLVIDNNDNSLSIGHKKYNQLKRDIYNYLIKKQGNCNQIKGKLAHLKNVNIDKYIAIKKIYSKYDKSHEIF

SEQ ID NO: 4897 - protein, 307 aa, Clostridium sp.
  source 1..307: note = Related to JACSRA010000017.1
MSLLQRMSSELRLDPDFIMSTVNSTKKYRIYKKGSKFIYNSSGELKTLQYWLNSKIFSILEYSKFTAAYQKGCSIKKNASIHSKSNYILHTDIENFFNNITEYHINILLEEINQLGKSDKELIKKIILYKGHLVIGSVSAPHISNCVMYKFDIELYDTIINNTNMKYTRYADDITISSKEYITHDVIKKVEALLVKYKFSINNNKTYFSSRATRRRVTGITIDNSTNELSLGHKKYKFIKKEIYNFLVKEQGCKDKILGNLAFIKDINSKKYDELKSVYLKYDKEGIVFSKEEKDIELKDEHEISSY

SEQ ID NO: 4898 - protein, 312 aa, Halobacillus halophilus
  source 1..312: note = Related to NZ_CP022106.1
MSMLERISNDLNLKVSFIENVLKHPKKQYRIYYIRKRNGGQRKIYHPSPVLKTLQYWLVNNVFNEFNVSIYATGYIKGKSIKDNAEAHKDSNFILNMDIENFFESINKKHVNELVNANGEYSSLDIYHLNKICFYGDFLPVGSVCSPHISNCIMYKFDNEVVEKLPNNFRYTRYADDITVSSSSYINDNVQVILEELLEKYEFRVNHNKTRYMSKKQSQMITGLNVNDGKVTIGTDIKKQLKKDLYNNLTKGTGDSEVILGKLNFLKSIEPDYFNKLIIKYSKYANVLNKLKNDVKEQKNIPIEINKSIEHT

SEQ ID NO: 4899 - protein, 304 aa, unidentified
  source 1..304: note = Related to JAFRUO010000020.1; note = Clostridia bacterium
MNIIDIMADDLKLDSSYILKIANRSDFYYKDYTIKKKNGGFRHISQPSPELKTLQYWIVKNILCKLPISNIASAYNKGNSIKKHAQIHSGAKHILHTDINNFFPSIHFSHLSSILFKHKYIFENLSIDINDSLPYISKICFRGDGLSIGAVSSPIISNIIMNSFDERLYDYCKANNYLCSRYADDIYISSNSYINDSVVVFISNLLDDLDMSINSSKTRFYSTKYRMSVTGLIITNDSRITIGSKRRSEIEKMVYNKIVNGIGDKYSIMGYLAFLKDIEPNTYNNLIIKYSKYCDGDVINKILE

SEQ ID NO: 4900 - protein, 307 aa, unidentified
  source 1..307: note = Related to JAGBXM010000051.1; note = Clostridia bacterium
MTLIEKISLDLNLDKLYLARIISRSGFYYKDFIIPKKNGGFRRISQPSAELKTLQYWITKNILCKIPISKAACAYKKGDSIKKHALLHCKSRHILHTDIKDFFESVDSSKLIKILEKNHSVFEDINLDYNSSIDDIRKICFRKNKLCIGSVSSPIISNIVMYDFDNALTGYCKENGLIYSRYADDIYVSSDKFINHDILEFISNELNKCGLSINRSKTRFYSSKYKRSVTGIVITNDSHISVGTKRRTMIKNMIYNKLVNSEGDSNEILGYLSFLKDIEPDTYQRYLIKYSKFCTTDVLTALSDKNT

SEQ ID NO: 4901 - protein, 305 aa, unidentified
  source 1..305: note = Related to JAGAZX010000174.1; note = Oscillospiraceae bacterium
MNILEKISLDLKLDLTYISRIADRSSFYYRKYTIEKKSGGFREIYQPSAELKTLQYWVVHNVLCALPISEEACAYNKGNSIKKHAEKHQKSKFLFHTDIRNFFPSIHMSHLAPILRANKGIFDKLGLDLEQSIQNIGKICFKSDSLCIGTVSSPIISNIIMYAFDVQMAEYCKAKNYIYTRYADDIYISSNNFIPIDIVSFIASNLSQNGFTINSGKTKFYSTKYRRKITGLIITHDGKVSVGLQKRNEIKKMVYDKLIHNKGDSLKILGYLAFLNDVDPKAYNDIIIKYSQYCSGDIISALNKS

SEQ ID NO: 4902 - protein, 304 aa, unidentified
  source 1..304: note = Related to JAFRDB010000067.1; note = Clostridia bacterium
MNIIARMAQDFKIDHSYLSKIVYRSAFYYKDYYINKRDGKTRRISQASPQLKAMQYWIVENILAKIPVSKGAYAYKKGDSIKRHADIHRLSKHIFHTDIKDFFFNIHFEMLRCALSNHSHIFDEIGIDSSEAFSDIKKICFRNDELCIGTVSSPIISNIVMYNFDEKMIDYCNRNGWIYSRYADDIYISSNYYIPKEVKNFVSAELSDNGFKINTKKTSFISNKYCRKVTGVVLSNDGRVSVGTKQRNAIRKMVYDKIIHKKGSPETILGYIAFLKDIEPQTYNNIIIKYSKYCAGDVIDEISK

SEQ ID NO: 4903 - protein, 303 aa, unidentified
  source 1..303: note = Related to JAFTXX010000014.1; note = Clostridia bacterium
MKMVDKIAADLCLDPDYIASVIKRSRFYYRDYYIDKRDGGRRKISQPSPELKTLQYWVVNNILNKFPISNSAHAYQKGSSIKRHAQFHQNSKHIFHTDICKFFPSITYEHLQPILLSNPKLFEDLEIDLDSVETIRDICFRENSLCIGTVSSPIISNIIMYQFDVIMLGYCKKNHLKYSRYADDIYLSSNSYIDLAHVSFVSDTLRKFGFSINESKTYFSSPKYRRKVTGLVIGTDSSVTIGSEKRAFIKKLVYDKLVHNKGDGNSILGYLAFLKDIEPQTYNNIIAKYSQYCKEDIIEALKK

SEQ ID NO: 4904 - protein, 320 aa, Clostridium sp.
  source 1..320: note = Related to FMGM01000006.1
MSSLITRISSNLQLKDDYISSIIRRSNYYYKDYYIPKRNGGRRKISQASPELKTLQYWVKTNILSLLPISKAAFAYNRGNSIKKHATFHKESYFIFHTDIKDFFPSITSEHLVAELAANRGIIEAANLWDDDILDVVSSICFRRNHLCIGTVSSPIICNIVMYAFDEHFTNYCNRRNWKYSRYADDIYISAQEYLPSSLQSEVNEKLHEIGFSSNAYKSWFCSKKCRREITGLILTETGKVSVGLEKRLAIKKMVYERIMHGRGDPDTILGNLAFLKDVEPNSYNSLLIKYAAYCDGDVIDAIKTGPKPHRVITLDLPDI

SEQ ID NO: 4905 - protein, 307 aa, Butyricicoccus sp.
  source 1..307: note = Related to QUIJ01000008.1
MNSIIDRIARDLSLDRDYIASIIRRSSFYYKRFTIPKRNGDPRVIYQASPELKSLQYWVREKILKFLPVSNAAFAYQAGNSIKKHADFHKEARFIFHTDIKNYFPSIHEKMFTDILIAHQDKLQAQGMWFDDMCDVIAKICFYRGRLSIGTVSSPMISNIVAYRFDELIIAYCRERGYRYSRYADDIYISSNRYISQSTKKFVEVSLYECNFKMNISKTWFRSKKSRRKVTGLIITDTGRVSVGLETRKKIKNMIYNRLVNGNGSPESILGYLAYLKDVEPPTYNKYIIKYSTYCDGDVISAIRRGS

SEQ ID NO: 4906 - protein, 309 aa, Bifidobacterium aemilianum
  source 1..309: note = Related to NZ_PDCG01000001.1
MSKSLVEEISASLRISTERTQEIIINADKLYKIYSIPKHSGGNRLIYQPSSQLKAIQYWTLDNIISLFPVSDRAFAYVKGRSIASNAKAHRQSKYLFHTDIHNFFPSITSSLFDKQCLNRFSSILEETGFSFGDTNSVLHKILFRKDKLTIGAVSSPAISNAVMHDFDQSLTNYCLISGYVYTRYADDIYISSKSLLPKQIKEDIFAEMHKFGFSPNYKKTSFWNGSSHLKVTGVNVLAGSGRLTIGTRNKKMIKGMLYEYLMHGKGDPTKILGYLAYVKEIEPSFYNTLIIKYSEYRNEHIIKYLKDS

SEQ ID NO: 4907 - protein, 310 aa, Aliarcobacter butzleri
  source 1..310: note = Related to JAKKPP010000007.1
MNFLNYLQATGYHNNLLIEVINNLDRYVYKFKFKGKWQIAPKWELKILQKILKEYLTKYYGSIISENATAYIVGKNLSYNVSKHQGNSYFFVTDFKNFFPSIEFEKVKYILKSNLNKETEDSIDLILKIVFYDNKLQYGFPTSPIISNLILIDFDKKIEQYLLNYFKGNNIKYSRYSDDITISAKYKINKNDILSIIENLINSEYTYLKLNLQKTRFFEKYSHSPYITGLVPLNQRISIGKKKFNIIKLNTYLILNNKAIENDNFFRKENQLQSYLNYLYLVDKHNYIKLKNYFSKNYINSDIFNSLFRK

SEQ ID NO: 4908 - protein, 309 aa, Arcobacter sp.
  source 1..309: note = Related to PDKF01000002.1
MSFLEYLEEKGYPNTLLRKIFDKHEDYVYHFRIKGKLQIAPKWELKILQKILKDYITDNYASYISNFATAYIKKENISYNVSKHFGRNYFYVTDFSNFFPSIKLTNIKDYLSSIFKDEDSSSLDIIFNIGFYSDSLQFGFPSSPIISNIVMTKFDNLLFEELKTKFPKNNIAYSRYCDDLTISSKYEISPKIINNIINSLLIKEYTYLSINKRKTRSFEKYSQYPYITGLIPLKDRTTIGKKRFNILKLNIYLSLKNKKIKNTDLFDTDIALSSYLSYVYLVDPHNYNRLKEYFSKRFKPLEIKNLFKK

SEQ ID NO: 4909 - protein, 304 aa, Erysipelothrix sp.
  source 1..304: note = Related to NZ_SCFT01000021.1
MGNKSDIIELISIRTGISSKKIEETISSSKCEYSVVHAKIKKKKRIFYIPSPQLKIIQLHLIKIVLEGFEVSSHAHAYIKNKSIKTNVNCHIGNTFFFQTDIKSFFPSIKANHIKNVLSKDDSISKDDIGLILSAVVPFESLDLGSPTSPIISNIIMLEFDQKIESLIQENYKGAIYTRYSDDITISSKQPILGIDKIVDKTLEEFGFEINKSKTKYTQLIDKVKITGIFLHADKRMTVGTNFKRNLKQQLYLLSNGLDPQIDNIQIMGMLSYIRDIEPEYYLSLVQKYSSSTKSIIDIIKSGM

SEQ ID NO: 4910 - protein, 517 aa, unidentified
  source 1..517: note = Related to MW349128.1; note = Staphylococcus phage Machias
MYRFKEIQGKDNFERLELVNVMDIFYLQHKKPFFKDIVKFDFGYTLVFTDGVNDFVSIDHPSRLWGKNFIPIKNNEEISYIHNDKVKMSLDIFNNNENVIDNLNDLEEKIENYLCSNYYNKISYRTVYNKFTIKEFDNTFTVFKLLSETKSIRNTVKIQNLIKIDKDLINKKDLNLIVDIINNFTNQKTSDAEKNNSYLKNIIKLLLKSFELKYSNKNKFETFYIPKTDGTKREINSPIEEIRPILKSQSKKLNAILEYRISKYNIEDNIIAYRDGKSIKNNADYHKENDTIIKFDVSKFFDNCHFDYWKENLFFILNDNKNLMKRFEKEMEGFLFRKDNKGLYMGSPLSPAASNLIVVPVMRYIKNVISKFKSDIKVSIYSDDITFSSKEINDEFNPSRLKNLVNHAFEIYNLDFKIKEEKSLVMKNRKRKVTGLSINQHNQVTISQRRYRELRTILHLLSNGMEFKDIKGFDNEIELTSLINYYLDVDMTGKISRLINKYEKTFNELKSFESGEK

SEQ ID NO: 4911 - protein, 501 aa, unidentified
  source 1..501: note = Related to MW218148.1; note = Staphylococcus phage vB_StaM_SA1
MFKFNKVNNLKMIGENEIHNDLMLERMMFVMKPVFRRLEKNNKGKLVMLFSDGRKNYLLSTSDKRYYSSPLLSYEGDEYKELESASYIESNIDSLKLLKVKISDILSDNQNIRIRKNLMFTVYEDVDDIKLVQLLTRGDKKIQSAFNIENVISISKDKIKLDDFNLIKDLLNHYIIKGIKDVYISNTIKLLIEALELKYSGKKAFDTFYIPKSDGTKREINSPIEEIRPILKEQSKILNAILKFRIDKYKLDENIIAYREGKSIKDNASLHKENKVIIKFDISKFFDNCHIDYWKENLFFHFKEDEDLMDRLMKEFEGFLFRKDNKGLYMGSPLSPSASNLIMVPVMRYISNILKKFKTDIKVSIYADDLTFSSKVINDEFNAKRLKNMVNHAFKANGLDFKLKEEKSLVMVNNKRKITGLTVNHRDEVTISQKRYRQLRTVIHLLSNGVEFKNIKGFNTELELVSLINYYLDVDTTGKVRRLISRNERAFNELKRKSEVK

SEQ ID NO: 4912 - protein, 500 aa, unidentified
  source 1..500: note = Related to MZ779063.1; note = Staphylococcus phage vB_SauM-UFV_DC4
MFKFNNVERINLIGNRKMNYIELQESLYTLKPKFKKIVKNDKGDFVLIFSDGRKEYIGNTNAGSMFRPKMMVVNSIDDYNLFSGDGQPYRVEISSMSSLNKHLRRIIDQNYTFNIITKKFRIYEEDKIINLIKLKSTTENDKDIFKIEAILKIKKDLISIEELELIKDILNDCLTSQGKYEYILNSLELLIKSIDLKNRNVNTFYTFYIPKSDGTKREINSPIEEIRPILKKQASILNAILDLRIDKYNLDENIIAYRDGKSIKDNADYHKENKTIIKFDISKFFDNCHFDYWKENLFFSFKDEDYVMERFEEYMKDLLFREDNKGLYMGSSLSPAASNLIMVPVMRYINNILSKFKTDIKVTVYADDITFSSNEINDEFNSKRLKSMVNHAFKVNGLKFKLKEEKSLVMKNHKRKITGLSVNHNDEPTISQKRYRQLRTIIHLLSNGVEFKDIKGFETPLQLVSLINYYLDVDTTEKVKRLMDNNEKIFNELKKEAGVN

SEQ ID NO: 4913 - protein, 509 aa, unidentified
  source 1..509: note = Related to MZ422438.1; note = Listeria phage LPJP1
MLSLILIDNVLIDINGEIVSEIDIRMKKNIISDKKVLAKLVKYNIRNKLIQSIKDISYLEENNKFENNEEFNDIHLENIEKIIKTYDLLSNDEICINEGYPDLPVVTYDKTLITEFINNISIKLSYRNLNISHRYIEMNDGYLYIITNTNDIYNKYNIYKITDDKEMIKMIKYLLDISISPDQPNNKPLLLELLLTRILIQNNNEKLYQHFKINQGTKIRDIYAPHNDIKDISRKFNNIFNGMLETQLSNKGVEKHLFAYQKKKGILDNALVHKNNKYIIKMDIASFFDNCRYEDISKYFKLLVLGKENFKKKNNKDSVMDTLFKEIFINPETGGLYQGNPASGSLSNLLMSNVAKYLKNVLIDSGITFSIYADDITFSSNEKSEFFNRKYLKFILNKAFEVYNYSNLSIKDEKTIKMSNNKRRITGIRINHNDQCTLDRKMYRLLKTIFFKLSKNKNNINNISMTFNELKGRISYYRYIDNTNKMENLVNEYQNTLIKLKLINEPKVD

SEQ ID NO: 4914 - protein, 454 aa, unidentified
  source 1..454: note = Related to MZ422438.1; note = Listeria phage LPJP1
MNDLLIISKNPLRILTNKGIFYPYDKDIKIISRFDNSEKKLVQLNNILFKDSYDLLIKIMNYYKTSNSIDFNYSKKYLLENSIELREYSEFFSMYRSFSSTPLVSVSKGYILLYPNSKISNSKYLIYKLKSKYASDIKLLLKRRMSLEIIQLYCIIKDLEDNNIELFKKIKIEKNGKEREVIDPNIKIKNTLKEISKILDKRLDRKISNLKYPNIMAYRKNVSIKDNALMHLNNKYIIKVDISNYFPSIDWKLINSRFILLLFHGVTDKYMDTIKKGFVDENDKMFLGNPVSGVISNIIMVDIINHIQTIFHKYGIICSSYSDDITFSTNIDNNKLFNKKFIIKICNQAFKIYNDKFKINDSKTVYLKGNMRNITGITINHKNQLTLSSEKYDDMRNNLYSYMKTGSCYYDDYELLGKMSYYLHIDETGKFRKLYDKYINIFESIKRGDEKIEE

SEQ ID NO: 4915 - protein, 329 aa, Alkalihalobacillus clausii
  source 1..329: note = Related to NZ_BCXJ01000007.1
MNRANQYNLPLIQDGQKFLSVADDQLIRRFKVKDKGKLRDVNDPIPELKNVLRAWNAVITDHYAKKLKDSDTSQVAHAYLPHKSIQTNARAHLHSPVIQFDFKGFYDSCKFEYFKKELRELDPRLDDQNEHIVKRLLIDPQTGGVTQGLPVSGALAGLSLIPFWVELGKNLPDNIRFTQYSDDLTFSYVGRMPPGFTIPSLTQKIYEALKKTGLDFKLNPDKTRRQKDQYRKVTGIRINHHNQTTPSRNDYRFLRHALYVLSKSDNLDKELTKWGFTSKSAFVGKVSYMRSIDSTNKINRLIMKYRMTCRKHDIFTTWIDQTYKRSAFA

SEQ ID NO: 4916 - protein, 329 aa, Evansella clarkii
  source 1..329: note = Related to NZ_MTIV01000022.1
MNNNNPYSLPLLQDGRQLLHLADDRLIRRFKIKNKGKLRDVNDPVPELKTILKAWNGPLTDYYVRQLQLNGVSHVAHAYLPNRSIQTNAQAHLYSPIIQFDFKGFYDSCKFDYFRESLRDLDPTLDDQNEYVIKRLLIDPNTGGVTQGLPVSGALAGLSLIPFWVELAKSLPDNIRFTQYSDDLTFSYTGQTPPGFTVPALTQKIYEVLKKTDLSFKLNADKTRTQKEQYRKVTGIRINHHNQTTPSRDDYRFLRHALYILSKSDDLDKELAEWGFASKSAFVGKVSYMRSIDSTGKIDRLIMKYRTACRKHDIFTTWIDQAYKRSAFA

SEQ ID NO: 4917 - protein, 381 aa, Prevotella sp.
  source 1..381: note = Related to JAFUWL010000024.1
MIYITVKQPPMYHQMTLEEFLFQTETRPAVINENLTNTRTYEMEYVSQRFMDKFRFNIPALIRKLDAFNDSTAELRVKPRHSLYREFHIPKKSGGLRKIDAPEPELMDALRRLKTIFEEDFHVLYHTSAFAYVKHRSTLDSVKRHQANESKWFAKYDLSNFFGNTTLDFVIKMFSMIFPISEVVKDEHGKEALVTALELAFLDGGLPQGTPISPLITNVMMIPVDHKLANSFRDFNRQRYIYTRYADDFLISSRYDFSFREVEQHIVDVLKSFDAPFTIKSEKTRYGSSSGSNWNLGVMLNKDNQITVGYKKKRQFQAMLASYVMDSKNGILWDKNDIQVMEGYRNYYRMVEGEAIDRIVEHVGEKYGVNIVKMIKSDLRT

SEQ ID NO: 4918 - protein, 366 aa, Ruminococcus sp.
  source 1..366: note = Related to JAFUJH010000080.1
MTLEEFLFEVDTKPQAMINPNLTNTRTYEVERISEKFLERFDVAKLVTKLSQFNASTEELRAKPRHDLYRTFHIPKKSGGLRKIDAPEPELMDALRRLKTIFEEDFKALYHTSAFAYVKHRSTVDAVKRHQANESKWFGKYDLSDFFGSTTIDFAIKMLGMVFPFSEVIKSTVGERELRKAIELAFLDGGLPQGTPISPLITNIMMIPVDYKLANGFRDFNHQRFVYTRYADDFLVSSKYTFSFREVEKFIVDTLKSFGAPFTIKSEKTRYGSSAGSNWNLGVMLNKDNEITVGHKKKRQFQAMLASYIMDKKNGKDWDKSDVQTMEGYRNYYRMIEGDTIDKMVAHIGEKFGVDVVQLIKDDLRA

SEQ ID NO: 4919 - protein, 379 aa, unidentified
  source 1..379: note = Related to JAGCWK010000209.1; note = Lachnospiraceae bacterium
MVYITVKQPPMYRQMTLEEFLFATEAKQEIINPNMTNTRTYEVERVGNKFLEKLDVAELITKLSQFNASTDELRSKPRKSLYREFHIPKKSGGLRKIDAPEPELMDALRRLKTIFEEDFHALYHTSAFAYVKKRSTIDAVKRHQANESKWFGKYDLSNFFGSTTLDFVMKMFSMIYPFSEVVRYDTGREELRKALELSFLDGGLPQGTPISPLITNVMMIPVDYKLANGLREFNHQRFVYTRYADDFLVSSKYTFSFKEIENYIVDTLKSFDAPFTIKPQKTRYGSSAGSNWNLGVMLNKDNEITIGHKKKRQFQAMLASYVMDKQHGTEWDKSDIQTMEGYRNYYRMVEGEAIDKLVEHVGNKFNVNIVQLIKADLRT

SEQ ID NO: 4920 - protein, 379 aa, Ruminococcus sp.
  source 1..379: note = Related to QTXN01000002.1
MYYITVKQPPSYHQMTLEEFLFGGNTQTRLINENLTNTRTYEVENISERFLQLVNVDKLIEKLIWFNERTDYLREKPRRDWYYEFHIPKKSGGLRKIDAPEPELKEALSTLKTIFEVDFQALYHTSAFAYIHKRCIIDLLKRHQANESKWFEKLDLSNFFGSTTMEWVLQMFSMVFPFSEVLKDERGRAEFAKAIELGFLDGGLPQGTPLSPIITNIMMIPVDFEIARTLREYNHQRFVYTRYADDFQISSKYSFSFTEIQNVIVSILKNFKAPFTINSTKTRYGSSAGQNWNLGLMLNKDNEITVGHKKKRQFQAMLSSYVMDRKNGIAWDKSDIQTMEGYRNYYRMVEREKIDGIVKHLSDKFGVDIVKAIKEDLAA

SEQ ID NO: 4921 - protein, 392 aa, unidentified
  source 1..392: note = Related to JAJPXI010000169.1; note = Oscillospiraceae bacterium
MVYQTVERGGFVYYITAKQSPRYHQMTLEEFLFGERESSKHYSLEFDPTGTKTYEVEHISDRFLSTVNVDWLISKLSMFNEQTKDLRQKPRRSLYSEFYIPKKSGGLRRIDAPEPELMTALSVLKTIFEQDFRALYHTSAFAYVKGRGTVDCMKKHQKNDSRWYGKYDLSNFFGSTTPEFVLHMFSMIFPFSEVLKNERGREEFKKAIDLAFLNGGLPQGTPISPLITNVMMIPVDFELTRRLRNFNDQAFVYTRYADDFQVSSKYTFSFRQVENLIAEVLRGFGAPFQIKSSKTRYGSSAGSNWNLGVMINKDNELTVGYKKKKQFRAMLSSYIMDHRNGVLWDRHDIQVMEGHRSYYKMVEGEAIDRIVDHINQKFGVNVVSMIKQDLAM

SEQ ID NO: 4922 - protein, 380 aa, unidentified
  source 1..380: note = Related to JAGHVH010000015.1; note = Oscillospiraceae bacterium
MYYVTVRQSPMYKQMSLEDFLFNTTASTATINANTANTRTYAVQSISGKFLKTVDVDVLVTKLAWFNSITKELHSKDRQDLYHSFCIPKKSGGLRQIDEPNEELMSALRMLKDIFENDFGALYHTSAFAYVRDRCTIDAVKKHQDNESKWFGKYDLSNFFGSTTKEFVMHQLEMIFPFCEVLKREDGRRELETAIDLAFLNGGLPQGTPLSPTLTNIIMIPVDYKLYNTLRNYNNQTFVYTRYADDFIISSRYSFSFKEIENLIKSTLEEFGAGFSINSKKTRYGSSAGSNWNLGVMLNKDNEITIGHKKKKQFQAMVASYIMDSKNGKSWDINDVQRLEGLRNYYHSVEPERIDEIIEHANEKFGVNFRKLIADNLKVA

SEQ ID NO: 4923 - protein, 382 aa, unidentified
  source 1..382: note = Related to JAFZDJ010000019.1; note = Bacteroidales bacterium
MTTYITVKQLPQYRQMTIEELLFGTEPADTCVNDGIGNTRTFVTENYATVDEYMKFIDPAHLIEVLRNFNDKVDCLRQVPRSSLYHSFSIPKRTGGLRRIDAPNEQLMEALRELKTILETEFHALYHTSAFAYVKERSTISAVKRHQMNESKWFAKYDLTNFFGSITLPFTMQILAKIFPFSVILRSRDGKIELEKALELGFLNGGLPQGTPLSPMLTNLIMIPIDHTLANALRDYNGQRFVYTRYADDFQISSRFTFQFREIESLIVRVLHDFNAPFRLKPEKTRYGSANGANWNLGVMLNKDNEITVGHRNKKIFQAMLHNYIHDRANGIFWELNDVQTLEGYRNYYSMVEKDTINKIIEHTDRKFNVNVRRMIAEDLRR

SEQ ID NO: 4924 - protein, 388 aa, Clostridium sp.
  source 1..388: note = Related to HF991826.1
MYEQISIEEFLFNDNITNKVITQNSSNTHTYKLKYINEKLQDLCRVEDLILELDKFNSDYKSLRGISRENLYNTFFIPKHSGGLRRIDAPNAELMNALRRLKAIFEEDFHALYHTSAFAYVKKRSTIDAVKRHQQNGSNWYGKFDLSNFFGSTTIEFVMNMLSMIFPFSEVVKTKHGKDALEHALDLAFLNGGLPQGTPISPLITNVMMIPIDFKLSNTLRSFPCSQPNNLGETENYQRFIYTRYADDFLISSKYEFDIKEIEKFIVDTLSEFDAPFTLNSKKSRYGSRAGRNWNLGIMVNKDNNLTVGYKKKKQFQNMLASYIMDKHNGKEWDKNDVQVMEGYRNYYRMIEGEVIDRMVEHIAKKFGEEIIHRCNGSNLKLVLEDLR

SEQ ID NO: 4925 - protein, 378 aa, unidentified
  source 1..378: note = Related to BK025872.1; note = Siphoviridae sp.
MVYITVRQSPIYHQMTLEEYLFQSYQTPPVVNANIANTRTYEVENVSEHFSSKIGVEALIGKLVRFNNDTAELRAKERSELYETFYIPKKSGGLRRIDAPKAELMDALRRLKTIFEDDFHALYHTAAFAYVKKRSTVDAVKRHQKNSSKWFAKLDLHDFFGSTTLDYAISMFSMVFPFSEIVKEPQGEAALRTAMSLAFLNGGLPQGTPISPLITNVMMIPVDFKLSNTLRNFEKQSFIYTRYADDFIISSKYDFDVRSVEELVVSTLNSFGAPFTINASKTRYGSSAGRNWNLGVMLNKDNEITVGHKKKKQFQSMLYNYITDKNNGVAWERNDVQVMYGLHSYYRMVEKETIDAIVAYINKKMNVDVIRMMKDDLR

SEQ ID NO: 4926 - protein, 378 aa, unidentified
  source 1..378: note = Related to BK047352.1; note = Siphoviridae sp.
MVYITVMQSPIYHQMTLEEFLFQNFQAPTILNTNVSNTRTYAYETVSEHFTSRIDTDALICKLVRFNEQTEALRAQERSTLYETFHIPKKSGGLRRIDAPKPELMNALRNLKTIFEEDFHALYHTSAFAYVKNRCTVDAVKRHQKNNSKWFGKLDLHDFFGSTTLDYVIKMLSMVFPFSEIVKFPNGEAELRKALDLAFLNGGLPQGTPLSPLITNVMMIPVDYKLANAFRDFDKQRFIYTRYADDFIISSKVDFDVHRVEKLVVDTLHEFGAPFTINESKTRYGSSAGRNWNLGVMLNKDNEITVGHKKKRQFQSMLYNYITDKRKGISWPREDVQTMQGLHSYYRMVEPETIDAIVKHTNEKMETDVLRLIKDDLR

SEQ ID NO: 4927 - protein, 405 aa, unidentified
  source 1..405: note = Related to BK027304.1; note = Siphoviridae sp.
MESSHQWALTSIIYVGYNSRLRKGGFTLVYITVKQSPIYHQMTLEEFLFQTFQGPAVINENMTNTRTYEFESASAHFTKSIDVDALAWTLARFNQSTEELREKERISLYNTFYIPKKSGGLRKINAPNPELMNALRRLKTIFEEDFKALYHTSAFAYVKKRCTVNAVERHQQNNSKWFGKLDLHDFFGSTTLDFVMDMFSMIFPFSEVVKTVNGKTELRKALELAFLDGGLPQGTPISPTITNIMMIPVDFKLSNALRNFDNQRYVYTRYADDFIISSRYEFDVHKVEELVVFTLQNFHAPFSINASKTRYGSSAGRNWNLGLMLNKDNEITVGHKKKRQFQSMLYNYITDKKRGIEWSREDVQTMQGLYSYYRMVEEKPIDAIIKHIDDRMGVDVIRMIKKDLR

SEQ ID NO: 4928 - protein, 378 aa, Flavonifractor plautii
  source 1..378: note = Related to NZ_JADPFI010000030.1
MVYITVKQSPMYHQMTLEEFLFKTFENDKLISKNTGNTRTYEFERISDRFMSRIDVNELVGYLAHFNESTAQLREKNRQDLYSTFYIPKKSGGLRRIDAPKPELMDALRRLKTIFEEHFHVLYHTAAFAYVPGRSTIDAVKRHQKNESKWFGKYDLSNFFGSTTLDFVMQQFSMIFPFSEIVKYELGKNELERALELAFLNGGLPQGTPISPLITNVMMIPIDYKLANKFRDFERQSYVYTRYADDFIVSSKYGFNVRTVERVMIETLAEFNAPFTINEAKTRYGSSAGRNWNLGLMLNKDNEITVGKRNKRQFMGMLHNYVMDRKKGIAWDKHDVQTMDGYYNYYRMVEKETIDRIVEYINKETNANVLQYIREDLR

SEQ ID NO: 4929 - protein, 373 aa, unidentified
  source 1..373: note = Related to BK039125.1; note = Siphoviridae sp.
MQSPMYHQMTLEEFLFNTYDAKSPVINQNAGNTRTYEFERVSNRFLSRIDVNELVGHLVRFNESTEELRNVNRQDLYTTFYIPKKSGGLRRIDAPKPELMDALRRLKTIFEEKFHALYHTSAFAYIKERSTLKAIQRHQNNESKWFGKFDLSNFFGSTTIDFVMQQLSMIFPFSEVVKYELGKNELRTALELAFLNGGLPQGTPFSPLITNVMMIPIDYRLANKFRDFGRQSFVYTRYADDFIVSSKYSFDVRMVERAMIDVLTEFNAPFTLNEEKTRYGSSAGRNWNLGIMLNKDNEMTVGHRAKKQFKNMLHSYALDRKKGVMWDRHDIQVMNGYYNYYRMVEKDTIDKIVEYINKETDCDVLRDIHEDLK

SEQ ID NO: 4930 - protein, 388 aa, unidentified
  source 1..388: note = Related to JAFVFT010000122.1; note = Paludibacteraceae bacterium
MVYITVKQGHHERQMSLEELFYEEYNPRRFSPRNTSDTRTDIRSAPSAEMMRYVDVIGLIHKLSEFNTQTKELRECNRQELYNTWFIPKKSGGRRRIDAPKPKLMLALRNLKSILEEDFGALYHTSAFAYIKNRSTLDAIKRHQQNESRWFLKLDLHDFFGSTTPEFVMKMFSMIFPFSEVVKSAYGKTQLETALGLAFLNGGLPQGTPISPTITNIMMIPIDHRLSNSLRGFSTERVNPKTLEPFKEHLLYTRYADDFLISDAYSFDWKKVQEYILNVLKEFDAPFTVNTKKTRYGSNSGRNWNLGVMLNANNEITVGYKRKKEFQRLAYQYITESRGGNKWPLEEVQHLQGLYSYYHMVEPETFDRIVKFMNEKYNADILTMIKRI

SEQ ID NO: 4931 - protein, 381 aa, unidentified
  source 1..381: note = Related to JAFUKZ010000113.1; note = Muribaculaceae bacterium
KEHDMPYITLQQSPIYYQLSLDDILDGAVDVSKMVVPNATNTRTRYKEILSEKFLNKFDFDAMIRVLEQFNEQHENLFNVERKTLYETFYIPKRTCGLREINAPVPELMDALRQLKTIFEVNMFALYHTSAFAYVKGRSTIDSIKRHQHNESKWFGKFDFSNFFGNTTEEFVFSMFSMIFPFSEVVKSQREANALRRALSLCFLNGGLPQGTPISPIITNVMMIPIDHQLCNELRAMDEHYVYTRYADDILISSKVNFDITKVQEFILSVLRKFNAPFSLKKEKTRYGSSAGRNWNLGVMLNKDNEITIGHQKKKTFKAMCCNYVEDKRKGITWDLHDVQVFAGLISYYRMVEREYIDYVIEHCNTKFNTNIELLIKQDLS

SEQ ID NO: 4932 - protein, 377 aa, unidentified
  source 1..377: note = Related to JAFSCV010000034.1; note = Clostridia bacterium
MPYITIQQSPIYYQMSFDDILDGTVDLSRMVVPNVTNTRTHFREFLKPSFLERFDFDLMIAVLEKFNEQHANLFNVERKSLYETFYIPKKSKGLREINAPVPELMDALRQLKTIFETNMFALYHTSAFAYVKGRCTIDCIKRHQQNESKWFAKLDFSDFFGSTTEEFVISMFSQIFPFSEIVKRKDGLEALKKALSLCFLNGGLPQGTPISPTITNIMMIPIDHQLCNELRKMDEHYVYTRYADDILVSSKVGFDCNKLQDYILGVLKKFNAPFCLKKEKTRYGSSAGRNWNLGVMLNKDNEITIGHQKKKTFKAMCCNYICDKKKGVAWDLHDVQVFAGLISYYRMIEKDYINYVIDQNNKKFGVNLEALIKEDLS

SEQ ID NO: 4933 - protein, 379 aa, unidentified
  source 1..379: note = Related to JAFXMP010000165.1; note = Clostridia bacterium
MPYITVRQPPPHQQITFDDLFFSTSVQDHFQPVRRDMSGTITRFVKEPKKELLQRTDINSMISCLEMFNQRHADLLAAERRSLYHTFFIPKHSGGLRKIDEPNENLMNALRELCSIFVNKMGVLYHTSAFAYVPGRSTIDAIKRHQANESRWFLKTDFSNFFGSTTEDFLYRAFSVMFPFSEIVKTKRGSEALKKALSLCFLDGGLPQGTPISPMLTNAMMIPIDHRLFNGLTKQGFVYTRYADDIQISSKYSFDYKEMVAHINGVVKDFGAPFVIKDQKTRYGSSSGRNWNLGLMLNKDNNITVGYQRKKQVKAMTNNFIVDHLNHIPWPKEDVRHFDGILSYCKMVEKEYFEHMIKAFEEKYKVNFKIMMKAALEQP

SEQ ID NO: 4934 - protein, 377 aa, unidentified
  source 1..377: note = Related to JAFTFD010000232.1; note = Lachnospiraceae bacterium
MPYITVRQRTEFRQITFEELILGIAPAPTRKHTSKGGTITRYVRNVDPSIRATVNMNALISSLERFNNLHQNLFDAKRESLYRTFYIPKKTGGLRRIDAPNDELMDALRELKTIFTDQFGALHHTSAFAYVENRSPVDAIKRHQVNGSRWFLKTDFSNFFGSTTEDFLYTMVSMIFPFSEVIKSRVGKEELKKALSLCFLNGGLPQGTPISPMLTNLMMIPFDHKFCNELSKKGFVYTRYADDIQISNEFDFNYHEIVQYISDTLKSQHAPFVIKPQKTRYGSSSGRNWNLGVMLNKEGDITVGHEKKKVFKAMVNNFIVDTLRCVPWSIEDVRHMDGLLSYYKMVEPDYFDHIIKSFNEKYKVDYHTMVRAVLKGK

SEQ ID NO: 4935 - protein, 379 aa, Intestinimonas butyriciproducens
  source 1..379: note = Related to NZ_JADNGR010000005.1
MPYITLMQSPAFHQITFDEIISGVVDIPTMILPNESNTRTYFATRVNQKFLERFDFSEMISDLDKYCERHAGLYDKKRKSLYTTFYLPKKSGGLREINAPVPELMDALRELKTLFETKFFALYHTSAFAYVPHRCAVDAVKKHQSNQSHWFLKTDFSNFFGSTTHDFLMRMLSMIFPFSEIIANEHGKAVLEKALDLCFLDGGLPQGTPISPMLTNLMMIPIDHRLFNCLRDFKGHSYVYTRYADDILISARHHFDYAEIVDFINSTLKEFCAPFKIKDEKTRYGSRAGSNWNLGVMLNKDNEITIGTKNKQRFRAMLCNYTLDRKNGKPWELHDIQVLNGIMNYYKMIEKDYIEGVIKAMNEKFKTDIVSNMREDLGQ

SEQ ID NO: 4936 - protein, 373 aa, Alistipes sp.
  source 1..373: note = Related to JAFXEH010000357.1
MQSPIFHQITFDEIISGNVNLANMVNPNETNTRTYFSKVLNPKFLERFDIDAMVVTLEEFCKQNAKLYEAKRSDLYDKFYIPKKSGGLREINAPQPALMNALRNLKTIFETQMFALYHTSAFAYVPGRSTIDAVKRHQKNESHWFLKTDFSDFFGSTTPKFLMSMLSKVFPFSEIVKSQRGFDALEKALDLCFLNGGLPQGTPISPMLTNLMMIPIDHRINNCLRDFNGNHYVYTRYADDSLFSSRKGFDKDEIIGFINSTLAEFGAPFKIKDEKTRYGSRAGSNWNLGVMLNKDNEITIGYKNKQRLRAMICNYILDRQNGRRWDLHDVQVLRGLVNYYSMVEKEYVDSVIKYNNEKFHTDVMKSMSEDLNQ

SEQ ID NO: 4937 - protein, 381 aa, unidentified
  source 1..381: note = Related to JAGCXD010000256.1; note = Paludibacteraceae bacterium
MYYITTMQHRKPRQLSWEDVIMDKLVMNDYVNDKSNSTATITRKYENIPDEVIKKINVELMVRWLHNFNEESKELFERKRESLYSTFRIPKQSGGFRRIDAPCEELQNQLRKLVTFISDDCGVLYHTSAFAYIKGRSIVDCVRKHQKNESNWFLKTDFSGFFPNTTLDFTMKMLSMIFPLSEICKRKDGYSELEKAISLGFLNGGLPQGTVLSPMLTNMFMIPIDHKLFNELAGRKLVYTRYADDIHISGQEHFPFKEIVTLIENTLAEFNAPWVIKKEKTHYGSRKGKNWNLGLMLNKDNDITIGWKKKQYFKAALCSFILDTKNKKYWDLGDVQHLRGQLSYYMMVEKEYFEKIIIQQNKKWNVNVKEMFKEYLNGTFA

SEQ ID NO: 4938 - protein, 375 aa, unidentified
  source 1..375: note = Related to JAFUNX010000245.1; note = Clostridia bacterium
MPYITVMQSPRFHQITLDEILSGEVQVSDIAPRSVTGTVTHFSERLNDRLTRLAQVDELVAVLETFIQKNESLYEQKRSKLYNTFYIAKRSGGLRKINAPLEELMSALRELKEILETKFSALYHTSAFAYVKCRSTVDAVKKHQTNNSRWFLKTDFSDFFGSTTPEFLMKMLSQIYPFSEVVKLERGRVVLSKALDLCFLDGGLPQGTPISPMLTNLMMIPIDHRIANELRRNNFVYTRYADDIIISHKFDFSFTEKCDFINQVLAEFEAPFKIKPSKTRYGSSSGNNWNLGVMLNKDNKITIGYQKKKTFKAMCYGYITSKQNNQPWDRHDLEVFNGLISYYKMVERDYIAYTIDHYNQKYGVNMMAMIREDLR

SEQ ID NO: 4939 - protein, 382 aa, unidentified
  source 1..382: note = Related to BK054953.1; note = Siphoviridae sp.
MPYVTTFMTRAKKQLTLEDVLFGVKNLSPYINGVDFGTSTRTYEYKKLPQELKEMARVPYLIGKLKSFNRTYQPKFDANNMREHYNSFKIPKKSGGWRQIDAPDDELKQALYSLKAIFENDFKVLYHTAAFAYIKGRSTTDALKVHQRNNSNWYLKTDLSNFFGSTTLEFTMRMLSVIYPFCEVVKYEDGEKALRDAISLCFLDGGLPQGTPISPLLTNVIMIPIDHEISRRLRASETNDFVYTRYADDATVSSKKGFLFMGVIEMMNDVFKKFDAPYTIKKEKTHYGSRAGRNWCLGLMINKDNKITVGHENKKVFKAMLNNYIVARKDGKGWPPEEVMTLRGKLSYYSNVEPEYFDYVISWYNKKYHCDVIKMMADDVAA

SEQ ID NO: 4940 - protein, 390 aa, unidentified
  source 1..390: note = Related to BK046396.1; note = Siphoviridae sp.
MIYVTVRITEPYKQIALEDIMLALFQGENVRERTPRSPYTRTFTYERLPERILAGFDVEKKIGLLRTFNKKHHNLMESDIREHYHKFFIPKKSGGMREINAPDDELMNCLRELKLLLESEFYASSHAAAYAYVKNRSSVDAAKVHQWNKSKWYLKTDISGFFPNTTPEFVWNALSMIYPFCLIMECKSGREELRKALSLCFLDGGLPMGTPISPMLTNLIMIPFDFEFSKFLRSLQNPENNPDKKGRRFAYTRYADDMNISCGIEFDKSFIIRKIENLFRLFGASYIIKDEKTHYGPSYHKNWVLGVMINKDNQITIGYKKKRNFEAMLFNYAKDRESGTYWPLEQLQYALGLMSYYRMVNKESIDGVIIRYSQKFGFDIEAAMKKDLKN

SEQ ID NO: 4941 - protein, 376 aa, unidentified
  source 1..376: note = Related to JAGZNC010000011.1; note = Firmicutes bacterium
MPYVTTPLSPVTRQLTFEEIIMGEVDVSRPVYSNATNTRTVFVKSISNEVAQKARVASLTKQLQEFAENFRGLYEVDRRSLYDTFYIPKKSGGLRRIDAPNDALMAALRVLKTILEGAMPADHHTAAFAYVKGRSAVDAVKRHQRNDSHWFLKIDFSNFFGSTTKEFVVKTMMEIFPFCLLGEDGRTALETALELCFLDGGLPQGTPISPLLTNIVMIPVDHQINKRLAKDEGNSWVYTRYADDMLISAHKSFDPKRVMDLISAALQHVEAPYIFKREKTRYGSRAGSNWNLGVMLNKDNEITIGHKKKERFRAMIHNYMTDRQNGTAWDPHDIQVLCGHIAYYRSIEPSWVCDLLERYSQKFGRNVEDTMKEDIR

SEQ ID NO: 4942 - protein, 464 aa, unidentified
  source 1..464: note = Related to JAFVSI010000063.1; note = Clostridia bacterium
MPYITIPVRQKEYQISFDDILNGINESFFAMMMDDTCDTRTVYRDHTPPRLLEKINIGAMVGMLEKFNNRHREYFDVPKENLYETFYLMKKNKGFSVVVREIFKTHNANSGISYSGKDVYADVFAILKGLLTNHPCAEHNRIEQETLAKCVQYLTPLGFEVNEEKIKSFIKAGFRRIDAPRAEFKSVLTDLKITFENKLFGSYHTSAFAYVKGRSTIDALKRHQRNNSRWFLKLDFSNFFGSTTHEFVLRQLSSIFPYSEIVKSERGREALSKALSLCFLNGVLPQGTPFSPTITNIMMIPIDHAIAKMCREHSPHLCYTRYADDILISSDLSFTWEVDKEGSVQNEILDILRRFNVPFSLNTEKTRYGSSAGRNWNLGLMLNKDNEITIGHEKRKAFKAAVYSFLNDYTHHRVWDVEEVQVLGGQIAYYRNVEKENIDAIILAYNQRFGVDMMQIIKDIISNR

SEQ ID NO: 4943 - protein, 369 aa, unidentified
  source 1..369: note = Related to JAFTOK010000250.1; note = Clostridia bacterium
MRQITIDDILNGIDESKLALQKDTRDTTTWKVDAISRELIEKTDFYAMQVALMEFVEKYKDLIAVEDKSTLYRSFKIPKRSGGLRQIDAPNDELKKALYELKFIFEKKFYMSYHTSAFAYVHGRSTIDSVKRHQQNNSRWFLKTDMRHFFPSTTPEFLMKMLCMTFPFCEFIRYDFGCKELLEKALSLCFLNGGLPQGTPTSPMLTNALMIPVDHAINKMCHEYAPHLCYTRYADDILISSQYNFKWSDVQGRLISILETFGAPFTLHPEKTRYGSSAGRNWNLGVMLNAENKITIGHEKKKVFKAMVFQFMTDDAKGNHWSLDDVQHFLGLISYYRMVEKDCINEILQTYSQKFNKDVEATAKALLKP

SEQ ID NO: 4944 - protein, 410 aa, unidentified
  source 1..410: note = Related to BK028778.1; note = Siphoviridae sp.
MYITYWNPPKTRQITFDEIIAGVQNVEALHYGGSTTSTITVCRNDLTPRLQKITNIPDMIAKLTEFNQKYAGLEACDLAAHYEHFEIPKKSGGWRPIDAPDKELSDALVELREMLRTFMIADYHTNAFAYIPNRSFIDAVRKHQAGHVKTKKNEETGVQTTVTFENHWAVKFDLHGFFPSTTPDFLLGMLSIIYPFALIMKDERGHEQLANALKLCFLHGGLPQGTPISPWLTNVMMIPFDHLITRKLCYGYKAKDGIEREFTYTRYADDMMFSCYHSFDPMEIQQIVIDGLNFIHAPFTLNEAKTHYGNRHSSKNWCLGLMWNKDNQITVGWRNLKMFRSAMKNYIDAKKRGETWELEDLQKFMGKLNYYHMVEPEVIDDLVHRYNEKFGVDVMAMLKDDLRLKDGEAA

SEQ ID NO: 4945 - protein, 410 aa, Faecalibacterium prausnitzii
  source 1..410: note = Related to NMTT01000002.1
MYITYLNPPKTRQITFDEILAGVQNVEALHYGGSNTSTMTVCRNDLTSKLRAITNVPEMIEKLVDYNVKYTALESSDIPSHYSHFEIPKKSGGWRPIDAPDETLSDALIELRELLKSFMIADYHTNAFAYIPNRSFIDAVRKHQAGHNKTVVDEATGMKKVVNYQNHWAVKFDFHGFFPSTTPDFLLGMMSVIYPFALIMRDARGRDELAKAVNLCFLRNGLPQGTPISPWLTNVMMIPFDHCITRKLCYGYKAKDGIDREFTFTRYADDILISCYHHFDPMEIQQIIIDALNFFHAPFTLNETKTHYGNRHSSKNWCLGLMWNKDNQITVGWRNLKMFRSAMTNYINAKQHGRTWELEDLQKFNGKLNYYHMVEPEVIDELIRRYNAKFGTDIIAMLKEDLRPKEGVVA

SEQ ID NO: 4946 - protein, 410 aa, unidentified
  source 1..410: note = Related to BK028800.1; note = Siphoviridae sp.
MYITYWNPPKTRQISFEEILAGVTDISNLSRGGDNTSTMTICRDNLTPRLEQITNIDSMINQLAAFNRKYAELESSNLPSHYYHFEIPKKTGGWRPIDAPDKELSDALSELQRLLKSFMIADYHTNAFAYIPNRSFIDAVRKHQAGHVKTKTDPETGEKKTVCYENNWSVKFDLHGFFPSTTPDFLKGMFSIIYPFALIMKYPRGQAELDKALNLCFLNGGLPQGTPISPWLTNVMMIPFDHLITRKLCYGYKMKDDIEREFTYTRYADDMMFSCYCSFDPMEIQEIVVNALEFIHAQFTLNAEKTHYGSRHSSKNWCLGLMWNKDNQITVGWRNLKNFRCALTNYVEAKSHGRTWELEDLQKFMGKINYYYMVEPDVIEDLIQRYNKRFNVDIIAMLKDDLRPKEGVVA

SEQ ID NO: 4947 - protein, 410 aa, unidentified
  source 1..410: note = Related to BK021062.1; note = Bacteriophage sp.
MYITYWLPQKTRQISFDEIMAGILNVNQLKNIGDKTATVTVCRNDLSDRLFRITNTPEMIAQLYAFNEKYVALEQCDLKTHYRHFSIPKKSGGWRPIDAPDKELSDAQTELRELLNGFMIASYHTAAHAYIQNRSILTAVRKHQAGHIKKKFNPELGYSETIVYENNFAASFDFHGFFPSTNPEFLLHMFSQIYPFALIMRSQNGDEQLRKALSLVFLNGGLPQGTPISPWLTNVMMIPFDHLMSRKLTRGYTMKDGVEREFTYTRYADDIDISCPLSFDPLEIQQIIIDALHFINAPFTLNEKKTHYGNRHSCKNWMLGLMWNQNNEITVGWRNMKYFKAALANYIDAKKHGRSWELEDVQTLNGKISYYKMVEKNVVDYIIATYNEKFKVDIEEMIRADLRPVDGYAA

SEQ ID NO: 4948 - protein, 411 aa, unidentified
  source 1..411: note = Related to BK018054.1; note = Siphoviridae sp.
MYVTYWNPPRTRQITFDEILSGVVDVNQLKYAGDETSTQTVQREGLNDRLVAITNVTSMITQLTEFNQKYARLEAVRDLSTYYYHFEIPKKTGGVRPIDAPTNELSDALVELRTLLKSFMIADYHTAAHAYINGRGTLSAIKKHQAGHRYTVKDRETGKEKIVTYENNWAVKFDFHGFFPSSTPEFIYSMFSKIYPFSLIMKDRNGYNQLTKAMRLCFLNGGLPQGTPISPWITNVMMIPFDYMLNKKLSYKYTMKDGISRTFTYTRYADDITISCYLSFDPMEMQDIIKETLDAINAPFTLNEEKTHYGNRHSSENWMLGLMWNANNDITVGWRNFKDFKKMASNYIVCKKEGKTWDLEDLQQFNGRLNYYRMVEKESVDTVISRYNKKYRVDMMAMLKADLKPKEGVVF

SEQ ID NO: 4949 - protein, 410 aa, unidentified
  source 1..410: note = Related to BK018962.1; note = Siphoviridae sp.
MYITYKAAPKTRQITIDEILAGIIESEKLKYREDVTSTVTACRDELTPRLRAMTDINRMIRELEAFNKKYEQLESEPDMSVHYTHYEIPKKTGGMRPIDAPDKILSDALNELQTLLKSFMLADYHTAAHAYVPHRSTLTAVKKHQEGHVRTKTNPTTGKKEQVIYENNWSVKFDFHGFFPSSNPEFVMGMLSVIYPFALIMQDPFGGHEALSDALKIAFLRNGLPQGSPLSPWLTNVMMIPFDHLLSRKIRHGFKMKDGIARDFTYTRYADDITISCYLSFDYMEMQDVIKNILAYIHAPFTLNEEKTHYGNRHSSKNWVLGLMWNQDNEITVGWRNIKTFKIMMSNYIRCKKENATWTIEDVQELNGLISYYKMVEKDKIEALISKANNKYHVDVMAMIKDDLRPKDAA

SEQ ID NO: 4950 - protein, 444 aa, unidentified
  source 1..444: note = Related to BK018504.1; note = Siphoviridae sp.
MLAQKLIKTSPEAHQSNERPIGNRRLELLRQPTSLSEHKHNPHIRSTHMVYITYNCPERFREMTFEELLRGDFNLANLSTGGHGATRTVICNKVPPRIMRITKVEQMIFQLQAFNQQYESLRLTTPRSSLYNHFSIPKASGGLRWIDAPNPDLMKALKELKTLFQSWMFADHHTCAFAYVEDRSVLSAAKRHQKFNAWWFAHFDFHGFFPSTTPEFVLSQFELIYPFNLILASPIGHAELFKALDLCFLNGALPQGTPISPLITNIMMIPFDHAFAKAVNHFESGKHNPDGTPITDRLCYTRYADDIEVSCKVIFNYHAVERLIVQLLSQMNAPFTLNETKTQFHSRAGRNWILGVMLNKDNQITVGYRKNKIFKATIDTYFRDKQKGKKWPDEDLQSFQGNITWFKDVQPDTTKYIIQKYNAKYGLDLESCIKADLAPPSVTA

SEQ ID NO: 4951 - protein, 396 aa, unidentified
  source 1..396: note = Related to BK037618.1; note = Siphoviridae sp.
MVYITYNTPETVRQITFEELMLGVDIPLDSLRSGGHGSTRTVVCSKVPERIMKITYLDAMISQLKMFNTCYKDLIDYPNKWELYDHFEIPKKTGGKMRPIDAPHPELKKALAQLKDMMSGWMFADHHTCAFAYVNGRSTKDAVIKHQRFRSWYFCHFDFHGFFPSTTLHFVLKQMEEIYPFNLILADPIGRRELRRALSLAFLNNGLPQGTPFSPFITNVMMIPFDHKFARLLNQFQSGKCNPDGTPITDRICYTRYADDIHISCRVFFNYRKVERELIAMLHELGAPFTLNTEKTHFGTRAGRNWMLGLMLNKDGDITVGYRNHKILKSTIETYFKDRRNGKKWDEEDLQKFRGNISYYLSVEPATIAGVIQKYNAKYGADLLTCISNDLKPKAA

SEQ ID NO: 4952 - protein, 384 aa, unidentified
  source 1..384: note = Related to BK023886.1; note = Siphoviridae sp.
MPYIVVKAPPRYRQVSVDEFLFEDEARTSYVALCETETITRFRDHIPGNVRDAYNIPLAIRALQSFNETHSELFEPDRTALYHTFYIPKRSGGGVRRIDQPLPELMNALYELRRIFESMFHADMLYHTTAHAYIHKRSTVTLVRKHQQNASKWFAHYDFHNFFGSVTPEFLSKMFSMIYPFSAVMQSAGGKAALEKALSLCFLNGGLPQGTPISPMLTNILMIPFDHKFSNHLEAFGERNYVYTRYADDISISSRSPFDYKKVEAEIAASLKTMEASLELNRKKTSYGNNTGSNWMFGMMLNSKNNITVGWKNVKAFRSTLNTYLYERSQGRFWPLEQVRSLSGTISYYKMIDEQWLNSILDIYNQKYKTSVRYCLKQDQKRKQ

SEQ ID NO: 4953 - protein, 381 aa, unidentified
  source 1..381: note = Related to BK050993.1; note = Siphoviridae sp.
MCYYVCLPKTESKPNIWSWLEGDIHSPQWLWGTKSAAATVTRRVDFISASVKDKYNVNFIIGTLDAFNKKWSYLGQEIEKHYSHFYIPKKKLDEYGRVKWREICAPDDELSEALKDLKEIFEAAGVSLHHTNAYAYVRHRTASDAVSKHQYNHSRWWITTDFQNFFGNTTKDFLMSMMAQIFPFSAVIERDFGKECLSRALDLCFLNGGLPQGTPISPMLTNIMMIPFDYIMTKKCREKDYIYTRYSDDIQVSHRRKFNPDEVLRFIHETLTQIHAPFTIEKEKTKFKSGNQFVLGVMYNQNCDITVGHKNKKEFKATLFNYMCDRLSGKVWALPQLQQMMGKYAYYSMIEKEYFENVMKEYSRKFKQDVMKCIKADLRRC

SEQ ID NO: 4954 - protein, 398 aa, unidentified
  source 1..398: note = Related to BK019042.1; note = Siphoviridae sp.
MPYVTLQMNPVYTQLSLEDILDGDLDPKRFMPVRNAPSSTRTVYRTQLRQDFINRFNVPGMIRILKEFTTKYAALYDRNRKDLYYHFEIPKNTIDPATGRYGMRPIDAPEPELKLAQYELKSILENQCGASYHTNAFAYIHNRCAVDAIRRHQANHSKWFLKTDFHNFFGSTTPEFLKYMLSMIFPFSEIYQDPEGEAALDKALDLCFLNGGLPQGTPISPMLTNLFMIPIDHRLANVLRDHDGVHYIYTRYADDMQISSKVKFNYGNIVQYINQTLAEFHAPFRLKDSKTRFGSANGHNFNLGVILNENNDITIGYKRKMAFRSQLYDYIQHHLRHDPIPMHDLQVMAGLLSYYTSIEPDYWRQTIERINSKNHVDLNKIILADLGTAARGGEDVPF

SEQ ID NO: 4955 - protein, 410 aa, Butyricicoccus sp.
  source 1..410: note = Related to RAYA01000099.1
MQFTSLARPSLQWTAHIKVTEKKGFVMYITYKVPPRYRQMTFEEMLSNETNLSEFKYSSNSMTRTIVRKVLPSKLVDFTDIPRLIKQFEDFCEKHKALYEVPRASLYDTWRTPKKKKGPHGETKYRTICRPNSQELRDAHTELQRILEDSMIASYHTRAYAYIKNRRTKDAIQVHQKWKSKWFSDFDFTDFFGSTTLEFLSQMIFMSYPFCLIPEEHRETVRKALDLCFLNGGLPQGTTISPMLTNLMMIPFDHMVSNELHKHDGDRFVYTRYADDIRISCRVQFDVKQMESYLIKKLRQFDAPFTINPEKTGYGSINGKNFCLGYMLNKDNQITIGHERKKRCKAMVNNYILDRMSGQPWSLHEVQVLNGQLNYWRYDNEDGTYAVMINFYKRKYGCDVEKWIKADLSA

SEQ ID NO: 4956 - protein, 444 aa, unidentified
  source 1..444: note = Related to BK053663.1; note = Siphoviridae sp.
MVIRVLAIYDLSQPNKAFIPVISPSHRIQNPTQITETTHRKEYMMIYITYSQPARYHQLTFEEMMAGITVNDIAELRTGTVSGTRTVCLKRVPKKFRDAANIPELRARLQMFTDTYNTMISNPNRQSYYYKFFIPKKSGGLREINAPLPDLRAALVQLHTILSGAMLADHHTAAFAYVTGRSTLDAVKQHQKWESMWFVKFDLHDFFGSTTLDFLMSTFSKIYPFCILCEDKSGEDLLRKALSLCMLNGGLPQGTPISPFLTNVMMIPFDHRMFNTMRNFRLSENRTDRFVYTRYADDMCISCRAGFRYKTVEDYIVSTLKWMNAPFELNREKTHYGSRCGRNWILGVMLNKNNEISVGEREKKYFESMLTSYYMSHGRGTYRGHFDKALTKPWPMEDVRRLHGLYSYYKMVEPARIAEIIEEYNKKFGMNFEALLKMDEQLIA

SEQ ID NO: 4957 - protein, 389 aa, unidentified
  source 1..389: note = Related to BK018887.1; note = Siphoviridae sp.
MENKIMITIPQPERFRAPTFDDYLRGLNSFDQLKTYDATGCVTRMVNVEAVRGKFDLSAFKLVLNNFLTATEKLRADDIHTHYHSFKIPKKSGGLRQINAPDDELKFALQMLVNILSNVMPRTYHTNAYAYVTGRCTYDAVAKHQRWESNWFGHFDFRKFFDSTTKEFLMSQMAKQYPFALIKEDVETWTKLSQALDLCFLDGGLPQGTPASPLLTNIMMIPFDYEVTQDIKSMPNRKCPNGTDRFIYTRYADDIHISCRVEFDIKEQERYLIKKLREQNAPFTINAEKTHYGNRSGQNWMLGYVLNASNAISIGHQNKKHIKAMIHTYAMDKRNQIMWDKDDLMTMLGKIQYWRFSEKELVDYTLERLSQKYGFDVLEEIKTDMGNAA

SEQ ID NO: 4958 - protein, 384 aa, Anaerotruncus colihominis
  source 1..384: note = Related to NFKQ01000002.1
MPYITLRALPNYHQVSFEELLTNSIDLKQFFYNKTPSNTRTHYVQNVNKKLITSINFDDMKKSLYHFIDLNQQFFNGTISSLSTMYDTFYIPKSSGGLRRIDAPNDELMRTLKDLKRLFEDKLLAIHHTCAYAYIPGRCPLDAIKRHQSNESKWFGKFDFNNFFGSTTQEFLESQLKQIFPFSELLNDAQISGLFHQVLSLCFLNNCLPQGTPMSPMLTNIMMIPIDFHISKWLRSLDKHTFVYTRYADDMQISSRSPFNIGKVQNLILDVLNSFHAPFRLNDEKTRYGSTSGSNWNLGLMLNSQNEITIGYKRKKQLKIMLNNFLYDYSNGKFWDASEVRHLQGQLQYYLSIEPDYISYLVDRYSQIHNVKIYDTFSKILKSN

SEQ ID NO: 4959 - protein, 388 aa, Thermoclostridium sp.
  source 1..388: note = Related to JAGOJH010000182.1
MLFTFYKKEAETNVNFTDLLDQFYKGTMPLYHPEEIKSYKKTITVTLPAPITDEAANEKYHVDKMVEALKEFEVAIDLLNNIPRKDLYRFFTIPKRSGGLRQIATPCPELMATLRDLKNVFEYKIKCLPHNAAFAYIKERNCKHALEVHQRNKSRWFLKLDIHDFFGSVTVHNMMTEFGKIFPLQTIMERVPELFVKILDICTLPNEQGQCVLPQGTPMSPLLTNLYMIGFDHTIQNTLRDYNHQQFVYTRYADDLLISSQYDFDYKELTAYIASVLQLYHLQLNPDKTRYGSNAGRNWNLGMMLNKDNQITIGHQQKERLKAMLHNFLRDFTLGKPWSIIDTQVLVGQVSYYRNIEPTYVRELIKKYDEKLNTDFKQCVKKILRPKT

SEQ ID NO: 4960 - protein, 397 aa, unidentified
  source 1..397: note = Related to RZYM01000024.1; note = Bacteroidia bacterium
MLYTYKIKYVEERHNVENLLDVLYGDAPAQTETVRSKTNKVYNDFSYDRFKTTETTPERFILTSPHVNSDEQTLRQIYNLTAEIESFLNNNPSPATMYHNFKIPKRTGGFREINAPNETLMKFMRDIQPWFTYKLNALPHDSAYAYVYKRDCNKAIQRHQAIKSNWFLKLDIKKFFDNCDPAFLRQQLKMIYPFGIMRDQDYHRFMDALILLITLNNGLPQGTPLSPVITNLIMVPIDRDINKKLGTYFKDKQQSFMYTRYADDMLISSNKEMNVQEVVGIIDTILHTYTNKLQINPDKTRYGSKAGSNWNLGIMYNKDNKLTVGYRRKKKIKTMLFQFYSCYNEGTRDKEYAQAILGELAYLHNIEPEYTRELVRFMDDKYSTDFYTILHKTVKEN

SEQ ID NO: 4961 - protein, 354 aa, Bacillus cereus
  source 1..354: note = Related to NZ_JAEHBI010000004.1
MYYTHNTKNQNDSKYQRFSTTKLKSEEITIEQYREFEAINKQILGLTKKIKDWLTNNQSAIKYSIFNLPKMTGGFRTIKAPEEKLKSFMREIKFDLESIGIVPHDSAYAYIPNRDCLKAIQCHQRNKSNWFLKMDLEKFFNNCSEQVIAIQLKKLYPFSLMTETDYTSFISSLCGLACHENELPQGTPLSPILTNWLMISIDTQINNALAERSEESFIYTRYADDLLVSSKQPFRHEEIVELVKGVLEQEGTPFTIKDTKTRYGSRSGKNWNLGIMYNKDHNLTVGHKRKRRIKTMLFQFYRGQRDRGYALELNGELAYLKNIEPDYHDYLIGFMNSKYRFNFKKAINIAIKQN

SEQ ID NO: 4962 - protein, 382 aa, unidentified
  source 1..382: note = Related to JAFPMR010000005.1; note = Bacilli bacterium
MYITSIKKNTGPGNSKAQLNLIDSLFGEYQEPDIIIDAGRFIRTRTTSASTNALMDLNNYDNNVRYLYRKISNFLYGHEIPSMYYEFKIPKKSGGLRTIDAPNDELKTFMSEITHEFGNKFKLLTHDSAFAYVKNRCVVDAVKEHNNNGSRWFLKIDLHNFFGSCTKDFIVQQLKQIYPFAKHEAETPTKDLLNALADLATLNNGLPQGTPLSPMLTNWIMIPYDYRINLLLNTLVKQEKLLKQRYIYTRYADDIIISAKEKFDKDIIVKEIKKLFEHSPLEINETKTRFGSNAGRNWNLGVMLNKDNNITVGHKRKRYIKDNIYYFIKFKETWDKEQCRWLLGNLSWLQNVEPEYCIGLLNYYKNKYSFDVLRELHLVLKR

SEQ ID NO: 4963 - protein, 365 aa, Pseudobutyrivibrio sp.
  source 1..365: note = Related to JAGCTX010000238.1
MYLTFYTNAAPKQLTWADILNNPYITRQTSDITKKKVTKEIPDDYAEILWAKRRVMYNPNLIPTDVTAIDTSEHYRHFQIPKKSNPTKMRQIDAPDDFLGNIQTMYKNQIENELQVLSHKAAHAYVAKCSTVTAMQTHQRNDSKWYLQIDLKDFFNSITGEWLKTQLLQVFPFPLIEERELDKIIHVSLLNGTLPQGSHLSPLLTNLAMVPIDYVLTEKLHNLNGHHYVYTRYADDITISCKEKFNEHMILGLIKHIFREFNVPFRVNNDKTKFGSIAGRNYHLGIIVNKDNQLSVGHEKNQKFRAMIFNFCTIGDEWELHDVQKMLGLISYYKAIEPDFVNKVINKYNEKFNIDIMSKAKAMLT

SEQ ID NO: 4964 - protein, 394 aa, unidentified
  source 1..394: note = Related to BK022447.1; note = Siphoviridae sp.
MRHLNSSDLQRLPVITVMEETKMYYTIHREKINYPEVTLRKILLNKPIPEKTKLREYTTVEIPDTTNFTLTEDAIRFRDYILNSWESLSKSSIQLYSSFKIPKKSGGLREIDAPVQGLKTIQSTLAYWLQDELRILPHDAAYAYVKGRSHIESLKKHQNMQAKWFLKIDFSNFFPAHNKEYILNMLEQVYPIGALIKNDRAVISKMLDICLLNDKLPQGTPVSPALTNICMVPIDYAITNLCVTLGKKYNTFFTYTRYADDIIISAGKSFKWTGVIKEIENILNNFNAPFKINNKKTRYGSNTGRNWNVGLMLNKDNRITLGHKNNKILNAKINRFCYENIVEKKTWTVPEIQELQGNIAYAKAVDPDYTNYILHKYTVKYKTNVEQCMKNMLY

SEQ ID NO: 4965 - protein, 384 aa, unidentified
  source 1..384: note = Related to JAFQSJ010000047.1; note = Clostridia bacterium
MYISYINKKNNQIETRDTSGPTEKNIQELGKRLQCFYYLYEEALKILQNGDVSSRYRTEDRLKKNKTRRRIDVPDEELMKYQKKVVDIFNNHLALVFPQSVYGYVKGRSPKAMAEVHRNQYQVIKMDIKDFFPNCTLDFIMKSMSTVYPFCLLDSELIETIIKPCMIFYDGQYRLPQGAPTSPILSNIAMIPVDYELESGALNGRGYNYTYTRFADDIIISHGEFDFSSSISAEERILSLIFGIEYEEPPKSLEEKYSEIKKITCNVINTIKDCLHNQNPNFKINSEKTKVLNTECGNVWMLGVTVGQDVKIGNQRKQGLKATLWTFLNDCKNGKPWSQKDTRHMLGILGYAKYIEPNFVNELIAKYEQKTGTSFRKEVKKILC

SEQ ID NO: 4966 - protein, 376 aa, unidentified
  source 1..376: note = Related to JAFQSS010000025.1; note = Clostridia bacterium
MYITYIDQDKMQKVTCSTNIITERNIAYAERENGSLISLAEEARELLKKGVNSKYTTYYKKKSNGQKRQINVPDDELKAFMRKVVKTFTAMSGFMWPDNMYAYIEGRGIKQHAELHKNAAVIIRMDIKSFFDNCTFKFVTESMKEVYPFCLMDWNLLEPIVKACMLKGRLAQGAPTSAILSNIAMIPFVTHANNWTKAKTITLGLAPRGKYFKMTKGTRRKATSIVAKRIIFSMYADDIIISTNIKAPFGENAWKTIRIIQKLLNWYTPLQVNPRKTKYVDIRRKGGAWVTGLMVNKEHNVTVGREKKEKLKATIFSFLADCKNGKPWDEHRVRQMMGTVSYIRHIEPEFVDMIIQKYNQKLNIDYHEQIKNIIYS

SEQ ID NO: 4967 - protein, 386 aa, Desulfovibrio piger
  source 1..386: note = Related to NZ_JABAFY010000049.1
MRENVVEITRTHITGGAANPVSHIENWYDLAAVLGLKTGTLSYALRERDKLQTKIRLGDRTVYKSGRALKVIQSRLTTLVEPLFDALPGNECALAYRTGVSATDRIREIPHARMLVTFDIRKYYDNVTLRHIEECLRGCGFRTLGARLVGRYCVVRREGRCTLQQGSPVSPAISNIVGHFYFDTPIRAWLGSEFPDVRATYVRYCDNIALFLHDGVPEGFTDKFKSFVRETFRSGGFRTHKWNCITDSNPVKNQKFLGVVLNAEARVELVVVDRLRAILFNWCLFGGQCTADRFMSEEGIQLRDFMFDGMKVGKLRQIMRGHINYVKRINSKHGLWLDKLLGAALYLDEKGMPACANEEMFRRVKKYKDCNESYDDFMAGITSITG

SEQ ID NO: 4968 - protein, 382 aa, unidentified
  source 1..382: note = Related to BK057640.1; note = Siphoviridae sp.
MQILRTYVEDQRTNSVRHIRDWYGLAAVLGLKTNILAYALKERDKLQTRIKLGDRTVYKSGRALKVIQSRLTTLVEPLFDALPGNECALAYRKGVSATKYIRESIPHARLLVTFDIKKYYDNVTLKHIEECLTKCGFQVLGARLVGRYCVVRKGNRSTLQQGSPVSPAISNIVGYFHFDVPIRSWLTSEYPDIEATYVRYCDNIALFVHSDVPDGFTEKFKSFVKRALGDGGFRTHKWNCITDSNPVKNQKFLGIVLNSQARMELCIVDRLRAILFNWCRFGGFAAAERFMAEEGIQLREFCIDGMKLAKFRQVMRGHINYVKSINEKHGLWLDKLFEAATYLDARDLCACNNAELFRSIKKYKNGNEPLDEFMRGVEASAG

SEQ ID NO: 4969 - protein, 430 aa, unidentified
  source 1..430: note = Related to JAJBAW010000005.1; note = Candidatus Cloacimonetes bacterium
MKCQKYTEEVFDSPLSLVHGWDELGALLKIKTKYLSWVGGKDKNGSLRRNHMQHLVKVKGRDTYKSDTTLARIQTALNIPFDQIQDSFPHEHLLAYRKGVNYKKELQKYLGRKYMVHCDIKGYFDNISMRKIVKTLCALGAMSEAGAKLIARYCIVRRRQSDRWVHTLQQGSPCSALLSNLVGYALYDRDILAWVARKQKEYPRASLEYVRYCDNLVLFVDGDAPLELIKEYRQYVHVVMSRRGFQTHKWSVTPKNHPFRNQRFLGVVLNVKARVDLERFQRIRAALFNACRTSVTEAANTYFSLYPFRAAEFPTENVGEDRAVFAITQHARDEQFLSIMRGHVAYIDSVSKEQGSLLKKLFQACVFLRENPQGVSQRLAEPVFLALKTYNRKVESVEVFLERLSSACSRTRNSSESLTQENTGHWESVL

SEQ ID NO: 4970 - protein, 384 aa, Desulfovibrio sp.
  source 1..384: note = Related to NFJC01000017.1
MKLRSTEASQMMKLIDNFSELGSLLHIKNNHMAYARKFRDDLRRKIKVGKRTVYASKSPLSVIQRRLGMVFNIMMDDLPYNEVAIAYRPGVNVAEKLAVCQGSAIMIKTDIRHYYDNISYAHIEKALMDCGMIARGARLIASYCTIWNGRFSSLQQGSACSPALANIVGNRYFDRPIVRWLRDHCPVEHTYYRYSDNLVLFCKEEPGNDFINEYKEFVKTTAARGEFRTHSWSSIRNNHPTRHQEFLGIVLNEVANISRVKRDRIRAILWNAVVGNTAEEAKKYFADTGELPRGIADEEEVYTTKFMMAMQGYVAYARMIQDKFANRIAKLLIAVRIKDGYFNEDGMIFKYGLDNKHIECAKLYKDDSVGIEEFRRRFLDCLSS

SEQ ID NO: 4971 - protein, 325 aa, unidentified
  source 1..325: note = Related to JABCOO020000008.1; note = Candidatus Saccharibacteria bacterium
MMLYDLIGVSKNDFDNFIENINSVVIKEGTHWKHVNPSSHNSVSIKFDKYFEDQFKNVISASSPKQGAFCGKSIIQLLAPHSSKKYVLTLDIKNFFGSINFHKVQECTKDHSSLQLYSDIIHIFYFGGDDQLRRGLKGSAAIAEVVGLKIDHLIRKIIYSNKEYSNKDLVYSRYYDDIIISGDSFGALRSVASVLAKSIYKELGLLLNPKKTRLRILHGSKILGLRFHDRDITVPQSLKHKLRAIMYEYSSANYDESDYESVRDAKRHVGQIIGTLRYIINFTSANVSRYEDWLADFYEELDRLEEIRKDLAQYYDDEKGIYFDM

SEQ ID NO: 4972 - protein, 357 aa, unidentified
  source 1..357: note = Related to JAGOTC010000067.1; note = Candidatus Gracilibacteria bacterium
MLDKRRLAVNTKDFSILKGILPGVIDTLIHYPEGAYKRIEIPKKSGGMRIIHAPLGEAIMQMNADNTSTSLLGWIQKRINHVLGFILLPSSVCAFRPGIDPYSFLRTTLDGISNCRSSQVGGIYKIDIQDFFNSVSEDQVKMVWEKSLPKLSGNFYSKDIINILTLLSCYEGKLNQGPPSSPIIANIVGYLCIDSNLRGLQQTRNIGSNRTPKSLWIRYLRYADDIMILSFDGAIPSDIPDTINETIKNSGFHIAKKKTLLLNDSHSYPLLGISLLRDTSPVGFQFQIGTARDRDLASELLGYQGEGIKSIAGKLGFNKRISLLGRSGVEVEHFPGRYSKRVAHALSMKSDLLLCSQ

SEQ ID NO: 4973 - protein, 322 aa, unidentified
  source 1..322: note = Related to JADJEI010000006.1; note = Ignavibacteriales bacterium
MPSKVLQHIPLKLNLHEIKYLTTPLKTTESRLLKIISIKSKIVKEKKIPKKNSDEFRILNYPVGEFKLILKRLHKFLMSRSKFPKSVCGGIVDKNLYDMVKSHCGREGIYQIDLKDFFPNINSDRVYSFFKNSGRSERISQILTDLVIYDKRLPQGFPTSPIVANLIAWKMDYDLQSICNNHKLNYSRWIDDVLISGRISELNKAIYKIDKSILKNGFYINNKKKRLLKRKNSKEIVSVGLDLKRHKPDVPIKVYEKLEYILQVLITEGVEFARDFFEEEFKLKDIQKSLIGKIRFIEEYNKAKGNFLSNLYIQINWGKGIG

SEQ ID NO: 4974 - protein, 418 aa, Brevibacterium aurantiacum
  source 1..418: note = Related to QPGD01000013.1
MQFLKKLKLALDRLILGRSTPGRMLEHVFDRNLSILDKVLESILLKDGLEHSEFRGRLTRWRKSYIGKSWGLWTDFSDSANICEFLGDSSIAESDIVSIFADPDMHYRRFWLPSRRSDNTRSKGRVRKRRLIHAPDDSLLSIHRLLLREVLDSFDLVISDAAHSYRPRRSPRTCMFPHKSSGWMICMDFRNFFGTITEDKVLRALVDRLGCPSSTAACYSRLFTVNCEDKGIRVLPQGAPTSGFISNVCLIGFDQRLRAMLSSVDSNIVYTRYADDIVISGPGMLSKSVKSRVIALVSQAANGKGFVINNSKTRVYSGASVMRALGIDIRGGELFPRKSIIDYIEKQVRLIKTRSLTEVSNGWGGLVDGQDNTLKYLDHLWGLIIYASGINRRYAQGVIAELENVETPLSGRLGLIDS

SEQ ID NO: 4975 - protein, 376 aa, Corynebacterium sp.
  source 1..376: note = Related to NZ_KV797734.1
TPLRTPKPEEPNKGVLPIYGVAHLSWMLDVSPSSLSTLLGSERAVRSDLRRRGSRPRAIYIPDSEYLAILRKINQLVFLPADERLDLAAFGFRPGCSPSDCMDKHKHGKWMLKLDIHEFFSSISFFDVKRTFIRVGHSETVSETLAEICTINENGRRVLPTGFPTSPYISNWVLASFDKRMRAWCAENKIYYTRYVDDLFFSGTEAAPNNIIGSIQGLVDYRLGLHGLTLNLKKTRFYRGDSVFKGLGVELHPSRDELVGAGRYMLPSRRMRAHIENQTRCIKKFGVETASRHWCERSGIDRGLGIPEYRYVQHLAGALSYIKNINKAYGNDLENELQIALGESVSSYLLGHQSIFPNSVYSSSYDVPSARKFGSN

SEQ ID NO: 4976 - protein, 325 aa, unidentified
  source 1..325: note = Related to JAFWLI010000028.1; note = Eggerthellaceae bacterium
MFKFDGVPPISYQEYHIPKKSKGVRIIEEPNAQLKAVQKRILPYLYDCTRVGLLPVSHLAHGFIPYRGCMTAVPKHSLNSPVLIGADVHDFFFNFPAEPVENNLWFAMDSSRVDYIMTCALWKGNYPKEHFPQGSPISPYLTNIGMVDVDRMIAAFCKKNGLFFTRYADDMLFSIIDGAEDSPQVRKMMREDEPFSSLFHGVEVILQDHLGLELSAKKSHVMWRHSTCKTQALGITFRQDNKGYNANKRKRRNTRAQLYNLFRKVQAQGGHFQDEDWQEWRSVNGSMNYCNLVRSLSKFPEVAGIDPVFQLSYYNEIERWANAAV

SEQ ID NO: 4977 - protein, 529 aa, unidentified
  source 1..529: note = Related to JAFXGU010000070.1; note = Lachnospiraceae bacterium
MTDNFDYKNPHNITTGRLLYSDELPFFDMISFCMFLGTTPTQLQRILGNIDSMYSRFYIDKDTGRVTSKHAGLRLREINAPLEPLKTWQLRLLDVLNLFPKHEANTAFMEGCSVINAAKTATKGDVLVHVDIKDFFPSHTALYIKRKLSALVFKTFRMYLPEEVLVAITKLICYRMQLPQGSPCSPMATIVLNYDLDTRIDAVAKKYNLEFKRYADDMWFTGVQSDDVIQEFLYELQDAIHPFSLNYKKTNIMRTRAYPKFNGVRIKFTKSYVPSTQAAKIINMVVAALGFTKHKANISKNQVLIEGYPTPQLALDDVRSLMDSVAATIMAKYPNLVFTCKPNWYYIQSTKKCLGLNIVGENVVYPRKRYNDLRLEAMLMGRQRALFALYFAIVAKHKANPRLLPPIKTAPFVFASKGSVGHENFRNLLTNPFNRRVFMGKVAYLRSINPEKADKIMAIEKASYQKCIDGYLLWYPTVNVDYYPDVQWLSSLRDIPNSEACVDIFIGSSISNEELSSILGEAGIGCWAL

SEQ ID NO: 4978 - protein, 567 aa, unidentified
  source 1..567: note = Related to BK016974.1; note = Siphoviridae sp.
MIELMKNYSFKTTLKNLVKGFVAAETAAPKLFTKSLDDWPFFDIATLCAYLGITPLELQALCNCQPTLLYHRFYIDKATNRIVPFNKTANLRMIEAPRPELKEYLMKLIPFFEKFPIHKCNYAFIRGKKIKDAVESVKEGEVLIHTDLKDFFTEHTPLYIKSKLEMLMLQNVPEMYDPEFCKVLTRLITVYTHLPQGSPCSPILTAIVNYDMDSTIQSLADEYNLTYMRYADDICFSGAIANDDIRVFLDKLVDAVHPFRLNRKKVAIMRDAAYPVFSGLKLYIENDRQYIPSSLLGKLIKLLRHEFEPMEFTSVHTVATQGKIHFKLGKIVETPVGSLKEKCDRFSCHLNSKYSASGFKFKLKPTYFYIKSLKQVLGMHITDGKICYPRKMYNQLRLEAMLVGRQMAFQFTQKYIAKNTIDPITSKQHVYLDLQNFVDNISDKDDPMYSRFFTVRYTNVPVGNARNALYTISSRSYKLVSYAEILGITPTYLRGKKRTSKGYRNMLDKPVSLKVFYGKVNWVNTVDPEKATKLKEIVKKYKLKTLAALVKAFQESASREYVKFSAV

SEQ ID NO: 4979 - protein, 485 aa, unidentified
  source 1..485: note = Related to BK028934.1; note = Siphoviridae sp.
MDINRFPKLVREYYNTLTGRHTPLESICGNRVLTLSELPFIDYNSFSSYMGVTPEILTSITDVTAKACYSRFYIDKNTKKIVPYSFGIKLREINAPTEALKELQLKLMEFFNQFPKHPCNYAFMQGKNIVDAAKTVANDGVLVHVDLKDFFPAHTSLYVQKGLEHLIAKNFNTNLPLDVLSRIVKLVCLDGVLPQGAPTSPILTIILNYDFDCRVAELAEKFGFTYTRYADDLCFSGNKSDAECQDFISELSEVVHPFRMNYKKVGIMRDKAYPIVTGFRIKTKVTYLPSTQSAKIIGIITNYLQMPDLRGTISAKVIEFTFSKDTKIPLDELPETLTRITDLVHTKYPNLEFIVKPMYKYVQSVKTVLGLHISNSEVKYPRSKYNDLRVEAMLIGKQLGIREVMYNIHPARIALVKKYAAHNKFFKSSFRNLMVKPLSKRVFNGKLAFLSIVDPDKTLKLKTIMDKHRQKTVEDMIDIFKREGF

SEQ ID NO: 4980 - protein, 394 aa, Aeromonas veronii
  source 1..394: note = Related to NZ_JAACNB010000003.1
MKKYTVNTSMLSLLEGCSFFVKGKGAEPLPYSHAEEGKLGNKFFYKISGSESKQINTIHELLISSLFERLPVNQSATAYLKGKSYLDFLEPHRNNYYFLRTDLKNFFHFIDKEMVVEALRHHVSEEPVTTEYSQSSLELVSRLVTLTLPKNSKNLEFAGQSILPIGFKTSPVVSNVVFRKFDILIEKFCAQHDILYTRYADDMLFSASDIRTSKYKEKDIFSVLRNPKVKEKKPFLHSRRFLEQISFIVNLGGFKINNKKTHMSKGYFTINGYTISGTNYPYTSGTIRVSNKKTKIICKLLHECKINVDDGDILKTVFNYRETKARLPYKSSKKFMNTYHATQLNNKLMGYRSYLISLLKFNETYRCMDSTFINKCTSLVCELDSIINRRINKQ

SEQ ID NO: 4981 - protein, 392 aa, Aeromonas dhakensis
  source 1..392: note = Related to JADPIC010000001.1
MKKYTINASILSTLEGCSFFFKGKGAEPLPFSHVKEGKLGNKFIYKVSGSEARQINLIHESLISTLFEKLPVNQSATAYLKGKSYLDFLEPHRNNHYFLRVDLRNFFHFIDKEMVLEALHHHVSEDKITDECNQSSLELVSRLVTLKLPNESANSDFTGKSILPIGFKTSPVVSNVVFRKFDILIEKFCAQHDILYTRYADDMLFSASDIRTSQYKERDLIFDLVNPRVKKKKPFLHSHRFIEQISFIVNLGGFKLNAKKTKMGEGNFTINGYTISGTNYSYKSGAIRVSNKKTKIISKLLHECNTKDDDGSILNAVFNYRVAKIKLPYKPSMKFLKVYYTSQLNNKLIGYKSYLISLLKFNEHYRCMDPAFITKCEKLVSGLNEMIIRRMK

SEQ ID NO: 4982 - protein, 311 aa, Aeromonas hydrophila
  source 1..311: note = Related to NZ_AP023398.1
MKSYTINSTVIATLETCSFYSKGKGVESFPYSQVKECKLNNKFIYKLSGADTRQINEIHDILIKTLFDKLPINNAATAYLKNKSYLDFLEPHRNSNYFLRIDLKNFFHFINKKIVKEVLFHHVSSDPISEKTTQSSLDLITNLLTITLPNNVKNLEFSGKSILPIGFKTSPAVSNIIFRKFDILIEKFCSRHDVLYTRYADDMLFSSSDTRTEQYIEKSLFDILLPPPNTKPFLHSSKFTEQIAFILNLGGFKINTKKTSIAKGNFTVNGYTISGSNYPYKSGTIRISNKKTKTISKLIHECKKTSPMRTY

SEQ ID NO: 4983 - protein, 389 aa, Vibrio sp.
  source 1..389: note = Related to SZQJ01000005.1
MKNYTVSSSILSLVKECMFFNEGSGVKSLPLSCVHETKVKNKFIYSITGSEGDKINHIHEALNRSLFSRIPVNQSATAYVKNKTYLNFLEPHRNHYHYLRVDLKNFFHFISDKIVRESLKEHVSTSNISETCSQSHLDLVTSLVTYTLPKSAKNTDFVGRSILPIGFKTSPLISNIVFRKLDILIEKFCSEHNITYTRYADDMLFSSSTMRDGKYREKTPFDGVLGIKDKKPFVHSQRFIEQLSFIINIDGYKINRRKTIKKSGYISINGYFIEGSNYPYIIGELRVSNKKTKVVSKLIYECSTDKSDREILKAVFNVDVEKLKFRFNPKDSFKDEYSKSQINNKLIGYRSYLISLIKFNDCTQSMNKDFINKCSKLISDIELIINRRM

SEQ ID NO: 4984 - protein, 391 aa, Salinivibrio sp.
  source 1..391: note = Related to MUEZ01000005.1
MKSYTVNSSVLSVLEECTLFDKGSGLKPLPPTQFKETKIGNKFIYIPSGSERKTINYIHESLNKNLFSRIPINQSATAYSKGKSYLNFLEPHRNNYYFLRLDLKNFFHFINGDTIKNAISEHVSSSAIMDGCIQSNLDFIVKALTITLPKESKNKEFSEKTILPIGFKSSPIVSNIVFRKLDIIIEKFCSENNITYTRYADDMLFSSSTTRDENYRERTLVASLFEKKDKVPFLHSDKFIEKISFIVNIDGFKINRRKTVKSKKYLSLNGYIISGSDYPYLSGSIRVSNKKTKIISKMIHECNKSNDDILIYKSIFGSDPSKIKFQYKPKESFLIKYCRSQVLNKLVGYRSYLISILKFNTDYLCIDRGFIKKCEHLIRELEPLIESRIDK

SEQ ID NO: 4985 - protein, 391 aa, Vibrio sp.
  source 1..391: note = Related to NZ_LAUM01000014.1
MKNYTVNSSVLSVLKECTFFDEGSGLKSLPSTHFKETKVGKKFVYVPSGSERNHINAIHESLNKSLFSRIPINQAATAYSKNKSYLNFLEPHRNSYYFLRLDLKNFFHFINRTVVRNSISEHVSSSEVIEGCSQSNLDFIVNILTITLPDTSKNEEFSGKTILPIGFKSSPVVSNIVFRKLDILIERFCAKNNVTYTRYADDMLFSSSTVRDDKYREKSVFDDLFKKKEKVPFLHSDKFIEEISFIVNIDGFKLNRKKTVKSKKHLSLNGYLISGSDYPYLSGSIRISNKKTKIISKMIHECNKDQDDISLYKSVFGVNPSKINFRYKPNEAFLIKYCRSQVLNKLVGYRSYLISILKFNENYSCIDGKFINKCESLTRCLETIIESRMDK

SEQ ID NO: 4986 - protein, 393 aa, Photobacterium angustum
  source 1..393: note = Related to MSCJ01000001.1
MKNYTANSFTLSLLKQCTFFNEESGLISLPSSHVIETRVGNKYIYKLVGSESELINKLHENLNETLFCRIPVNQAATAYTKNKSYLDFLEPHRNNFYFLRVDLKNFFHFINREIIKDSLKDHVSSKPIISGCRQSNLDFIVNVLTIKLPETSKNTDFIGKSILPIGFKSSPVVSNIIFRKLDILIERFCFEHNIIYTRYADDMLFSSSDLRNDKYQEKSVFDDLFKKKEKNNFLHSDRFLEQISFIVNIDGFRINSKKTVRSKKHLGLNGYLISGSNYPYIDGKIRISNKKTKKISKLIYECNTDKSDLDIFKVVFSIDPFRIKFRRKPKVEFLNNYCCAQINNKIIGYRSYLISLLKYNDKYSCLEDDFIFKVKGLIKESEKIINNRMKKEI

SEQ ID NO: 4987 - protein, 391 aa, Vibrio vulnificus
  source 1..391: note = Related to ABBKDM010000016.1
MKKYSLSSVVLDLLKEYSYYKEDKGVLPLSSSHVREFKIGKKFAYSTAPAINRIHSHLSKVIFSQYVSKIPVNQSAKAYLAGTSYYDFIEPHRNNYFFLRLDLKNFFHSISKDVIQKNFLEYFSDEKISETCEQTHAQAICNLIMYKLDVNNSNVAFKGKYILPMGFPLSPSISNVVFRKTDLLIEKFCNEKGITYTRYADDMLFSSRGTIVPPPIFRLIGKNKDKVKAYESPFLHSKRFYDEISYLVGLDGYRINKIKVIKAVNTISLNGYTIAGTNYSDLKGDIRLSNAKTKIIYKLLHELKVQKSDDVLVFKKCFSSEMPVPKYKKNVGKFILNFCTNQINNKLVGYKSYIISILKYDTEKDCLSVESKSKYLNLLGKLDVVIKKRMK

SEQ ID NO: 4988 - protein, 390 aa, Vibrio cyclitrophicus
  source 1..390: note = Related to AIDA02000097.1
MKKYSLSPVILDLLKEYPNYEEDKGVIPLTSSHVREFKIGKKFAYSTNTAINKTHSHLSKVIFSQYISKIPVNQSATAYLEGKSYYDFIEPHRHNYFFLRLDLKSFFHSIRSNIVSENFLEYFSDKKISENCEQTHSEAIFNLIMYKIDNKSKNNTFKGELILPMGFPLSPSISNIIFRKTDLLIEKLCDENSITYTRYADDMLFSSRGQIIPPSIFPLIDKNKKKETTYKNPFVHSKRFFDEISYLVKLDGFKINKKKTKKSVHTISLNGYTITGSNFPDIKGEIRISNLKTKIISKLIHELNNKTDDVIAFNKCFKKENPIPKYKKGSENFISEFCKNQINNKLVGYNSYIISIIKYDKEKNCLSRDSREKYANLVKDLNKLISKRLK

SEQ ID NO: 4989 - protein, 390 aa, Vibrio alginolyticus
  source 1..390: note = Related to CP071059.1
MKKYSLSPIIIDLLKEYAYYKEDKGVLPLSSSHVREFKIGKKFAYSTSSAINSVHSQVSKLIFNQYISKIPVNQSATAYLSGKSYYDFIEPHRNNYFFLRLDLKNFFHSISKDIIERNFLEYFSNDPISDKCEQTHAQAIYNLIMYKLDSKSDNSTFKGCEILPMGFPLSPSISNLVFRKIDLLIEKFCDEKGIVYTRYADDMLFSSRGKIVPPPIFAFFGKDTKKRKSYDPPFLHSKAFYEEISYLLQLDGYKINKNKVKKSVHTISINGYTITGSNYSDIKGDIRISNIKTKTITKLIHELKVNKDDILVFKKCFKKEFPTPKYKKGANDFISDFCTNQINNKLVGYKSYIISIVKFDGDKDCLSTASRSKYTKLLEQLDNSITKRLK

SEQ ID NO: 4990 - protein, 393 aa, Pseudomonas sp.
  source 1..393: note = Related to NZ_JABUYN010000001.1
MKKILLHPSVVELLKNFSNYTDSKGILPLLSSHVKEFKIGKRFVYTLSEKISPSYKHIIRAIHTQNLAKIPVNQSATAYLKGKSYFDFIEPHRNNYFFIKLDLKNFFHSISEDVIKSNFLEYFSDEIIFPNSTQTHAEAIYNLIKIDLSEKSSNKRFIKKSILPVGFPLSPIISNIVFRKIDLLIEKFCDEKNIVYTRYADDMLFSSKGKIEYNPFSTKNNKYLNPYLHSKNFYDEISFILSINNYKINKNKIKKSVHTMSLSGYTITGSNYSDIKGFISISNKKTKIISKLIHELKIENTDEDRDRDRDILKKCFSMIPPKPKYRKKTDEFIKKFCENMINNKLLGYRSFLISILKYDKNHDCINIENNEKYNKLLNEINIIIRKRLSLNDF

SEQ ID NO: 4991 - protein, 398 aa, Pseudoalteromonas sp.
  source 1..398: note = Related to NZ_CP012737.1
MEEIEMKKITLSKTVFDILDDYSFFDKAKGLTPLSFENVNEFKIGKKFTYTPESNLKPLHQKLSRFILNNYLSHIPLNQSSVAYQTKKSYFDFIEPHRNNYFFIRIDLKNFFHSISPAIIKSNFLNHFSDDPISESCPQSHAKLVYNLITLKLDENSKNKTFMNEEILPMGFPLSPVVSNIIFRKIDILIEKFCDIHHIKYTRYADDMLFSSKGSLLPKPIFEPIVMGLKAVTKSYKPHFIHSERFLEEISILLNLDGFKLNRKKTTKAVNTLSLNGYTISGSNFPDINGTIRISNKKTKLISQLIHELNSEEPKTDVEIFKLCFRHEFPKPKYKKNAGQFIETFCINQINNKLIGYVSYLKSIIYYHDDHNCLSNESINKYSKIINELSTIISKRVK

SEQ ID NO: 4992 - protein, 383 aa, Shewanella putrefaciens
  source 1..383: note = Related to NZ_CP046329.1
MKKYSLTPAMLEVCKEYNFFSDVSGFMPLTSENIKEIKIGKKFAYSHQDNNKPTHQKLSKIIFENFLSNIPLNQSAIAYVKKKSYFDFIEPHRNNYFFLRIDLKDFFHSISEDLLKRTLSDYFSSESLSETIKQSNIDAIFTFLTVNLKSDSSNVKFLDKKILPIGFPLSPNLANIVFRKTDLLLEKLCDMHGVTYTRYADDMLFSSRGIMEKNLLFRKNNNYKKPYIHSDNFLSEIKYLVSIDGFFINHNKTIKSVNTLSLNGYTISGTNFPDIEGKIRLSNKKTKIIEKVIHEININPDDKVTFEKCFKKEFPKPKYEKNRDNFINNLCTIKINQKLLGYRSYLISIIKFNNKFNCISESSEDKYNTLLSKIENVIKKRIK

SEQ ID NO: 4993 - protein, 310 aa, Lelliottia sp.
  source 1..310: note = Related to NZ_PKFV01000007.1
MSAVAYIEGKSYLNFIEPHRNNFFFLRLDIKNFFPSITEALVKECFRDYFSEEPINDVIKQSHLDAFVNFVTLNITNSSVNDTFKNSSILPMGFPLSPIISNIIFRKIDIIIERLCVQSYITYTRYADDLLFSSRGKVDMSLASFMKINSTYTAFIHTERFCDSIRKILAVDGYKINKTKTIQAKSIVSLNGYTIIGSNYSDVRGEIRVSNKKTKKIEKLLHELKKKISDQAVYLKCYSNQIPVPKYSSKKEVFLNAFYKNQIDNKLSGYRAYLISMIKFDGEYDCFDSHALQKYKNLISQLDLALSKRK

SEQ ID NO: 4994 - protein, 393 aa, Aliivibrio fischeri
  source 1..393: note = Related to MAJY01000007.1
MNKNKFNNDFLKRIVVDYKNYNESHKVPSIEPDMVVEFKLGKKYVYKLNEAHSDYEGISKCQNKLITEFLSNIPISTVAKAYVSGKSYLDFLEPHRNNYYFVRMDLKNFFHSISSELIRNSFDLYFENEFTNEDKKQTLMDAFINIATYKLDQESKNVAFSGKRILPMGFKSSPIISNIIFRKIDILIEDFCSNHNITYTRYADDLLFSSKTNSDPYGSVFLKRFNSKPRTGFIHSNRFLDEISYLVRIDGFKINASKTIKAINTLSLNGYTIEGSNYSDLQGTIRISNKKTQIISKLIFEVKKGSSNFNVMKKIFDFKVSNKYFNYIPPKEEHIERYCRDQIINKVSGYRSYLISILKYESEYKCIDEKSINKYNKLIKELEWILTKPEFAS

SEQ ID NO: 4995 - protein, 367 aa, Pseudoalteromonas sp.
  source 1..367: note = Related to JAKGAW010000004.1
MDKIDKDTFFSELLVGDYSTLINQGVPQTDFGDVTEIQSGKKFFYKLKEDSDLNKCLKVLTTRFLNKIPINNSAKAFRSNQSYLNFIEPHRKNYHFIRIDIKNFFHSISEDILKDCFSSYFEKQIVNTKSRSLLVDSFINLVTLRLSENSKNEVFSNKIILPIGYKTSPIISNIIFRKFDILIQSLCSMHNIEYTRYADDLLFSSPKHSNTIHSTFFYNEISFILSLGRFKINQKKLLSAKKILSIKGYTIDGTEDEKRLGTIRISNKKIKIIEKLLYEFDKGSSNIKILRKVFKINVEKKKFKYKPKPEFIDKYAKDQVHNKTLGYRSYLISLIKFNQDYKCIDDKSILKYLKLVKRLEKLALEIK

SEQ ID NO: 4996 - protein, 410 aa, Shewanella sp.
  source 1..410: note = Related to BPFA01000013.1
MKIIEKKDFVNQVLQGYDGYSNEMGVKTLTPNEIVEFKIGSKFGYRCSNNDLAKSLENTQLRALSRVVNTLEISKCATAFVTGSSYLDFLEPHRYSYHFIRLDIKDFFHSISSSVISESFSKHFKDTNITSGETKQTLLKSFLNLVTYTIPPDSTNKKFAGKTILPIGFRTSPAISNIVFRRLDCLIEDFCYRNNVTYTRYADDMLFSSKINTKFKSILQKKDVLPPIPITHKEHKTRLAKIKREEALKHGCFLHSDKFTNEISSIIRIINLKLNIKKTIKSNQTISLNGYTIDGVDSYLSAGTIRVSNKKLNVISKIIHSLNKNMSAIEIMERYFKMNKAHECFKYPPKYDYYNTFCIQKLFNKITGYRSYLVSLIKYDEEYNCITPSSLKKYKSLIAELDKTFTKIKL

SEQ ID NO: 4997 - protein, 380 aa, Shewanella algae
  source 1..380: note = Related to NZ_AP024610.1
MVSEKKIGNKFAYSLKVNGDEGQNILAIHNKLNQLFLNNIEINRCAKAFIKGRSYLDFIEPHRENFHFIRLDIKKFFHSIGIDLLTEAFENYFKKDYLINNENKQSLLNAFIKLVTYTIPDDSPNIELRGVTVLPIGFKLSPVISNIVFRKFDLLIEDYCYHNNITYSRYADDMIFSMKISNKFKNFKRIKFPSLLINAEDDRERKLEILSFIHSDKFIDDISDILSIGQHKFHLNPKKTIRSHHTISLNGYVIEGCEDHFSTGSIRLSNKKTHFISKVIHAITKKKLSPESIFKTILKESIDKSNIPYTPATPAFKKQYYRSQLINKLAGYRSYIISFLVYDSKHHCIEDKYIRKYLEMINAIEKSINKLEKQRLQQPK

SEQ ID NO: 4998 - protein, 372 aa, Pseudoalteromonas sp.
  source 1..372: note = Related to NZ_AKXJ01000001.1
MKYKKLTVKSFVSMLSDEASDQLELLKQPIEPYKFSDVKQRKLGKKTIFKLTPAKSQYLDRLNNKLFSHIRINNSAIAYVEKKSYLDMFEPHRKNINFLRLDIKSFFHSINRKTLEETLSPYVTDENFFEVGSVKQSLIDALLNLVSLRVSVEYNDESLHNKDILPIGFKSSPVISNIVFRKFDIIIQELCAKNDIIYTRYADDMLFSSPVHSKYIHSDKFLNEISYILSFGGFRLNQSKTIKDKRMISINGYVVEAGENGDSGTIRISEKKTRKIYKLIYMMENNIPPKTIMNRIFKVRDRDIVYRYKKGKAKFKETFYKTQTLNRLTGYRAYIISLLKYNNKYNCIKERQVNEYQKMIIKLEKQIYRLNL

SEQ ID NO: 4999 - protein, 381 aa, Vibrio vulnificus
  source 1..381: note = Related to BA000037.2
MCRGRSRDIMKYKKLTTKAFISILSDETSDQLELLKKPIEPHGISDVKQGKLGTKSIFKLTPAKSQYLGRLNNKFFCHIQVNNSAVAYVEKKSYLDMFEPHRKNTNFLRIDIKSFFHSINREILAEALSPYVTNEIFFESGKVKQSLLDALLNLVSLRVSTEYNDQSLHNKDILPIGFKSSPVISNIVFRRFDIIIQELCARSDIIYTRYADDMLFSSPEHSKYLHTNKFLSEISYTLSLSGFKLNQAKTIKDKNMISVNGYVIESGENGNSGSIRISEKKTKKIYKLIYMMENNIPPRTIINRIFKIRDRDIIYSYDKGKRKFKDKFYKTQTLNKLTGYRAYIISLLIYNEKYHCIKEEYINEYKTLIGKLEVQIYKLVK

SEQ ID NO: 5000 - protein, 376 aa, Vibrio brasiliensis
  source 1..376: note = Related to JAKEUX010000001.1
MKYKKLTTKTFISILSDEANDQLELLKNPIKPYKFSDVKQGKLGNKSIFKLPPAKSQYLDRLNVSFFSHIQINNSAVAYVGKKSYLDMFEPHRKNTNFLRVDIKSFFHSINRKTLKKALSPYVSDENFFEKDKVKQSLLDALLNLVSLRISKEYNEKSLHNKDILPIGFKSSPVISNIVFRRLDILIQEFCAKNDISYTRYADDMLFSSPTHSKYIHTNKFLTEISYILSLSGFKINQSKTIKDKNMISVNGYVIESGKNGNSGSIRISEKKTKKIYKLLYMMENNIPHRTIMNRIFNLRDRDIIYNHEKGKGKFKDKFYKTQTLNRLTGYRAYIISLLKYNEKYHCIKDEHIEEYKDIIKGLENQIYKITYQPTK

SEQ ID NO: 5001 - protein, 371 aa, Vibrio parahaemolyticus
  source 1..371: note = Related to JABCDA010000001.1
MKYKKLTTKAFLSFLSDDPNDRLELLKTPIAPYNFSDVKQGKLGNKSIFKLSPAKSHYLERLNRNFLSKIKINNAAIAYVEQKSYLDMFEPHRENTNFLRLDIKSFFHSISRETLAKTFESYISDEVFFEVGKTRQSLLDAFLNIICLKVTTDFNDLSLHDKEILPIGFKSSPVISNIVFRRFDIMIQEFCARHDINYTRYADDMLFSSPNKSQYLHTKKFFSEISYILSLGGFNINQAKTIKDKNMISINGYVIENYSDGVPGSIRVSEKKTKKIYKLLYMIENNVSYKIIMNRIFNVRDRDIVYNYEKGKRKFKDKYYKTQTLNRLAGYRAYMISILKYNDRYNCLPKSKSDEYFKIINRLEKQILIIK

SEQ ID NO: 5002 - protein, 380 aa, Vibrio splendidus
  source 1..380: note = Related to NZ_PIFZ01000001.1
MCRGRNRYIMKYRKLTTKTFLSILSDEIIDQLELSRNPIQPYTVKDVKHGKIGTKSIFKLAPAKSQYLERLNQKFFSNIEVNNSAVAYVGKKSYLDMFEPHRNNANFLRLDIKSFFHSINREALKKTFSAYISDEVFCEDGKSKQPLIDAFLNLISLNVTKDYNDPQLVNKSILPIGFKSSPVISNIIFRRFDILIQELCSRSGISYTRYADDMLFSSPSEHTYLHTNKFFNEISYILSLGEFKINTSKTIKDKNMISINGYVIESKGDGRNGTIRISEKKTKKIYKLIYMMEKGVPHKVIMNRVFRVQDRDIVYNFKKGKEEFKKKFYKTQTRNRLTGYRAYIISILKFNDKYQCIEAKYVSEYQTIVESLEKQIYKVI

SEQ ID NO: 5003 - protein, 372 aa, Vibrio alginolyticus
  source 1..372: note = Related to CP087877.1
MKNRKLTTNTFLSILCDDPLEINELLKKPIPAYTKQDISETKVGTKTIFKLTPAKAHYQKRLNDRFFSRIPLNQSSVAYTKRKSYLDMFEPHRKSYRFLRLDIKSFFHSISRDLLKDTLSSHVSEDLFFSSNYAKQTLIDALLNILTINLGDTYKDKDLTNRDILPIGFPSSPVVSNIVFRKFDFLIQKLCSENNIIYTRYADDMLFSSTADSKFIHSEHFIREVSYILSLGGFKLNGDKTIKEKNMISINGYVIESNGKDKNSGHIRLSNKKTAMICKLIDKLDKNVAHKDILKKITGLKENHIKVSFDKGRNEFLAQYYKSQIINLLAGYRAYLISIIKFNKLYGCVEDKYLDKYQNIIDDIQKHLFRLV

SEQ ID NO: 5004 - protein, 362 aa, Raoultella terrigena
  source 1..362: note = Related to CABDVD010000002.1
MIKRKKLTTNTFLSLLSDDHKDRFELSTQPIGDITSKNVIEFKIGSKTCFKFKNAGVLEQYQERINRLFLSEIEVSHSAFAYVKNKSYLEMFESHRNGYYFLRVDIKSFFHNISRQLIADSLSGYISDEDFIKNKQKLMDAFINIITLNVTKEQSSFVGRQILPIGFKTSPAVSNIIFRRFDNLIQSLCSKNNIVYTRYADDMLFSSPLGFKFLHTERFMNELSYILSLGGFSINNKKTLKDKHMITLNGYVIESSLTSGKIASIRISNKKTDIISKLINKLEYNVDSKLIMRKLFGLTNEKVKPQFSSKKNKFIDQYYESQLLNAIAGYRAYLISIVKFNLKYNCVEQKYILKYQGMIDKT

SEQ ID NO: 5005 - protein, 373 aa, Vibrio fluvialis
  source 1..373: note = Related to JAHUCN010000002.1
MKRKKITVRAFLSILSDDPHDRAELSLQPIKSIEADRVTECKIGSKTVFKLKDAKLLEQYQDRVNQRFLSNIEVSNSAIAYVKNKSYLDLFEPHIYGYHFLRVDIKSYFHSISRELIKTSFSTYINDEDFIKGQQKLIDAFTNILTLNVGDKPKNNALAGKEILPIGFKTSPAVSNIIFRRFDNLIQSLCSKNHITYTRYADDMLFSSPLKFKFIHTRKFMDELSYILSLGGFLINDKKTVKEKHMISLNGYVIESNGVTGQPAKIRISNRKTNIIAKLINKLDHNVDCKLIMSKLFNLSEKSIKVKYKKGRDDFIDQYYRTQLINVISGYRAYLISIIKFNCKYNCIDKNHLSKYQLMINKLEKHLLRLSNW

SEQ ID NO: 5006 - protein, 373 aa, Klebsiella pneumoniae
  source 1..373: note = Related to NZ_CP057313.1
MKNKRILIDKVFYERFLSVDSFKENLISQIPIPKITNKEVRLISSGAKTFYAINNTSPHSHVQYRLNRYFFSHIPINSAAKAFVKGGSYLKYLEPHIYGSSFCRLDISSFFNNISFNDVEMCLSPYIKDEYLIGNEQKLLSAILNSIGYEIPIHKKHTLIVPMGFKTSPIISNIVFRKMDLLIQNFCAKKGIIYSRYADDMLFSNPKESKLLISDYFFDEISSLLSIMGFKINESKYIAREKEISINGYVIENKGGYGAVGTIRLSKSKLKTILKVIHGLNENMPHKSICNKYIDIRLSESDFKYENKKAEFEKKYYRDQLINYLSGYRAYILSLIKFNIEYRCVNNHFLSQISAMLDDIQKHIIKEKNKRLR

SEQ ID NO: 5007 - protein, 377 aa, Providencia rettgeri
  source 1..377: note = Related to DAFBNF010000007.1
MKKQAILIDKSFYEKFLSVESFKENITLQTAIPKITSKEVRLISSGAKTFYAINKASPHSHVQHRINQYFLSHIPLNSSAKAFIKGGSYLKYLEPHIYGSSFCRLDISSFFNNISFYDVEECLSPYIKDEYLIGSEQKLIDAILNSIGYNSPIQNKIIVPMGFKTSPIISNIVFRKMDILIQNFCAKKGILYSRYADDMLFSNPKESKILLSDYFFDEIASLLSIMGFKINESKYISRKNEISINGYVIENKGGYGKIGSIRLSKSKINTILKVIHALKQDIPNKIICNKYIQIRLKETDFKYENKKLEFEQKYYRDQLINYLSGYRAYLISLMKFNLIFNCINHDFLTQANMILSDIQLYLHKIKNKRSPRHINNI

SEQ ID NO: 5008 - protein, 374 aa, Citrobacter freundii
  source 1..374: note = Related to CP018810.1
MKTKKMILVDKVFYEKILSVESFKENIITQSAIPKISNKEVRLISSGSKIFYAINNTSPHSHVQLRLNRFFLSHIPLNSAAKAFVRGGSYLKYLEPHIYGSSYCRLDISSFFNNISFDDVKQSLSPYIKDEYLIGTEQKLIDAILNSVGYESPIRKDKGMIIPMGFRTSPAISNIVFRKMDLLIQDFCAKKGVIYSRYADDMLFSNPRESKLLMSDYFIDEISSLLSIMGFNINQSKYISREKEISINGYVIENKGGNGSIGTIRLSKSKLNTVLKVTHALAQNIPYKNICNKYIKVRLKEKNIKYESKKDEFEKKYYRDQLINYLGGYRSYLISLVKFHSEYKCVNSDFIIQINGILNDIQNHIQKIKNNRRL

SEQ ID NO: 5009 - protein, 370 aa, Dickeya zeae
  source 1..370: note = Related to NZ_CP033622.1
MKRNTFVIDKEYYEKYLSAESFKENFISITPIPKITKKEVRLIKSGFKTFYSLQSTSPHSHIQNRLNNYFFSKIPLNSAAKAYVKGESYLSYLEPHIYGSSFCRLDIKSFFNNISFTDVKKSLSPYVKDEFLIGKEQTVLEAILNSVGYDDEKYDRTLIPMGFKTSPVISNIIFRKMDILIQDFCIKKGLIYSRYADDMLFSNLRDGNLLLSNYFFDEISSLISIMGFKLNESKYIAKKRMISVNGYVLENKGGRGVVGNIRLSSEKLSTINKVIHALNSKIPYKTICKRYLDIKLKDGDYKYESKREDFERKYYRDQLINFMNGYRAYLISIIKFNSDYNCMSIKFIESVNLTLNEIQVRIREIIKKRI

SEQ ID NO: 5010 - protein, 371 aa, Pantoea agglomerans
  source 1..371: note = Related to JACYMS010000012.1
MKNNNILIDKAFYQKFLTSESFKENLISGIPIPVISNKEVTCFFSGYKKIHVIRDTSPHSHVQYRLNKYFFPHIPLNSAAKAFVKGGSYLKFLEPHINGSSFCRLDICSFFNSISFEYVEESLSPYIKDEFIIDNKQKLVEAVLNSIGFKDEKINKEEMIIPMGFRTSPAISNIIFRKMDILIQSFCSKKNIIFSRYADDMLFSTPKESKILSSDYFFNEIASLLSIMNFKINDKKYISREKEISLNGYVIENKGGYGASGSIRLSNKKMMVITKVMYALNNNIPAKTICLKYLDIKLKEKNIKFENKKSEFEKRFYRDQLLNYLGGYRSYLISILKFNSSYGCIRDNFTHHIIFILNDIQLHMVKIKKKI

SEQ ID NO: 5011 - protein, 377 aa, Pantoea eucalypti
  source 1..377: note = Related to NZ_JACSXJ010000009.1
MKEKISKIDKNFYIDIFIKSSFQKEFETGDIIPLIANKEVSIINDKNKTFYSLAHSSPHYSIQTKIEKFLLKNIPLNASSFAYRKDLSYLHYLEPHIQNVKYCHLDIVSFFNSIDINLVRDTFSVYFSDEFLVKDKQSLLDAFIASVTFSTKVGDVEKTIIPMGFKSSPSISNIIFRKMDILIQKFCDKNNITYSRYADDLLFSTKKENNILSSNFFINEIGSILSINSFKLNKSKYLYKEETISLGGYVIENTLNDGSKGNIRLSSSKLNILHKALHEINKGSSAKHICNKVFNLKIKEFTYKKNKTAFEKKFYSSQLVNKLLGYRSYLLSFVKFQNKYKCINPVFLEKCFRLINEIENIINKNSHAQGMNAPMSN

SEQ ID NO: 5012 - protein, 366 aa, Klebsiella pneumoniae
  source 1..366: note = Related to PDLA01000006.1
MKEKISKIDKNFYTDIFIKTSFQNEFEAGGVIPPIAKNQVSTISNKNKTFYSLAHSSPHYSIQTRIEKFLLKNIPLSASSFAFRKERSYLHYLEPHTQNVKYCHLDIVSFFHSIDVNIVRDTFSVYFSDEFLVKEKQSLLDAFMASVTLTAELDGVEKTFIPMGFKSSPSISNIIFRKIDILIQKFCDKNKITYTRYADDLLFSTKKENNILSSTFFINEISSILSINKFKLNKSKYLYKEGTISLGGYVIENILKDNSSGNIRLSSSKLNPLYKALYEIKKGSSSKHICIKVFNLKLKRFIYKKNKEKFEDKFYSSQLKNKLLGYRSYLLSFVIFHKKYKCINPIFLEKCVFLISEIESIMNRKF

SEQ ID NO: 5013 - protein, 370 aa, Morganella morganii
  source 1..370: note = Related to CP064054.1
MKHKITKISSDFYKNFYLRETFSDDVIMHCGVPNITSNDYKSISFNNRMFFSIKNNSPHKKIQERLIKNFLQKIPLSSPAIAYRKKLSYLHFLEPHVHGESFCRIDLCNFFHNINYDFAKECFQSYFEDEFLLDKKIKVIDAFLNSLSIEMEISSGKKKIFPMGFATSPFISNIIFRKLDILIKNFCDKKSIIYTRYADDMLFSGSGTDKLLGSEHFDKEIASIISIAGLSLNMNKKIYKRGIISLNGYVIENNNGGGERGSLRISNGKTYLIRKALKKYKNGDSKEIICKKVFLVKKPSIKYKKNIDLFVNKFYDSQFSNKLAGYRSYFISLIKFNDKYRCFKDDEIAKYSAIIEEISSVLLKSQHKIK

SEQ ID NO: 5014 - protein, 365 aa, Escherichia coli
  source 1..365: note = Related to CP057173.1
MKHKINKINNDFYKNFYLRETFSDDIIMTHGVPEISNDDYKSISLKNRLCFTIRKSSPHKKIQERLIKNFLVKVPLSSPAIAYRKKLNYLNFLEPHIHGENFCRIDLCNFFHNINYNFARECFKSYFEDEYLVNKKIKVIDAFLNSLSIEIVVNNKKKKIFPMGFATSPFISNIIFRKLDILIKSLCDKRSIIYTRYADDMLFSSSGKDKLLGSEHFDNEISTIVNTAGLSLNKHKKIFKKGIISLNGYVIENKNGGGERGSIRISNGKMYLIRKALDKFKKGYSKEHICKKVFSVKSPTVKYNNNADQFVTDFYNSQFSNKLAGYRSYLISLVKFNDKFRCFHENEITKYSVIIDEISNALLKP

SEQ ID NO: 5015 - protein, 365 aa, Serratia marcescens
  source 1..365: note = Related to NZ_MJAO01000006.1
MKHKITKINSDFYKNFYLRETFTDDIIMTHGVPNITNSEYQNISFNNRVFFSIKQSSPHKKIQERIIRNFLQKVPLSSPAIAYRKKLSYLHFLEPHIYGENFCRIDLCNFFHNINYDYARECFKSYFEDEYLVNKKIKVVDAFLNSLSVEVELNDKKKRIFPMGFSTSPFISNIVFRKLDVLIKNLCDKRSIMYTRYADDMLFSSSGKDNLLGSEHFDKEISSIVNIAGLNLNVHKKIFKRGIVSLNGYVIENKDGGGERGSLRISNGKTYLIRKALDKYKKGYSKKHICQKVLSVKPPSVKYKSNADQFVMEFYNSQFHNKLAGYRSYLISLVKFNEKFGCFHEKEITKYSAIIDEISSVLLKS

SEQ ID NO: 5016 - protein, 365 aa, Pectobacterium brasiliense
  source 1..365: note = Related to JACGFP010000002.1
MKHSITKINSDFYKNFYLRETFGDDIIITRGVPNITNDDYQKISSNNRTFFSIKNSSPHKKIQERLIRNFLQKVPLSSPAIAYRKKLSYLHFLEPHIYGENFCRIDLCNFFHNINYNFTRDCFKSYFEDEYLVNNKIKLIDAFLNSLSIEIDFNDKKKRIFPMGFPTSPFISNIIFRKLDIVIKNLCDKRGITYTRYADDMLFSSSGKDKLLGSEYFDNEISSIVNMAGLSLNTHKKIFKKGIVSLNGYVIENKDGGGERGNLRISNWKTYLIRKALDKYKKGYSKEHICKKVFSVKKPSVRYKKNAAAFVQSFYSSQFSNKLAGYRSYLISLIKFNDKFECFSNEEIAKYSAIIEEISEVLLKS

SEQ ID NO: 5017 - protein, 365 aa, unidentified
  source 1..365: note = Related to nan
MRHQITKINSDFYKNFYLRETFSDDIIMTDGVPNINKDDYQHILFKNRIFFSIKINSPHRKIQERLVRNFLQKVPLSSPAIAYRKKLSYLHFLEPHIYGEKFCRIDLCKFFHNINYDFAKECFKSYFEDEYLVDKKIKVVDAFLNSVSIEIDLNGKKKKIFPMGFSTSPFISNIIFRKLDILIKTFCDKRGIIYTRYADDMLFSSLGKDKLLGSEYFDKEISYIVNMAGLSLNTHKKIFKNSIISLNGYVIENKDGSGERGRLRLSNRKTYLIRKALDKYKKGESKENICKKVFLIRTPSIKYKSNASLFVSNYFKSQFNNKLSGYRSYLISLIKFNDKFNCFEDDEIIKYSNIIEDISKVLLKP

SEQ ID NO: 5018 - protein, 365 aa, Proteus mirabilis
  source 1..365: note = Related to SCIO01000007.1
MKHKITKINSDFYKNFYLRETFSDEIVSSRGVPNITNDDYQSISLNNRVFFSIKKNSPHKKIQDRLIKNFLLKVPLNSSAIAYRKKLSYLHFLEPHIYGENFCRIDLCNFFHNINYDFTRECFKSYFEDEYLISKKIKLIDAFLNSLSIEVELNNKKKRIFPMGFSTSPFISNIIFRRLDILIKTFCDKRSISYTRYADDMLFSSSGKDKILGSEYFDKEISSIVSIAGLSLNTRKKIFKKSIISLNGYVIENKNGGGERGNLRISNRKTYLIRKALDKYKKGYSKEYICKKVFSVKPPVIKYRNNATLFKKEFYNSQFSNKFAGYRSYLISLIKFNNKFGCFQDKEITKYSVLIEEISQVLLKS

SEQ ID NO: 5019 - protein, 376 aa, Marinomonas shanghaiensis
  source 1..376: note = Related to NZ_QGOK01000008.1
MFKKLNSKDLLNILSSDSQSRLVVLTQSWPMLNVDDVKTLKFNNKTFFSLVSRVERDGYLKKLNLSFLSKIKINSASVAYKNGKSYLDFFSPHVENYNFLRLDLKSFFHSISYEIIKETFESYFLDEYFVDNGKEKGKEKIIDVFLNLVMLNVPSSYGDSFISGRRILPMGFSTSPLISNIVFRRFDIVIHEFCEKHNIKYSRYADDMLFSSNISDKTLFSNRFHEEIKYILNRGGFKLNNAKTIQSKGVLSVNGYVIDSYLERKGLRLSSSKLKNINKIIHALKKGWSYEIILKKYAKKDFDKTNYYNKGISKYRSEYEKSQILNLLVGYRSYLISFHEFDRKDRSIDNDFLVVSGKIIKSIEKAINKIYKDRKL

SEQ ID NO: 5020 - protein, 374 aa, unidentified
  source 1..374: note = Related to PCUK01000088.1; note = bacterium (Candidatus Blackallbacteria) CG18_big_fil_WC_8_21_14_2_50_49_26
MKRLSRPEFINLIDNDTFIEFTAGKIFNIPSSGVVEFQLSNKFFYKLRTDIKLWSFLRVIHSNLNKNFLKKISLNSSAIAFRSGLSYINFFSPHIENYFFLRLDIKSFFHSISKNLINNVFSSYFRDEFIDKNSQISLLEYFIFLTTLYIDETYKNNQFKYQYILPMGFSTSPLISNIVFRSIDIQISNICLEYGVTYTRYADDMLFSMPKNANPHIQTDVFYVSIKSILSKYGFFINKHKVISKKNTISINGYTLQNTPNMCEFRVSNKKIKIIQKIIYEYNKNTEISAILKKCFKYNIIKRFTTPEKVPNNLVEKYNKHQLINKIAGYRAFLLSFILFNHRSKLMSIETSNKYLNLINELEKIMRNIYLTLD

SEQ ID NO: 5021 - protein, 365 aa, Alteromonas sp.
  source 1..365: note = Related to NZ_LR136958.1
MKKLDKKLFFDILNIEEQVLNPFVEDQVSSFKIGRKFVYALGDRSREKLYQQELNQRFLYKIPLNNAAKAFRKHTSYFDFLEPHRYNYNFLRLDIKSFFPSITKPSIVETFSHYIEDELVVDDTGEKLLLNCFVDLVTFTIPSHSANRKFAGESVLPMGFVTSPAISNIIYRKLDIIIQKHCSIHGIEYSRYADDMLFSSLASSSYIHSRSFLDFISQLLLKHGFELNKRKSIYKKHVLSLNGYVIEGARSDFPSGDIRLSHKKLKLLDKLIYELGNGKSNSEVLKSVFSLEIDKVNFPIPNTEQEFKDAYCKDQLLNKIGGYRSYLIAFIKFLMLNNISSSVSMERYSELLIKLEKEYSKLHKS

SEQ ID NO: 5022 - protein, 368 aa, Rahnella inusitata
  source 1..368: note = Related to JACHBV010000002.1
MHIIDKKFFKTAIASKDLFENDIFPPIPSKYVFEKKLKKRYVYSLKKDSAIFNAQQNIIDLFLRKIDVNNCAVGFRKDKSYLNFLEPHSGNYYFLRLDIRNFFHSIDEKLLKDCFSPYFKDEFIDAENKQKLISSFLNLVTFHVGKSYGNIDFVGKKIVPVGFPSSPFISNIYFRNIDVILQKLCALHDITYTRYADDLLFSSSRDNKFVHSDSFEKEVKVILSSRKLKVNEKKIVKAKHRISLNGYVIQSTALVNNKNDNNVSGIFISNKKTSILKKVLHEFESKPVNYTKIMERIFKEKIRQEDFFYPITLDFKKKYYKTQARNKICGFRAYLISFIKFNAIYGCIPECRIQAYKKLICQIDTFLV

SEQ ID NO: 5023 - protein, 368 aa, Curtobacterium plantarum
  source 1..368: note = Related to NZ_RHDS01000003.1
MHIIDKNLFKTEIAPKDLLEDDVIPSIPYSSVLEKKIKKRYIYSLKNKSPALLAQRNLIEVLLRRIDLNDSAVGFRKGACYLNFLEPHSNNYHFLRFDIKNFFHSIDEKLLRDCFSSYLKDECIDPGNKQKLISSFLNLILFHVGSSFGNDDDKGKRILPVGFPASPFVSNIFLRKIDIIIQRTCALHNVTYTRYADDMLFSSSRADKYIHSDSFENEIKVILSSHKLKINEKKIVKAKHRISLNGYVIQSSSLTNRKNVNDISGVFISNKKIIKLKKIIHEFNKKPVDYTKIMEGIFREKIKPSNFTFPITGTFKQKFYKTQVRNKLCGYRAYLISFVNFNLRYDCIPDGKIELYSKLINEIDVIIK

SEQ ID NO: 5024 - protein, 368 aa, Pectobacterium brasiliense
  source 1..368: note = Related to NZ_CP059956.1
MHIIDRNHLKISILPKDIFVDGIVNPIPSSAVTEKNVKGRCVYILEKNSDYAIAQRNLVEQFLSKIEVNNSAKGFRKNLSYLNFLEPHASNYYFLRLDVKNFFHSIDERLLKKCFFIYFKDEFIDSNNKQKLLDAFMNLITFYVPSSSKNINCKEKRIIPVGFSSSPLISNIFFRSIDILLQKLCIAFNITYTRYADDLLFSAVRGCEYIHSDSFEKEVRIILGTMSLKINNNKIIRAKHRISLNGYVIQARSLSKKKSANDYNGVFISNKKTETIGKVLYELSLNSVDYKKIMEKIIGNKIKISDFNYPLTYGFIIKYYKTQTRNYLSGYRSYLISFLKFNEIYRCVPDIKINVYKDLLDKIDKFLV

SEQ ID NO: 5025 - protein, 374 aa, Yersinia enterocolitica
  source 1..374: note = Related to UHIX01000001.1
MLNKIDKNYFVNNILNRKIDIIKDGEIKSITSDNVIEFTVKDKLLYSLGNGNLYSFPQKRINDFLFKFIPFNNASTAFKKDFCYFDFFKPHIGNSLFLRLDIKSFFHSINIDKLKDVLNKYVEDDFIDEKKNQKIIDSVINIISLDITLNSKNKYYINKKIIPIGFSSSPLISDLYFRRIDILIQKICLKNSITYTRYADDLLFSAAHENNYVRKNWIGFTEEIRKLLYYFNFNLNDKKTIQKKGLLSLNGYVIETRLSTGNNKLIFSELRFSNEKLSKLIRAIYHLEVLGTSPTVIMISIFKEKIKDLKFKYHITPAFAARHYRYSLLNKLRGYRSFIISILKYNIKHNILNKKTKEKYKLLTEKLEREILKL

SEQ ID NO: 5026 - protein, 372 aa, Serratia marcescens
  source 1..372: note = Related to FCGU01000001.1
MLKKIDRNYFNDIILNGKKDIISDGEVKTIPSDSIKEFSVKNKFFYQLSDKSIYKKPQQIIAEFLSKHATSNNSSIAFKAGLCYFDFLKPHLNNSRFLRLDIKSFFHSIDIEMLKKTLSHYIEDDYIDDMKKQKIIDALINIVTIENSEDLNIKIKKGSKFLPIGFTSSPLLSDVFFRKIDIIIQKLCVKHSIQYTRYADDLLFSVSHKNTFINKNWEGFTNEIEKIVNYFRLNINRKKTTIRKGLISLNGYTIETKMLNGAILNSEVRLSNDKLSKLTRTIYHLDTLGSSPKKIINIVFKEKIENIEFKYKATQSFIERHYKFVLMNKLCGYRSFIISILKYNSGKKILNEKSKQKYENIVSTLERLILVL

SEQ ID NO: 5027 - protein, 385 aa, Proteus columbae
  source 1..385: note = Related to NZ_CP043925.1
MIKLNREFFTSDIIVLKNSESGLSEFINSNTIPWDNVTEIKLKGKYYYSFSKRIVHNIDYVKSQRNIYDYFSNVIPLNNNSFAYKKETCYLDYLRPHIGNYFFLKIDIASFFHSIKESYVRKLFYNYINDEFLDNDKKCSLIDALIKLTSIDIPSESKNISYVNKRVFPIGFSSSPIISEIYFRPIDVLLMKLCSDFELTYTRYADDILISGGINNKYIANNWDFIYNRIFEIFSYYKLKINTRKTINKKKCLSINGYVLESMYYDNRLLFSELRISNFKLKKINKALFYLEENTYIKNETIKYVMEKVFNSKFKKDKFKYTITQSFIDRHYVFSLTNKMRGFRAYLLSFIIYDRKYMILQKETKDKYLKIIGRIELIIDRLLKK

SEQ ID NO: 5028 - protein, 382 aa, Pectobacterium brasiliense
  source 1..382: note = Related to NZ_CP063241.1
MNKITKKILIEKILLLSKDEIDEFYQAEIPDSNVVEKKHKNKFMYSLSYSSTFRKIQSNINSALNPLLDLNNSAIAYRTGLSYFDFLEPHAKNYHFLRMDISLFFHSLNIDDVKEAISQYIDDDIINTKHNQKLIDVIIKCISYKIPKKFKNTNLHDKTILPMGFSTSPIISNITFRKIDILIQKLCAKLDITYTRYADDMLFSTPRDKKIIHSEFFLKEIKILVSLLGLKINAKKTIVKSHTISLNGYIIQNQIRLTGFAGLFSPISPAEIRLSNKKTAIIDKLLHHILVKKSDSDVILNKLFKEDVRDLMHHGNKEKYVKEYSLDQILNKLTGYRSFLLSIISHNKKFNSTSVGTIKKYSSKITKIEKCINILDKKKIYT

SEQ ID NO: 5029 - protein, 382 aa, Pectobacterium brasiliense
  source 1..382: note = Related to JACHAN010000001.1
MNKITKKILIEKILLLSKDEIDEFYQAEIPDSNVVEKKHKNKFMYSLSYSSTFRKIQSNINSALNPLLDLNNSAIAYRTGLSYFDFLEPHAKNYHFLRMDISLFFHSLNIDDVKEAISQYIDDDIINTKHNQKLIDVIIKCISYKIPKKFKNTNLHDKTILPMGFSTSPIISNITFRKIDILIQKLCAKLDITYTRYADDMLFSTPRDKKIIHSEFFLKEIKILVSLLGLKINAKKTIVKSHTISLNGYIIQNQIRLTGFAGLFSPISPAEIRLSNKKTAIIDKLLHHILVKKSDSDVILNKLFKEDVRDLMHHGNKEKYVKEYSLDQILNKLTGYRSFLLSIISHNKKFNSTSVGTIKKYSSKITKIEKCINIIDKKKIYT

SEQ ID NO: 5030 - protein, 382 aa, Citrobacter freundii
  source 1..382: note = Related to CP056181.1
MNKITKKILIEKILVLNKDEIDEYFQAEILDSDVIEKKHKNKFMYSLSYGNKFRKIQSNINSELNQILELNNSAIAYRTGLSYFDFLEPHSKNYHFLRMDISSFFHSLNPEDVKSSLSQYIDNDVVNEKHNQNLIDVILKCITYKIPTKCQNKKIHEAIILPMGFSTSPLISNIVFRKIDILIQKLCTKLDVTYTRYADDMLFSTPRDKKIIHTDFFLKEISILVSLLGLKLNTRKTIIKSHTISLNGYIIQNQVRLIGFAGLFSPISPAEIRLSNKKTAVIDTLLHQILVKKNSNNQILKHLFKEDVRKLMRHGNKEKYVEEYSQDQILNKLTGYRSFLLSIISHNNKFNSTSLDTINKYKSKITKIEKCINILDKKKIYT

SEQ ID NO: 5031 - protein, 382 aa, Pantoea agglomerans
  source 1..382: note = Related to NZ_WHOZ01000001.1
MKKITKKILLEKILLLNKDEFDTFIQVEIPDSEVIEKKHKNKFMYSLSYASKFRKIQSNINSILNSTIQLNNAATAYRAGLSYFDFLEPHVGNYHFTRLDISSFFHSLKVEDIKTALEQYVENDTLNEEHNQKLIDVILKCVTYKVTKESNNNRIHDKVIIPMGFSTSPVISNLVFRKIDIIIQKLCTKLDITYTRYADDMLFSAAKNKKAIHSDYFIKEIKILVSLLGLKLNERKTIKKSHTISLNGYIIQNQVKLSGFKGLFSPISPAEIRLSNKKTVIIDKLLHHIMVKKNNHNDILKKLFKEDVRHIMRYSNKAPYIDKYAKDQIMNKLTGYRSFLLSIISHNKKCSSSSNETIEKYKAKVVKIEKCIKTLDTNKIHT

SEQ ID NO: 5032 - protein, 381 aa, Proteus mirabilis
  source 1..381: note = Related to JADSTY010000052.1
MKKITKKILLEQILDVKKEDIDAFLQNNINDSDVSEKKIKSKYTYTINDNKLKKIQSNINEFLTQIIDLNNAAIAYRKGLSYFDFIEPHAKNYHFIRMDISSFFHSLDVKDIQEALYQYVDNDVVNDTHNQKLIDVIMNCITYTIPITANNEKYHNITVLPMGFSTSPLISNLIFRKIDILIQKLCTKLGVIYTRYADDMLFSAPFDKKIVHSEFFIKEIKILISLIKLKLNKNKTIIKSHTISLNGYIIQNKIKVNGIRGLFIEPTPSEIRLSNKKTIIIDKLLHYIEVKKSKNNIILKKLFNEDVRDLMVFSNKKKYIDDYSLDQILNKLTGYRSFLLSIIKYNEKTNITSNTTIQKYQNKIKRIEKCINSLDKNNKYT

SEQ ID NO: 5033 - protein, 390 aa, Arcobacter sp.
  source 1..390: note = Related to NVWN01000005.1
MYKINKKYFLTYLQPIIEKGIVTTIKKEKVKEYKLGKHYFYEITDEKIRYIHEWLNKSFQKNIDLNNSSIAYRKGYSYLNLFEPHRHNYYFLRLDIKSFFHSIQMSDIIAVFEPYFDNEHIDEKKKQKLIDGFINLVTFKIPVSFKNKEFKSSRILPIGFITSPVISNIIFRKIDLLIQKFCSEKNIIYTRYSDDMLFSSSNNSKYLHSEDFYKEISIFLNIMNFKLNQNKTLYATHTLSLNGYTLQYSNQPNSKNEQLINEFRLSNKKLLIIKKMIYLINKQEKSPKFILNKLFNFGINKLSTKYPIESKNVKEKYYYDQLLNKLTGYRSYVLSIVVFDKKHDCCQDKTIDKYTDIVEDLNKIIKRYIKKIETISKKIEDEIKESESAK

SEQ ID NO: 5034 - protein, 358 aa, Sulfurovum sp.
  source 1..358: note = Related to JAIZPA010000057.1
MGKISKDGFKKFLQTTTQTNINEFKIGKSYFYELKDNDNLLAFHRVLNREFQKVIPLNNAAVAFRKNKSYLDLFEPHRKNYYFLRLDIKAFFHSIQIDDIKKTFSTYFEDEYIDNDKTQTLIDAFINLVTYKVPDNSSNKDFRGKQILPMGFVTSPVISNIIFRKIDIQIQKFCSKRDITYTRYADDMLFSSDKNSNYVHSDGFINEISIFVAQLKFKLNHHKTLKATHTLSLNGYTIQYSNIKKDILGARDEEVISEFRLSNKKINIIKKMIHLIEVEHQTPQYVLKKLFNYRLPNDVPAEKKEEYYKHQITNKLTGYRSYILSFITFDKKYHCMQKNTVEKYIKLIKLINQNPYLQ

SEQ ID NO: 5035 - protein, 369 aa, Sulfurimonas sp.
  source 1..369: note = Related to MICC01000016.1
MKKIIHKSFFKNYIIEGEVPSTKIPSVNEFQLGKNFFYEVVNNKKLLSLHKQLNDVLLNKIDLNNAAVAFRKDYSYLHLFEPHRTNYYFLRLDIRSFFHSIRVDDIKEIFKAYISEDEYIDDKKKQSILEGFINLVTYTIPADSKNDKFKEKQVLPMGFTTSPVISNIIFRKLDIQIQKFCSKNNIIYTRYADDMLFSSSLASSFVHSESFIKEIRITISQMKFQLNENKTIRTKHTISLNGYTIQYSYFENFLKLHKQEYKINEVRLSNKKTNIIKEMIYLIEVKKMSSQKILWKLFHYKLRFKFVITESDVRKKYYDDQLLNKVSGYRSYLLSIIKFNKKYSCTRDTTIKKYSELINNLDKIIDYKY

SEQ ID NO: 5036 - protein, 458 aa, Sulfurovum sp.
  source 1..458: note = Related to WTAE01000162.1
MNKLITIDYFKRIILKNKVPNISKDNIREFTVGKNYFYELTDKQQLLVQFQIFNKLSNNIELNNAAIAFRKDLSYLHLFEPHRKNYNFIRLDIRSFFHSIQIDDIREVLKVYIPKDEYIDKKEKQSVLDAFINLVTYKIPSTSKNEKFKGKRVLPMGFQTSPIISNIVFRQLDILIQKLCSSHEIVYTRYADDMLFSSSKNRTYVHTDDFIKEIRIILSTMDFKLNEHKTLKARHTLSLNGYTIQYSDISTMKSKKKIIIHNESELHELRLSHKKTDIVKKIIHMIVTEKKEPEVILKKLFQYKINLKFIPSETLKNKYSHEQLLNKILGYRSYLISIIQFNKLYYCTQDKTIDKYIKIINDLEKIATQYRMKIEKLERKIDKEKKRIKSILMQPIDKLQFTIWEKDALSEVGYTTLNSLKGVTEKHLYGNIKGIGEVKAKNIVSIVNKELSKTKSRI

SEQ ID NO: 5037 - protein, 356 aa, Aliarcobacter vitoriensis
  source 1..356: note = Related to NZ_PDKB01000007.1
MKINKKQLFQQIKLLLNSNNRINNLEVEEFKIGKNFFYKIDNIEIIKFHDWLNNYLLDKIEINNSSKAFITDKSYLDFFEPHIKNYNFIRLDIKSFFHSINIKDIANAAKAYFDKDTIELDKKYPLLSFFLFFTTYKIPDISENKKFINKRVLPMGFKTSPKISNIVFRSLDIQIQKLCIKNGITYTRYVDDMLFSSKKDLTYIHTDSFIEQISFILNQMNFQLNSKKTIKAKHTISLNGYTIDSSKKEFRISNKKLLKIKKLIYMKNIQKKSAKDILKKLFPKDFRKYKLRYCSSQLENKIKGYRSYLLSFIVFDNKYKCLSENTKNSYIDLINKLEKLILLDTKVYNDEIDEDF

SEQ ID NO: 5038 - protein, 317 aa, Pantoea sp.
  source 1..317: note = Related to NZ_VWUH01000001.1
MLSQIEINNSAFAFVPKRSYLDFFTIHIGNYNFVRLDIKNFFHSIDLKKLEKMLSVYFENEFIDTDKDQLIIKSFMNLVTYKIPLASKNTTEKGNTILPIGFPTSPIISNIYMRDFDIKIQEFCARHNIQYSRYADDMLFSSKKDSDFVFSETFMKEVAILLSLKGLHLNTKKTIKRKHTISLNGYTLSNSNPTIKETSPHFEFRISNKKISTLKKFIFLTKNVNISSREIMEKVFSFNIKKQKFRYPPKKKFIESYCKTLLVNKIIGYRSYIIAILKHSEKHQACNDSTIEKYKLLLSELDFYLDKNPPEDFSKTL

SEQ ID NO: 5039 - protein, 380 aa, Lelliottia amnigena
  source 1..380: note = Related to JAENMR010000003.1
MLKIHAGQFKQLLTGQSIFKNGTIPTIEDKFIREIQLKGKFFYAIQNSPELSSTQANLINELFIQIEINNSAYAFVSKKSYLDFFTNHIGNYNFVRFDIKNFFHSIDVIKLEKMLSAYFENDYIDNEKQQPTIKSLMNLITYKVPLSSKNIAKRGNTILPIGFTTSPIISNIYMRDFDIKIQEHCIRHNINYSRYADDMLFSSDKSSEYIFSDSFMKEVSILLGLKGLQLNAKKTVKRKHTISLNGYTISNNHISQILEKPAFEFRLSNKKLCILKKFIHLSKKDGVTSRLIMEKLFSFNIKRQKFRYRPKKEFIESYCNTLLTNKITGYRSYLISIIKHALKYNISSDCSLENYNKILKELELYLDKNPVPDHSKSDKI

SEQ ID NO: 5040 - protein, 380 aa, Serratia liquefaciens
  source 1..380: note = Related to NZ_CP011303.1
MLRIDATTLKKMIISENLLIEGIIPPIESKFVTEFRVKNKFYYSVQNNPELLLAQNKIISDILSKVELNNSAFAFIKNKSYLDFFEPHMGNYNFVRIDIQNFFHSIHTPQLKEILSHYFKDEFIDPNKKQKIISSFMNLITLNIPLSSKNQNSKNNNILPIGFTTSPIISNIYMRDFDIKMQDFCIRHNITYSRYADDMLFSSTEQSSFVLSDAFMKEVSILLNLKKLKINTSKTIKKKHTISLNGYTISSSLIVDGKVISPAEFRISNKKTAIIRKFILLSKKEKITSRYIMEKLFHFDKNKVHFLFPPKDKFIESYCNTLLVNKIKGYRSYIISLIKNAKKYNNTNENTIKKYQEIILELNIYLDKNPLKNFSENKKT

SEQ ID NO: 5041 - protein, 366 aa, Photobacterium arenosum
  source 1..366: note = Related to NZ_JACYTP010000002.1
MIKNKISDDFFKKAILKGNEGLLNDFSPSVREFKVGCDNFFEISRDSEHKRINDRITKFVLDKSPINSSACGFVQGKSYYDFLRPHIQGYYFLRLDIKKFFHSIPSHEVKSLLAQHFNNEKNGKKYSALDIAYMSITHRVSDNYIDKDFRGKEILPIGFSSSPVISNIIFRRVDILIQKLCEDKGIIYSRYADDMLFSCDNSKYLHSEQFEKDISIFVSTLSLKLKKRKRRATENTISLNGYVVQNRKRKKGFLHVYKEKPVGNIRLSDKKLKPLKKLSALLKKQKDPIYIMENIFYLNPKNFIRRYGGNFAFYSKYADDQLQNKLKGYRSYLVSLIKYNDKYGCVNIDCMKKVKGLVEVFESNIK

SEQ ID NO: 5042 - protein, 366 aa, Vibrio maritimus
  source 1..366: note = Related to BBMT01000003.1
MIKNKISDDFFRKAILKGNEDLLNNFSPAVREFQIGCDNLFEITRETEHKQINDRITKFVLEKTPINSSACGFVQGKSYYDFLRPHISGYYFLRLDIKKFFHSIPSYEVKALLSQFFNNEKNGNKYSALDIAYMSVIHKVSDTHIDKDFRSKEILPMGFSSSPVISNIIFRKVDILIQKLCEDKGIVYSRYADDMLFSCDNSNYLHCDQFERDISIFISTLSLRLKKRKRRATENTISLNGYVVQNKKREKGFLHVYKEKPVGSIRLSDKKLKPLKKLASLLQKQKSPVVIMESLFSLERRKFINRYGNNWNFYCKYADEQLQNKLKGYRSYLVSLIKYNDKYGCVNVECMEKLRALVGVFELNIK

SEQ ID NO: 5043 - protein, 309 aa, Klebsiella pneumoniae
  source 1..309: note = Related to JAJRLY010000005.1
MMKNNISDDFFKKAILKGNEDLLNDFSPAVREFKVGCDNFFEISKDSEHKRINDRITKFVLAKIPINSSACGFVQGKSYYDFLRPHIQGYYFLRLDIKNFFHSISAHKVKNLLAQHFNNEKGGNKYSALDIAYMAVTHKVSDTYLDKDFRGKEVLPIGFSSSPVISNIIFRKVDILIQKLCEDKGIIYSRYADDMFFSSGNSKYLHSEQFEKDISIFVSTLSLKLKKSKRKATENTISLNGYVVQNRKRKKDFFHVYKEKPVGNIRLSDKKLKPLKKNFRIAQKTKISNIYNGERLPFKPKKVCPKIRE

SEQ ID NO: 5044 - protein, 368 aa, Vibrio sp.
  source 1..368: note = Related to LWEH01000044.1
MIKNKKKISDDFFKKAILNGNKALLSDFSPSVSEFKVGGDRFFEISRGSEHKSINNRITKIVLDKIPINSSACGFVQCKSYYDFLRPHVHGYYFLRLDIKEFFHSIPSIEVKKLLSQYFNNEKNGAKYSALDIAYMSVTHRVSDTYIEEDFRGKDILPIGFSSSPVISNIIFRRIDILIQKMCEEKGIVYTRYADDMLFSCESSKYLHSEQFERDISIFVSTLSLKLNRKKRKAAENTISLNGYVVQNTKINKGFFHEYIEKPVGNIRLSDKKLKPLKKLSVLLKKEKDPIYIMDKVFNLNPSKFIRKYGKNYEFYSKYADDQLQNKIKGYRSYLLSLMSYNDKYGCVNAKCMQKVKGLVEVFESNIK

SEQ ID NO: 5045 - protein, 373 aa, Pseudoalteromonas sp.
  source 1..373: note = Related to NZ_PNDJ01000020.1
MYQVEASMINTKISDEFFKKAILKGQSEIFNEFSPSVRESKVGPDSFFEIAQNSLHKDINDRITKFVLNKNPINSSACGFVAGKSYYDFLRPHITGYFFLRLDIKKFFHSIPVSEVRELLSQHFNDTKNGAKYSALDIAYMSVTHKVSNDHVDQDLKAREILPIGFSSSPIISNIIFRRVDILIQKLCEEKGITYTRYADDMLFSSYKSRYLHSEQFERDISIFISTLSLKLKKRKRKEAENTISLNGYVIQNKKIEKSLFNVLKEKPVGKIRLSNKKLKTLKKLAALLRKKQSPTYIMENQFKLNPNKFKAKFGKNLNFYNKFADDQLQNKIKGYRSYLVALLKYNELHGCVNIDCVKTVEKLIKVFELNVK

SEQ ID NO: 5046 - protein, 366 aa, Vibrio alginolyticus
  source 1..366: note = Related to UHIJ01000001.1
MNKKVSDEFFNNAILKGNVALLDDFSTSVIERKSGADIFFEILKDSDHKIVNDRITRFVLSKIPVNSSACGFVPGKSYYDFLRPHISGYYFLRLDIKKFFHSISVLEVKNLLSQYFSDDKKGAKYSALDIAYMSITHKVNNNFDDDDIKKKEILPIGFSSSPVVSNIIFRRIDILIQKLCEDKGIVYSRYADDMLFSSSKSRYLHSEQFERDISIFVSTLSLKLKKRKRKAVENTISLNGYVIQNTKLKKNLFFNVYKQDPIGSIRLSDKKLKHLKKLSALLRKNRDSVYIMESIFQLNYNKFKRTYGENINFYIQYSDDQLQNKIKGYRSYLVSLIKYNEKYGCVANNCIVKVKELVRVFESNIK

SEQ ID NO: 5047 - protein, 367 aa, Pseudoalteromonas byunsanensis
  source 1..367: note = Related to NZ_MNAN01000032.1
MNNKIIKNDFFEQAVLKGKTQLLNKFTPSAVERTVGNDIFFEIPKDSDHFLINRRIEQLILSSIPVNSSCCGFVKGKSYLDFLKPHIKGYYFLRLDIKDFFHSIQLSDIKALLGDYFEDDKKSFKYSPLDIALMSLTHSVSSTHPAKDMRGKTILPIGFPSSPVISNILFRKVDITIQKFCEDKKITYSRYADDLLFSSTSSRFLHSEQFEKEISIFISMLTLRLKRKKRIAGENTISLNGYTIQNKKKSNVSFLRDYQQDPIGSIRLSNKKLKTLKKLAASLIKKHSAVSIMENLFGLSFQKFKRNHFPDKNFYRKYARDQLQNKLKGYRSYLISWVIFDDKHSCVASDFLLTARCLIDIYEKNIE

SEQ ID NO: 5048 - protein, 367 aa, Escherichia coli
  source 1..367: note = Related to CP088131.1
MNKNKVSDDFFKNAILKGNLGLFDKFDLSVIERNIGNNAFFEISKDSEQYKINERITKFVLSRQPINSAAYGFIKGKSYYDFLKPHITGYYFLRLDIKNFFHSIPVREVNSLLEGLFNSSKEGKLYSALDLAKMTLLHTVSKDFSDSSLRGDYVLPIGFPSSPAISNIIFRRVDILIQKYCDDKNIIYSRYADDLLFSSANSNFIHSEQFEKEISIFISTLALTLKKSKRKACENTISLNGYVIQNTRPKKTLFSNIFRENSTGAIRLSNKKLQTLKKVLRSLFKGKSAIYIMETFFGLNYSKFKNKFNSDYRFYNKYATDQLQNKLRGYRSYLVSLIKYNESYDCVDQNCLKTVKSLAKDLEKYIV

SEQ ID NO: 5049 - protein, 367 aa, Pectobacterium versatile
  source 1..367: note = Related to CP034276.1
MNKNRVSDDFFKNAILKGNTDLFDSFDVSVIEKKIGNDCFFEIPRDSEQNKINERITKFILSRQPVNSAACGFIKGKSYFDFLKPHTTGYYFLRLDIKNFFHSIPVREVNNLLESLFSSSKNGKSYSALDLAKSTVLHTVSKDFPDLSLRGEYILPIGFPSSPAISNIIFRKVDILVQKYCDDKNIIYSRYADDLLFSSINSNFIHSEQFEKEISIFISTLSLNLKKSKRKACKNTISLNGYVIQNTKPKKIIFSMFYSDNPVGTIRLSNKKLQILKKVVAALFKKKSAIYIMENIFDLSPSKFKKSFNSSYYFYNKYAEDQLQNKLRGYRSYIVSLIKYNEKHECVDKNCLITVKSLAKALEEFIL

SEQ ID NO: 5050 - protein, 364 aa, Vibrio alginolyticus
  source 1..364: note = Related to CP017889.1
MINNKIHDDFFKNAILKGDTSLYDDFSQSVIEKQVGPDVFFEIKKDSDHYRINERITKIVLSQVPINSSACGFVPNKSYYDFLKPHIKGYYFLRLDIKNFFHSIPKKYVEELFKQYFSDKKNEQKYSSLELALMAVLYKTNIFDDEKDKIVLPIGFPSSPVISNILFRKIDILIQKFCEEKNIIYSRYADDMLFSSSKSNYLHSEYFEREISFFLSTLALKLKRRKRKATENTISLNGYVIQNEKPKKRFLFNVYKEERVGTIRLSNKKIKIIKKLSAHLIKGSSPVVIMENLFNLNPYKFKKKYNSNIQFYNKYSRDQLQNKIKGYRSYLVSLIRFNEKHGCIDKKCLETAIKLVSILEDNIT

SEQ ID NO: 5051 - protein, 367 aa, Salmonella enterica
  source 1..367: note = Related to CP079839.1
MKNKILSDDFFKNAILKGNSALFNEFTPSVTEREVGPDVFFEIEKNSEHRKINERITKFILSQIPINSSACGFVQGKSYFDFLNPHIKGYFFLRLDIKKFFHSIPASEVKSLFKVYFSNTKKEEKYSALDIALMAVLHKTSKSLSDSELRDKEILPIGFSSSPVISNIIFRKVDILIQKYCEDKNIEYSRYADDLLFSSAKSNFIHGEQFEREISIFISTLSLRLKKSKRTASENTISLNGYVIQNTKQKKLFNMFFYKDAPIGTIRVSNKKTKIIKKMTALLRQGKSPIYIMENVFNLNRKSFKPKYTNNYTFYNRYATDQLQNKIKGYRSYLVSIIKFNEKYKSIDEKFLKSAKKLVKELEDSIP

SEQ ID NO: 5052 - protein, 365 aa, Vibrio sp.
  source 1..365: note = Related to NZ_JACVEG010000002.1
MKKINNEFFKGAILKNNEALFDEFKPSISEFRIGGDNFFKISPNTPHHDISERITKIVFSQVEINSSACGFVQGKSYFDFLKPHIHGYYFLRLDIKKFFHSIKISDVSALLEDCFSNEKGKFKYSPYDIALMSVTHKVSSNFSDIKLREKDILPIGLPSSPVISNIIFRRVDILIQKYCENKKITYSRYADDLLFSSLNSNFIHSENFEREISFFLSCLSLRLNHKKRKACENTISLNGYVIKNSKPKKLDFFNIHKEDPVGKISLSNKKLKIIKKIIHHLKKGSSAITIMEELFYLNFNKNRSKFYNYYGFYQKYAEDQLQNKLKGYRSYLLSLVIFHQKNKCVDELCLRTVKKMIKDINKKIV

SEQ ID NO: 5053 - protein, 365 aa, Pseudoalteromonas sp.
  source 1..365: note = Related to NZ_WTLC01000042.1
MKKISNEFFQSAILKGNSAILDDFSPSVVEQNVANNTFFTIRSDTAHKSINERITKIVFSKIPINTSACGFVSGKSYYDFLSPHVYSYYYLRLDIKQFFHSIPISEVKKLLEDNFTKDKGTFKYSPYEIAFMALTHRVSKNSSNKELINKDLLPIGFSSSPVISNILFRKIDILIQKYCENKKIKYTRYADDLLFSTLNSKFVHSEQFEKEISILVSTLGLKLNNKKRKACENTISLNGYVIQNTKPKEMTFFSVRKDDPVGTIRLSNKKLKIIKKLIAAIGKNIPSVTIMEDLFGMNFDKFRGKHFNNLMFFNKYVEDQLQNKLKGYRSYLISLIQYDKRVGHVDVDCLESVIELINKINKYIK

SEQ ID NO: 5054 - protein, 367 aa, Aeromonas dhakensis
  source 1..367: note = Related to NZ_RJCW01000006.1
MNEMNKDFFINAILNKDETLLNTFKPSVVEHQVGDDFFFEIQDRTPHKNINKRITNIILSQIPLNSSACGFIRSKSYYDFLQPHVTGYYFLRLDIKNFFHTIDSDLIDDLLLSLFSDEKKGSDTLSPFDIASLVVTHKVSESCSCELINGKRILPIGFPSSPVISNIIFRKIDLIIQKFCDDKRIKYTRYADDLLFSSPDNKFIHSEQFEKEISIFVAILNLKLNKKKKIACENTISLNGYVIQNEKGKKTRHLHVYKEEPIGTIRLSIKKTKIIQKMVYLLDKKIAPVTIVSKLFKINYHTHKFKYRRNLEFFKKYADDQLQNKLKGYRSYLLSIINYNKIKPCVSTEHIDKYLYLVDKINSYIKE

SEQ ID NO: 5055 - protein, 366 aa, Kosakonia cowanii
  source 1..366: note = Related to CP069319.1
MKLITNEVFSKTILKGKSELFDTFTPLSTERQIGKEVCCIIPDSTDHKVINNSLTKIVFSRIPLNNSAYGFVPNRSYLDFLTPHVKNYYFLRLDIKKFFYSIDISLIKKLVQSLFSQDKEGKKHSPYDVVMEAITHKTSSDFPIAEIRNRQVLPIGYPSSPVISNILFRPIDILIQKYCEGKKITYTRYADDMLFSGNTKRILHGENFETEISILLATIGLKINNKKTIACENTISLNGYVIQNIKPTVNEFLSQYYETSIGHIHISNKKTQLICKVIHSLRKKESPENIMATHFGKTYNKHKFKYTKDYSFYIKYADMQLQNKLKGYRSFLISLIKHNKKNNCISDKNIEKYSNLAREIERHIKN

SEQ ID NO: 5056 - protein, 365 aa, Kosakonia oryzendophytica
  source 1..365: note = Related to FMAY01000002.1
MKLINNEIFIRTILKGNTDLFNTFVPTSAECQIGKEFCCVISDSTNHKAINHALTKIIFSRIPLNSSACGFVKNKSYLDFLTPHIKNYYFLRLDIKKFFYSIDVSLVENLAKSLFSQDKEGNKFSPYNIVMDAITHKASASFPITELRNKQVLPIGYPSSPVISNIIFRPIDILIQKYCEGKNIIYTRYADDMLFSANTKRVLHDRSFQTEIAILLSTINLKINKTKTIACENTISLNGYVIQNERPIFRKSPHQNYEQPTGHIRISNKKTEIIHKILHSLREKESPSTIMKKHFGKSYDNHKFIYKKDYAFFIKYIETQLQNKLKGYRSFLISLIQHDKKNFCIADEHIEKYSKLTKEIERYII

SEQ ID NO: 5057 - protein, 349 aa, Mannheimia varigena
  source 1..349: note = Related to NZ_CP030062.1
MFDDSIFNRIILQNHLSLRKDFHPKVIGIKINKNLYFSINSDIHRDINKRIVNYILSDIPVNSSACAYIKGKSYLDFLSPHCKNCYFLRLDIKNFFHSFPERILDEFLLSLFNNEKPKGSDELSSYELARLVLLYKCDDEYSDDSIKGRSILPIGFPSSPIISNILFRKIDILIEKYCYTRGITYTRYADDMLFSSKSSGFLLKSEFEREMSFLISLLGFRLNNNKTIRSSNELSLNGYVIYNYMENNRSGIRLSNKKLSIIRKVIYYKKNKMSNDFIMRRLFNIHINNFKFKYGKHESFFEKYCEDQIQHKIRGFRSFLLSFSNYSKENYGVCEEYIELVNELEKYII

SEQ ID NO: 5058 - protein, 364 aa, Vibrio kanaloae
  source 1..364: note = Related to NZ_CP090019.1
MKKISRDDFVKDILGLSVSTSLDSPTLSVKYHKIKSQDTYSIVEQTLHYYANKAINDNILSKISVNSSAKGFVKGKSYLDFLSEHKDGYYFLRLDIKKFFPSISQTDIRNVLSQYLSYKINKKDKISTLDYAMNVITHRVDPKSAPFLPVGFSSSPTLSNIIFRKIDILIEKLCLDKNVKYTRYADDLLFSSSNNPEILDDKFINEISKLVSILSLKLNVKKTKRKKGLISLNGYVICNKSPDQPWLFSKKKRYFTGNLWVSNKKTKNFSKLIYLMEKGYSSDYIANKVLKITPNNNHVFYGVNVDFYTKYCNDQVLNKARGYRSFLLSLIIYDTKNKCVEENYINKYSKLVNRLDLVIDKYTS

SEQ ID NO: 5059 - protein, 375 aa, Photobacterium carnosum
  source 1..375: note = Related to WMDK01000003.1
MSMCSMCHTVNFCFCIKDKAYYMSKYIERKIGPSLTSKLLSNIDRNVVSELKVGKDYTYSMLTDSHLEVINKELVENLFSHIPLNNSCVGFVKKKSYLDLLEPHRYSKKFTRLDISSFFHSISISDVKASLTPYVNPLFLDKEKKISTLEKIIECITYDVPLTSSNTIFRGKKILPMGFSSSPVISNVVFRKIDIQIQKYCIENKIIYTRYADDMLFSSNKELVSQVEFINKIQSLVSQLSLRINERKTITTSGHISLNGYVIDGSSGTIRLSNKKLSRINKITHQLLVRSKSPSSVAKKLYGYSISQYNFKYSYSKEFFEQFCKDQLHNKIAGNRAYLISVLKFNDRYECICPDYLKKSKVMLDRLNEILDNWR

SEQ ID NO: 5060 - protein, 353 aa, Vibrio cyclitrophicus
  source 1..353: note = Related to MCSX01000068.1
MSKYNERKIGPSLISKLLADVDHNVISEAKVGKDFTYSMLTNSDLEVLNKELVSDFFSKIPLSNSCVGFVKNKSYLDLLEPHRFSNHFTRLDISSFFHSISIDDVKSSLSPYVKPEFLDEDKSISSIEKVIDCITYSVPTTSENVKSRGKKILPMGFSSSPVVSNIVFRRIDIQIQKYCIENNIIYTRYADDMLFSSTNELVIKVEFVNKIKSLVAQLSLKINEMKTITTSGHVSLNGYVIDGVNGTIRLSNNKLSRINKITHQLLVRRKPPEYVAKKLYGYSISKFKFRYGFSKDFFDQYCKDQLHNKIAGNRSYLISLIKYNERHQCMCPIYFSKSKLMLDRLNNILDNWK

SEQ ID NO: 5061 - protein, 353 aa, Vibrio coralliilyticus
  source 1..353: note = Related to ACZN01000014.1
MSKYSDIKISPSLNSKLLANVDRNVVSEIKVGKDYTYSIMAGSNLDVLNRELASDFFSKIPLNNSCVGFVKNKSYLDLLEPHRFSTKFTRLDISSFFHSISIEDVKLSIEPYVKPKFLDNDKTLLSIDKIIEYITYDVPQKSKNVKFRGKTILPMGFSSSPIISNIVFRKIDIQIHKYCNDNNIIYTRYADDMLFSSNNEIVGQRIFINKIRSLVSQISLKINERKTITTSDHISLNGYVIDGASGTIRLSNKKLNKINKITHQLLVRDRSPAVVAKKLYGYSISKYDFKFGYSQEFFEQYCKDQLHNKIAGNRSYLISVLKFNEQHDCICPEYVVKSKIMLDRLNKILDNWR

SEQ ID NO: 5062 - protein, 356 aa, Aeromonas hydrophila
  source 1..356: note = Related to JAEHJS010000001.1
MNKTKVITLQSEHKVLLCEDANPDDISSIFYLGKLAFKIKANCFREQIAIYISNSIQDVIPINSAATGFIKRKSYLDFLSPHRRSSFFIRLDVKDFFHSIKEEDIKKSLSNYIVPSHIMIEDKKTPTIDQLIKYIMHEIPDDFPDKNLKGKKILPIGFPSSPSISNLVFRKIDILISKYCQHENIMYTRYADDLLFSSKKKLPPELENKISEYLSILSLKQNNKKTLCTKSHISINGYVIDGETNSIRLSNHKLQRINKLTHAIINRKDSPKEIMKVMYGKTFSQYPFNYPKGKRNFYIKYCIDQINNKLKGYRSYLLSIIKYNKSEIIITSTYKEKLMTVITRIEKCIDIYNKLK

SEQ ID NO: 5063 - protein, 380 aa, Vibrio parahaemolyticus
  source 1..380: note = Related to AVPX01000003.1
MLTASKLPSHITRVSCGLQVTCESLFCIGSDMKTNKIKLPASLGAFLNENSDTAVKERKIKGNYFYSVDDSVLDKHQTLAKILSEAIPKNSASKGFSADCSYLDFLKPHTPSRFFLRMDISSFFHSIPVEQIANKLKPYFDNNADNESHAVSVDSILKKVTYKVPETSSNKKILGETILPMGFPCSPTLSNLFFRPLDIVIQSYCLEHDVIYTRYADDMLFSSKYNQTIGSGDVETFIKRLMNKNSLLINTKKTLYTEGHISLNGYVIDSNGGCIRLSNSKLLTINKLTKMLIVQKVSLRHVAESLFGMNIRNLPYENANTNAFFEKKCRKIVLDKVRGFRSHIIGVKKHGIATSSISAESVKKYEKIIERLEKIILQHG

SEQ ID NO: 5064 - protein, 351 aa, Citrobacter freundii
  source 1..351: note = Related to CP057863.1
MKITKIALSDDLRAFLTNDDVQLVREMKIKKDFFYHLESEETARYHKKIEILISKYIPVSRSSYGFVKGKSYFDFLSPHLDSKYFSRLDIKKFFHSISADDLSKKLKPYFVDKLDKDSNVRLIDLILKKLTYEVPANSKNQYFIGKKILPIGFPCSPIISNLVLRPIDIQIEKICKEHNVIYTRYADDMLFSSKYMLSLFNGEIKNSVNRIISHIGLTLNESKTVITSGHISLNGYVIDGTTNTLRVSNEKTMKLKKTIRLIILKKERFSAIACKYYGLNIKNLRYHNANTDKYFETYCKNIVLNKLSGYRAYFISILKFDSEHNVLDEKSIIKYNLIISDLDKILNEYRN

SEQ ID NO: 5065 - protein, 344 aa, Pseudoalteromonas rubra
  source 1..344: note = Related to PNCI01000020.1
MKLSQKEVLNALKVQSIDDIKKISNEFSFKDGFYIPESMEYKILSKNLSVIFSKLPLSSAAKAYRKKHSYYDFFRPHLEGEHFLRLDIKAFFNSITSEHLEGFLISHLKGKNAYEIKMLARAISFFLTVKVDKKQILPIGFPASPSIANLIFRPLDITIEKLCHNKKIIYSRYSDDLLFSSASGSVIHSSWFESQISYIISKLDMRLNTSKRIATSKEISLNGYVLYGEENNKKIRFSNQRLRILKKLIHYKKVRNLPDRVIAKKLFQDEVRILDSSLRFNKKSEFLDTFCRDQVINKLRGYRSYLISLLKYDNLYSCVDREYKIYICDLIGELNSIIFSYDRG

SEQ ID NO: 5066 - protein, 342 aa, Pseudoalteromonas citrea
  source 1..342: note = Related to NZ_AHBZ03000021.1
MKLSQKEIFKALEVKSIEDIKKISSDFAFKNGFYIPRSPEYKTSSENLNVLFSKLPLSSVAKAYRKKHSYFDFFRPHLDGEHFLRLDVKAFFNSIKREQIEIFLISHLRGKNAYEVKVLAKAISFFLTVEVDKQRVLPIGFPASPAIANLVFRPLDIAIEKLCHEKKIIYSRYSDDFLFSSASNSIIHSNWFESQISYIISKLDMRLNNGKRITTSGAISLNGYVISGEENNKKLSFSNLRLKTLKKLIHFKKIRKLSDKMIAKKLFQDNLKNLNLKYSDEKSFIDKFCRDQVINKLRGYRSYLISLLNYDNLYSCVDSAHRRHICILIEDLNSIILSYDRG

SEQ ID NO: 5067 - protein, 344 aa, Pseudoalteromonas sp.
  source 1..344: note = Related to NZ_CP045418.1
MKLSQKEIFKALQVESIDDIKNISSDFSFKGGFYIPNDLKYKTSSQNLSKLFSKLPLSSAAKAYRKNHSYFDFFRPHLGGKYFLRLDIKAFFNSIKREQIEDFLISHLKGKNAYEIKFLAKRISFFLTVEADKDQILPIGFPASPAIANLVFRPLDIAIEKLCQEKKIIYSRYSDDLMFSSENSSTIHSNWFESQISYIISKLDMRLNTRKRIATTDTISLNGYVISGESPNKKISFSNQRLRILKKLIHYKKVRKLPDKVIAKKLFQDNLKSLDSSLKFAKKESFLDTFCRDQVINKLRGFRSYLISLLNYDDLYSCVQSEHREHISSLTEELNTIILSYDRG

SEQ ID NO: 5068 - protein, 341 aa, Shewanella algae
  source 1..341: note = Related to NZ_CP055159.1
MKKISVAEILTSLGVKSIAEIDQIPKDHRLVSSYHVAGSSAYLAASKSIGQLISRLPLNSSSVAYRKGLSYFDFFRPHLKGKYFLRLDIKSFFHSITIDSIIRTFDSHIKGSKRREKSELTRKLTDFLTIEFEGKKILPIGFPASPQVANLVFRPLDIQIEKLCLEKGVSYTRYADDLLFSSQSEKVIHSTWFESTISSIISQQELKLNNSKKIKTKGKISLNGYLISGSDYKKISFSNKRLTVVRKLLYFKNKKNYDDLSIMRRLFPTDLKNLHLVHPNKNEFLKVFAQSQILQKLKGFRSYLLSIVNYGEKYNCIEQSHRIVLLELISNLNDVILKYEN

SEQ ID NO: 5069 - protein, 342 aa, Pseudoalteromonas sp.
  source 1..342: note = Related to JADYXO010000004.1
MSKISILEVLSSLNVESIQDIDKIPKNSKLKSGYHIPDNGAYSEASSALGELLSKLPLNNSSVAYRKGYSYFDFFRPHIKSNYFLRLDIKSFFHSISKSVIEQTIESHLRSSKELDKSLLARKVSEFLTIKYDKVDILPIGFPASPRVANLIFRPLDIQIEKICLESGIIYSRYSDDLLFSSINDKTIKSNWFESQISYVISQLNMKLNNKKTIKTKNQISLNGYVISGSENNKYMSFSNERLKLIRKLIYLKKVKKISDFSIMRKLFFTEISNLKLIYHNKAEFTQVYAKSQVENKLKGFRSYLLSLVNYGDRYDCVQLEHKKMLINLIEELNLLIFQYNN

SEQ ID NO: 5070 - protein, 356 aa, Pseudoalteromonas sp.
  source 1..356: note = Related to JADYXL010000003.1
MKTITKKYFMENILNSNPPGDIPDNSIQEVRIGKDFAYSIDKKFESYSINKRLTSLVFNKVPLNDSAVAFRQGMSYYDFMFPHKNNYKFLRLDVKSYFHSLRIRAIRNCLKHYFMGSRLTNNTTMVDQALKYCTYTIPTDSKNVKFSEKVVLPIGFPSSPVISNIIFRQLDIEIQKICYKHEIIYTRYADDMLFSAKKSNIYIHNALFEEEISRLLQRLSLKLNNKKTLKKNHTLSLNGNVIAFGKAGGSLRLSNKKVKLINKVTYLALVKEESAVFIMNKLFNVNINNYNFQFQQDEIFFKKVCMDQLFNKAVGYRSYLLSIIQFDKKNNCLETRYRKKYSKIITRLDKLIDIYS

SEQ ID NO: 5071 - protein, 342 aa, Enterococcus sp.
  source 1..342: note = Related to JAFLWB010000009.1
MRINSKLYDDLENYFSMSVNELTITTSLEAKDRVEIFSIEKKNKEKREIHSVDTKTTMWKVQNFLNNKYFYQNNFPEYVFGFLKGKSYFGFLQYHVSKKNTNNFLKLDIKNFFGSIDTEVLIEDIVNDFEEDTYKKEELKMLFKVVLTYKDQLPQGFQTSPYLSNYYFLRADLRIKKYCDKLDFKYSRYADDIIISTLSKGEKLFSKGTVSMIDRIIADFDLKLNRSKTRVAKRELVLNGFVISSEVRLSQSKLKELRRVLFIIEHNQCKNSDQLLDLINSDKKINSKNKKRYYSTEYLLKYLSGIRAFLISSLKNISTKSDWYKTASKLIVRVEAVILKMY

SEQ ID NO: 5072 - protein, 334 aa, Vagococcus coleopterorum
  source 1..334: note = Related to NZ_CP049886.1
MYNLSDHIEHVYKKNISELIDQLELDKKNNVEEFNINKNNGTKRNITMVVGDCILGRLQSFLSDNYFNKVEFPINSFGFRENCSYFDFLDIHCSSEEKDFLKLDLKDFFSSIDAKLVCENLAKDFERNVKKRVKLEELFFTVITFKGKIPQGFKTSPFISNYFFVRADLRFQKYCDKLNYQYSRYADDIIISSNTGKDFFVGNTIAIAKKILADFNLKLNSSKTKYAKNELVLNGYVISNETRLSQSKLREIRRVLFIMESSVNLDVATDRLNSKKYFSSKISNRIFDLEYLFNYLSGYRSFLISSIQKKETGKWKDTASKLIKRIEAQLLRQE

SEQ ID NO: 5073 - protein, 342 aa, Listeria monocytogenes
  source 1..342: note = Related to VTIG01000006.1
MLSIHEHIKDRLEISIEDLVKVIKSEKLNNVCTYNLSKKGKERQVVEVDKDTTLYYVQTILLKFFSSINHFPEYVFGFQKHKSYYKFLDMHTTGNDETYFLKLDIQNFFTSLDAEKLLTNLVAQFEQVTANQPIVKELLYAALTYNNKIPQGFKTSPFLSNYYFFIADLRIKKYCDKLNIKYSRYADDMIFSSHFKKNIYSNRTIKAFEIILFDFNLKLNKSKTKLSKKELCLNGYVVSNEVKLSMNKLKELKRILFIIEQNKQKQTKDLLISINNHTYLHSSRKKNTRYFSEEYLKNYLSGYRSFLLSFIKENTHQKKWREISKKIILRIEKALLILYDLQ

SEQ ID NO: 5074 - protein, 329 aa, Enterococcus hirae
  source 1..329: note = Related to JAAAJO010000006.1
MDIFSKKQFEHLLNIDIENDTQKIIEEKNNIKNIEIVVNNKTRNILRLPTSSLIRSTQKKIQHTILSDEYYPDCVCGYVKKKSYFDFLKPHCDKKYFLRIDIKDFFDSISSEKLTILLAEKIRINDPKERKEIMDFLLNILFVNKKLPQGFSTSPALSNLFFKRADLRIEKYCMTQKITYTRYVDDLLFSSNQNNLIGTKILTTIKYICKDFGLEINYKKIKRGIDTFSLNGFVIDNSEIRLSRKKLAYLKEVLFFLDHNCHKDNLDILISKEFGSKFYYTENILSFLSGYRAFLISSLSSNPSTWNDKCRLLINRIEKLTIILSKKIL

SEQ ID NO: 5075 - protein, 334 aa, Priestia megaterium
  source 1..334: note = Related to NZ_NUOQ01000048.1
MQIFIYKEEYFYDKILSSSKALIEETIKDKDKFYREKKIPKKNGDRTLFCLKKDCPLSKVQQNIRMNFLNKISIPDYVYGFVPNHSYKDFLLPHTNKKYYIRLDIKNFFDSINSEILSEIFSYYFQVKDVVNDVLLRQFIELVTLNDRVPQGAITSPIISNIIFRQLDLRIRKYCAKFNITYTRYADDLLFSSDNPYLHKDFFIKKIKYIVSTKGFQLNKGKVRYDKDFISLNGFVVEKNIRLSRKKLKNISNTLFILERYKNKFNLNIVLAEINKMQLKKEISSISELINYLAGYRSFLIQLLDKENLENFENEKFLKYINRIQTAIIFLDSQ

SEQ ID NO: 5076 - protein, 334 aa, Bacillus sp.
  source 1..334: note = Related to JADILK010000060.1
MQIFLYREDFFYNKVLSSSKKAVDEIIKNKDKFYQEKIIPKKNGYRTLSCLKKDSSLSKIQQSIRSNFLNKISIPDYVYGFVPKHSYKDFLSPHTKRKYYIRLDIENFFQSIDPDTLKEVFAYYFQINHVTNEELLKQFIELVTLDNKVPQGAITSPIVSNIVFRQLDLRIRNYCKKFNITYTRYADDLLFSSDNPYIHKDFFIKKIKYIISTKGFKLNKNKIRYDKEFISLNGFVVENNIRLSRKKLKNLSSSLFILDRYKNKFNLNEVLMEINKIPFKKEINSIGSLINYLSGYRAFLIQLLNRENLEGDENKKFLRYIERIQNAIIFLDSQ

SEQ ID NO: 5077 - protein, 333 aa, Bacillus mycoides
  source 1..333: note = Related to NZ_CP072062.1
MQIFLYKEDFFYKKILLDSKESIQEIIKDKNNFYRKKKIPKKKGYRTLCCLERDSSLYKVQQSIRKNFLNKISIPDYVYGFVPKSSYKDFLVPHTGKKYYLRLDIQNFFQSIDTKVLKEVFLYYFRLKDNNEETLNNFVELVTLEDKVPQGAVTSPVISNVIFRKLDLRIYNYCKKFNVTYTRYADDLLFSSDNIYIHQEFFIKKIKYIVSTMGFEINKSKSRYDKDFISLNGFVIDEDIRLSRKKMKNLSSILFVVEKHRNRFNLGDVLTEIQSLIHNKQIDSKHSLIHYLAGYRAFLIQFISKEQKTDLGNKKIFRYIERIENTILFLYSL

SEQ ID NO: 5078 - protein, 334 aa, Bacillus sp.
  source 1..334: note = Related to NZ_NIST01000001.1
MQIYIYKEDFFYNKILSTSKTQVEEILNDKNRYYTKRKIPKKNGFRTINCLEKNSALSKIQQSIRLNFLNKVSIPNYVYGFVSGQSYSDYLKPHVRQKYFLRLDIKNFFENITSQTIESVFSYYFRLNTNTNNDEELQFFIDLVTLNGKLPQGAITSPTISNIVFRQLDIRINKYCKKFNINYSRYADDLLFSSDNDFLHKEFFIKKIKYILSSRGFEINKHKIRYEQDSISLNGFVIEENIRLSRSKLKGLSKVLFIIDKHKNNLDTTKVISEINDGGFNKEIKNKYSLLNYLAGYRAFLLQFLDRENLEDYNNKKINRYVIRIQNAIELLYQ

SEQ ID NO: 5079 - protein, 333 aa, Virgibacillus sp.
  source 1..333: note = Related to NZ_CP007161.1
MQIYIYREDFFYNKILATSKSLVEEILKDKSKYYTKRKIPKKNGFRTINCLEKNSALSKIQQSIRINFLNTISIPNYVYGFVSGQSYSDYLKPHVRRKYYLRLDIKNFFENITNDTLESVFSYYFRLNDNKNNEELLLLIDLITLDGKLPQGAITSPTISNIVFRQLDIRINKYCKKFNINYSRYADDLLFSTDNKFLHNDFFIKKIKYILSTRGFELNKHKIRYDQDSISLNGFVIEDNIRISRSKLKGLSSTLFIIDKHRSNFDITKLLSDINNSGLNREIKNKYSLLNYLAGYRAFLLQFLDRENPEEYYNKKVSNYVIRIQNSIELLRG

SEQ ID NO: 5080 - protein, 338 aa, Priestia megaterium
  source 1..338: note = Related to CAKKMH010000024.1
MLGYIYTEDFFYKKLLSSEKKIVKNTLLIKESFYKERDLSKKGGTRTLSCIEKNSSLYNLQNNLRSNFLNNIPIPDNVKGFVPGHSYRDFVIPHLNNKYYLRLDIKNFFDNITFETVKEVFGEYFKLDNASNNNKLLETFAEIITLRGSLPQGAVTSPTVSNIIFRRIDIRIARYCKKFNINYTRYADDLLFSSNQSNLHKGFFIKKIAFILRDLNLKINSSKIKKTKNYISLNGFVVDKDISLSRKRKSDLTKILFIIDKNKAVCSTDALLFILNTESYIHKSYFFKDKWSLVNYLSGYRALLIDWLPINKETMNYEKSKKLITRIEKVIDFLLGEN

SEQ ID NO: 5081 - protein, 331 aa, Bacillus mycoides
  source 1..331: note = Related to NZ_CP031072.1
MIIIFIYKEDFFYDYVLRNSLEEINKQIIDKQNYYYTVKIPKKGGIRVLNCIKQKTPLFELQNLLKVNFLDKIPIAENVFGFVKEQSYKDFLVPHTWENSRERYYLRVDIKDFFGSITNDTILEVFDYYFKTNEKSSKEMNELLMQIISLNGCLPQGAVTSPVVSNVVFRQLDIRIQKYCEKFDVTYSRYADDLLFSSEKLKLHDKFFIKKINSILMSSNFKVNDKKIIKTESEISLNGFVVGKNVRISRSKKRDLNRILFIYEDKKPKNIKDFLDLLNSNKFKNRVKVNNKYFNDKNNLLNYLNGYRSFLINWLNNNSSSIEYKKQKKVY

SEQ ID NO: 5082 - protein, 355 aa, Bacillus cereus
  source 1..355: note = Related to NUYK01000018.1
MRKYSFNFEVIIIYIYKEDFFYEYVLRNPLEEVSKQIKNKQDCYYTVKIPKKGGVRVLNCIKQDTSLFELQTSLKVNFLDKIPIAENVYGFVKEQSYKEFLFPHVWDNGKKRYYLRVDIKDFFGSITSETLIKTFKYYFKTSDKVSKELNELLMQIISLNGVLPQGAVTSPVVSNIVFRQLDIRIKKYCDKFDIIYSRYADDLLFSSSSMRLHDKFFIKKINHMLKSLNFNINTKKIKKTESEISLNGFVVGKNVRISRSKKRDLNRVLFIYKDQKPKNINDFLNLLNNNKFKSRIKNNNNKYFEDKINLLNYLNGYRSFLIGWLHNNTLSVDYEHQKQYIERLEEFILNVNRMN

SEQ ID NO: 5083 - protein, 355 aa, Bacillus cereus
  source 1..355: note = Related to NUPV01000049.1
MRKYSFKVEVVIIFIYKEDFFYNYVLRNNSLEEINNQIKNKQDSYYTVKIPKKGGIRELNCIRQHTPLIELQRSIKENFLDKIPIAENVYGFVKGQSYKDFLTPHIWENGKKRYYLRVDIKNFFDSISEDTLIKTFSYYFKATVKASNTMNKILMQIISLNGNLPQGAVTSPVVSNIVFRKLDIRIQKYCDKFNFTYTRYADDLLFSSTSTRLHDDFFLKKIKYILKSSDFKVNNKKIKKTENEISLNGFVVGENVRISRSKKRDLNRVLFIYETYKPKRMEDFLVLLNSSKFSSRVEFNDKYFNNKINLLNYLNGYRSFLISWLHNSTSSKGNNKQVEYIERLENLILELNRMS

SEQ ID NO: 5084 - protein, 345 aa, Ectobacillus panaciterrae
  source 1..345: note = Related to NZ_AUMR01000034.1
MIIIFIYKEDFFYDYILQDSLEEIKKVIENKENNYYIIKIPKKDGLRKLNCIKKETKLYQYQTLIKNKFLNRIPIAENVYGFVKGQSYKDFLVPHTWENNKKRFYLRIDIKDFFGSINTDTLRQVFRYYFKTDENASNEMIDLLLDIVSLDGFLPQGAVTSPVISNIVFRQLDLRIQKYCNKLNFTYTRYADDLLFSSINKRIYDPFFIKMISTILKSRNFKINHSKVKTSDEEISLNGFVVGKNIRLSRSKKRDLNRILFIFQDQKPKNITDFLSLLNSKKFKSRINVNNEYFSNKTNLLNYLSGYRSFLISWLPENKSSPDFKSSKIYIKRIEELILNINNMN

SEQ ID NO: 5085 - protein, 323 aa, Bacillus glycinifermentans
  source 1..323: note = Related to NZ_CP095476.1
MKEKIKDKQQNYYLKDIPKKGGRRYLNCIEKETPLYVYQTSLKNKFLNNIPISENAYGFVKGRSYYDFLVPHTRGNNENGRYFLRIDIKDFFDSITTDILEETFKYYFKTDEKSSNEMVGLIIDIISLNDVLPQGAVTSPVVSNIVFRQLDIRIQKYCNKLKVVYTRYADDLLFSSVNNRTHEPFFIKMISNILKTLNFNINFSKIKKSEEEISLNGFVVGQNIRISRKKKRDINRVIFIYKDKKPKTTSEFLTLLNSQIFTTRTRKNNEYFSSEISLLNYLSGYRSFLISLLPRSKQSIYYKNMKRYINNLEELILNIINLE

SEQ ID NO: 5086 - protein, 345 aa, Chryseobacterium sp.
  source 1..345: note = Related to MWZC01000789.1
MRIDSLNKFEKKVLRGSITEYNESLTDDSINQAYHTKIIKKNDNSERTLQCIDSNHDIYKIQKKLKNNFFDFIPLSNHAYGYVKGKSYYDYLTPHIKKKFYLRLDIKDFFNSIKEKKLREVIEYDIDNIKINEDTTLVDFLIKTVTFNGSLPQGAVTSPVLSNMVFRVLDIRISRYCRKFGIEYSRYVDDLLFSSNDLLIHKKVFTNGITKILKSQGFYLNHNKLRKSKDEISLNGFVVGSEIRLSRKKTALLSALIFCYQNTQKKTFDNLSTEFKKHFGIDNEKIINADRLHNYLAGYRSFLLGLLPFDSVGVLPDNMTKINQKYLIKINEIEKLLKLTSKEMN

SEQ ID NO: 5087 - protein, 340 aa, Paenibacillus polymyxa
  source 1..340: note = Related to CP049783.1
MRIESLSKFEKKVLRDSVSHYVDLLTEEQLLTAYYTKIIKKKDKSDRVIHCIDNEHLIYKIQKQLKNNFLDFIPLSNCAYGYVKGKSYYDYLKPHVKHGYYMKLDIKDFFHSIKEKELREVLKYYVDDVSINESLTILDFITKVVTVNEFLPQGAVTSPVLSNIYFRFLDIRISRYCRKFGINYTRYVDDLLFSSDNLFIHKRVFINGITKILKSQGFQLNPKKVRKTKSEISLNGFVVGENIRLSRKKTAIISSLIYYYQCSPNKTLEELLTEVEKNLEIKIKISNLHNFLAGYRSFLLGLLPFDSVGVLPEVITRTDKKILYKINEIEKILDLTAANI

SEQ ID NO: 5088 - protein, 342 aa, Cytobacillus gottheilii
  source 1..342: note = Related to NZ_CP071709.1
MHIEDLNTFETKILRESTKTCVEILKVEKISKAYYTKTISKKNGMKRTLHCINNEHILYKLQGNLKRNFFDYIPLSSHAYGYVKGKSYYNYLEPHVGNDIFLKLDIKDFFGSIKENKLREVLGYYVDDINVSDNFTLIDFIVKVVTVDGKLPQGAVTSPVLSNILFRHLDIRISRYCKKFGITYTRYVDDILLSSASFYLHKKVFVNGIKKILKSYDLYLNTNKIIKTKNEISLNGFVIGKEIRLSRKKTAFISAIIYCYQQTNKKNVDNFIKEIKEHFKLTDSTEINLLWLHNYLAGYRSFLLGLLPFDSVGVLPEHLSKSNRKLLYKINEIEKILDLLIL

SEQ ID NO: 5089 - protein, 339 aa, Sporomusa sp.
  source 1..339: note = Related to LT608335.1
MKIFSLDYFENRVLKEKIETLIIDPVEKDSCYTQIAVKKRAGGIRTLSCIHLYSRVYHSQKRLKENYFDKIPTSDFCYGYKKGLSYKDFLAPHVDSKYFLRIDLKDFFGSITCNLLSEVLTSYISCLPVNNTTLLDLIIDIVTLDGKLPQGAITSPTLSNIAFRQLDIRIYKYCEKYQVIYSRYADDLLFSSNNMVIHKLFFLKRISNILNSKGFSINRDKIVKATEQISLNGFIVGSELRISRKKRRLLSVILYCFDKYKPRTYNILLNHVNAELGAKPIKTTEYLNNFLSGYRSFLIGWLPYDSLGCLPSEAFLSEFDKKNLRLINQIEYILKKFNP

SEQ ID NO: 5090 - protein, 348 aa, Bacillus thuringiensis
  source 1..348: note = Related to JACYOH010000011.1
MKIYKVDYFERQIMNNEYSTEDLLDVFLKKEEHYNLYVIPKKKNRGTRKLYCLSKNKELYRCQQLLKVNFFDRIPVSDYCYGYRTGKCYKNYLEPHIGKKYFLRLDIKDFFDCIGKDIIRDFLLTYVSEDIENTILGKEISFGLLDLITELVTINGHLPQGAITSPVISNLIFRSLDIRIYRYCCRYGITYSRYADDLLFSSENSVLHKNFFTNKIQHILKSGQYNFDINYRKVKKCRGEISLNGFVVGENVRLSRTKIKKMNTIIHVFKKEKDLDKYNILIELKKNYNLVFENVVDLNNFLSGYRSFLIGILPFNSLGELPNNINRYDTKNLRIISEIEGILEKVNK

SEQ ID NO: 5091 - protein, 325 aa, Bacillus cereus
  source 1..325: note = Related to NZ_CP023179.1
MKKNAEISKITNRKIQCYFRVSIPKKGGERIIYCINPSCNLRTLQQNLQRNFLNRIPIPNNVFGFKKGYSYKDFLEPHVNKNYYLRVDIKDFFNSISKELIYDVLTNYLKMDEADNKEVLDTVFDIVSLHGKIPQGAITSPSIANVIFRQIDMRIKKYCKVFNVEYTRYADDMLFSSDNEYLLKPYFIKKIAKILFSKGFRINSSKIKKSNNGQIVLNGFVISDSLSISRKRLSDIQRVLFLYQKGGAPVSISIFLDRINSEQYLYRKKMNGKYFPTRGSLIDYLSGYRAFLIQWLPEDKNSNVYEKLTTLINRIQYLLINIEEI

SEQ ID NO: 5092 - protein, 338 aa, Pontibacillus yanchengensis
  source 1..338: note = Related to WMEQ01000013.1
MFIYNEDFFYGKILNCRKDALEDILSNKSDEYQERIISKKGGKRYLSCLSDTSSIATLQRGLSNKFLDHIPVPDYVYGFIKGKSYKDYLVPHKNREFYLRVDIKDFFSSINKDLVKEVLDYYIRTDNDTLNKNLIDIIYDIVSLNDSIPQGAITSPSISNIVFRSLDIRINKYCRRFGITYTRYADDLLFSSNNSFLHNKYFLKKISHILQSKRFNINSNKVIKSNKIISLNGFVVGEKIWLSRKRLHDINKVLYLYKTNTFSNINSLLYVLNSSDYIYRKTNNNSFTSKMEIVNYLAGYRSFLLQWYEFQNGDNKNFKLLNKIDEIERILIEIEQLK

SEQ ID NO: 5093 - protein, 379 aa, Clostridium puniceum
  source 1..379: note = Related to NZ_LZZM01000127.1
MKWIIIMAIRTIYDEEFFYKNILREEKENVIEIINKKKEYYYNKTINKKNGVRNLKCIIEDSPLYFLQKNLVNYFLNNIPLPLYVYGFRKGVSYKKYLEVHLREEVDNNYLESNSRKDVSKDCLQPHLRNYIGKKTCYIRIDIKSFFDSINLDLIKKIFSNYFTPKDSFLKDELLEIFSQIVTLDNLLPQGAVTSPTISNIIFIREDIRIYNYCNKLNIKYSRYADDMLFSSKHNKVFKTYFINMITKILDENGFKINYSKTKKGLDEISLNGFVISNCISLSRGRKHDISKILYIFDTLKPFSTSTYLNMLNDKDNNFKYIKYKADCYFSSRGKLINYLCGYRSFLINWLPRENEELTYNKVKRLIDRIQEVILKIQE

SEQ ID NO: 5094 - protein, 344 aa, Cytobacillus firmus
  source 1..344: note = Related to VDEM01000162.1
MIVIYIYKKHFFINKVLGTKTKNIYDLVEEKDKHYFNKTIQKKNGVRELKCLKEGDFKHIQQNLKKNFLDELPIPDYVYGFVKYSSYKDFLLPHIGKMYYVRLDIKDFFPSVKKDLLFQAFKSYFKLDGSDNDDVLNLFVDIVTLNEELPQGAVTSPVISNIVFRSLDIRIKYYCDKLGITYTRYADDLLFSSTNEQLHSRYFIKKVSKILGDKKFKLNTDKILKYTDEISLNGFVVGEKVRLSRKRKSDIAQVIRLCRNVKKPVDFDTLLSQLNQLDLRYRKKTVSDNGEEVYFSSKETLANYLLGFRSFFIDWLNTNLISDKREIKFFIDQIETFIDKHYAI

SEQ ID NO: 5095 - protein, 768 aa, unidentified
  source 1..768: note = Related to JADPIE010000003.1; note = Halanaerobiaceae bacterium Z-7014
MVFIKIYSKDFFYKYIIEDKEQDELAEIISNKMYSYLRFEYEKKNGYRFIYSMKKDTGLYEVQTKLKDNFLNEIPIADHVYGFVSGYSYKDFLVRHCYEDKNKTTYFLRLDIQDFFESIKTKMIKETLEYYIKIKDEDNPTVLDLINDLVTINDFLPQGAITSPVLSNIVFRQLDIRFQKYCRKINIKYSRYADDLLFSSKESYLHKRNFTNKIRHILKDKGFKLNFTKTIKSQNEISLNGFVVGNNIRLSRKRNHDISMILYLYDNQSVDEFINILNKENFIYRNKKYDMKTNDEKYFINQDDLINYLAGYRSFLIDWIPIKDGKHKEKHIKLIKNLEVLLEDLSDINNEYNYKGDKMSQKENIPLSVPNLSKDILPNIEETIESGWVSTGGKFIDQFEEKLADYVGVDQAVSCQSGTAGLHLAMRVLGIGPGDEVIAPTVTFIAAVNPIRYMGAEPVFIDCDSDDGPAGPSAEPTNAFTNEGSVNMDLDKLEEFLENECELTDGRVINKSSGREIKAINIVHVFGNPVNMERLIDIAREYGLKVIEDATEALGSYYTEGRYAGRYCGTIGDIGVYSFNANKIITTGGGGMIVARESDLLEEAKFLSTQAKSDRLYYRHDEVGYNYRMTNIQAAFGTDQIDRLEGFIATKIENYRRYKEAIAEIDGLELMAFNEGCRPNHWFYSVLVDPDLYGIDRDELLQELNAVGIQTRPLWGLIHQQKPYLDCQAYRIEQAPYYQQNLINLPCSSNLTAEQVKTVVRYLREFKS

SEQ ID NO: 5096 - protein, 333 aa, Halanaerobium congolense
  source 1..333: note = Related to QBKJ01000001.1
MEGIDKENLLEIIANKENHYGKNEISKSNGKRIIYSIDNNSQLYKMQKHLVNNFLSQIPIADHVYGFVKDYSYKDFLLRHIHDKNNKTYYYLRLDIKDFFGSINSNLIEETLDYYIKVNEAENGNSIIEIINGIVTLENFLPQGAVTSPVVSNIVFRQLDIRLQRYCRKLDIKYSRYADDLLFSSTNSNLHKNNFFKKVSYILKDKDFRLNYSKTIKDENEISLNGFVVGNNIRLSRKRKKDISKVLFLYNNKPDNQSFVSYLNEHEFLYRDKIGSSYFLNKDDLINYLAGYRSFLIDWIPVKEGRHKEKHINLIENIEDLLENISDVNNEYN

SEQ ID NO: 5097 - protein, 339 aa, Halanaerobium kushneri
  source 1..339: note = Related to NZ_FTNC01000003.1
MYIKIYNLNYFLKKILEISEEKLKKTLTNKKNAYSKYKIPKKNGYRKIHSLKSGDLSHLQSNLKKNFLDNIPIADNVYGFVEGYGYKDFLIPHTYKKYYLRLDIKNFFESIKTNKLEIIFDYYITASNDEEKDKILDYLISIISLNDYLPQGAITSPATSNIFFRELDIRIQKYCKKLGFDYSRYADDILISSNNDKLPKDFVIKAVNKIVSDRKLKLNYKKIIREKNEISLNGFVVGKGIRLSRNRRYDISKINFLFKSNKSVSQYKFVELLNNANGGFKYRYKNNNGKFFSDIDDLINYLAGYRSFLINWIPDEDNKYYNKHINLLNDIEEILLWLN

SEQ ID NO: 5098 - protein, 323 aa, Caldibacillus hisashii
  source 1..323: note = Related to NZ_JAHLOO010000081.1
MSKTLEKKENFYEVIEIPKKNGIRVIHCISKNSPLYYLQDQLRKNFLEKIPCSTSACGFIKGSSYKDFLIPHQNMEYYLRIDIKDFFNSIKKDKIKEVLRQYLKLNNEKSNEILNYISELVTIDSYVPQGAVTSPQLSNIIFRKLDVRLQKYCQNLNINYTRYADDLLFSSKFGKVHLPFFLNTIRKILLSENFLINKSKIIKTRKEISLSGFTVGRNIRLSRSRKGDLTKVLFLFNQGGKPKSINQLLERLNSETYRYRMVREERNNNYIYFTSKESILNYLAGYRALLIDWGNHNKYKSLKDESKLILRIEKIIKDISQLS

SEQ ID NO: 5099 - protein, 343 aa, Paenibacillus thalictri
  source 1..343: note = Related to NZ_SIRE01000011.1
MNHIKIYDESFFYRAILEIEHESMISKVVENKINSYKEITISKHSGSRTIHCINNNDQLYGIQRNLVDNLFSKVALPDNICGFVKKRSYRDFLVPHLWNNNEKRYYLRLDISDFFGSINSAKIHDALDGLIDLDEEKKVKMLKLISEICTLNDILPQGAVTSPAISNIVFKRLDVRIRNYCRKLNVTYTRYADDLLFSTTKEKTLGGYFVKKIVGILKSSGFILNRKKVKRGKFEISLNGFIVGENIRISRKKKRDIAAFFFLYIRGGKPKNIVEILERLNDYDFRFRQKLFTSKNDIINYLAGYRSFIIDWLPQETESNVHKDLKKIIDKIQETLEEIEELE

SEQ ID NO: 5100 - protein, 343 aa, Paenibacillus glycanilyticus
  source 1..343: note = Related to NZ_BNJP01000020.1
MTKIKIFDENFFYRSVLGIEDEHIFNNLVITKFTSYKEIAVPKNGGIRTIQCIDKENQLYKIQRNLVDNFLSKIHLPDNICGFVKRKSYRDFLIPHAWENNNKRFYLRLDISDFFGSINSAKIHNSLNDLIDIEEDKKNKILNMISEICTLNDVLPQGAVTSPVLSNIVFKRLDIRIRNYCRKLDVIYTRYADDLLFSTTKERSLGGFFVKKIIGILKTSGFILNRKKVKRGISEISLNGFIVGQNVRISRKKKSDITAFFYLFIYGGRPKTIKDLIERLNSYKFQYRRSLFVSKNDMINYLAGYRSFLIDWLPEDTETKVYKELVKIINKIQNTLEEIEALE

SEQ ID NO: 5101 - protein, 347 aa, Brevibacillus laterosporus
  source 1..347: note = Related to NZ_MBFH01000016.1
MFVGDIILIYKKNFYYQTVLGVDDSSMVKEVIENKEKHYKPIVIYNRGKKREINCIEEKRELYNFQSNLAKNFLNKLPLPDNVCGFVKNRSYRDFLVPHINSHNSDRFYLRLDIKDFFNSISESHLREVLQEYVTIIDKEDNEEVILSMVNLVTLNGSLPQGGVTSPVLSNLVFRSIDIRIRNYCRKLDVTYTRYADDMLFSCDKEKVINGFFIKMIISILKSKKFVLNRRKVKKGASQISLNGFVVSHNIRISRKKRQDINRFIFLWEKGGTPKTIDELILRLNSFDFSYRIKDFNSKYSVLNYLAGYRSMLINWLPNEFDDEWYQQSERLIRKINMIIMKIEQLE

SEQ ID NO: 5102 - protein, 329 aa, Bacillus thuringiensis
  source 1..329: note = Related to CM000757.1
MLGIEKDENFKIIIEKKANNYKNLLISRKGKQREIKCINKESQLYRIQANLVQNFLNEIPLPDNVCGFVKKRSYRDFLVPHINNSPTDRYYLRLDIKDFFDSITEEKIEKSLQEYVTINDGAENKEVLKDIIDIVTLNGCLPQGGVTSPVISNIIFRRLDIRIRKYCSKLNITYSRYADDMLFSSQHNRLFDGFFVKMIAKILKDSNFVLNRKKIKKGVSFISLNGFVVGKNIRISRKKRQDINRFIFLFEKGGNPKDVNELLSRLNKEKFYYRSRNFESKSSVIDYLAGYRSMLISWIPEDSDEAWKENVKNLLDKIQKIIMKIEYLK

SEQ ID NO: 5103 - protein, 349 aa, Bacillus subtilis
  source 1..349: note = Related to NZ_CP018173.1
MAFYIYHTEQFFQNIIRDSSANIQASLEEKEGSYEKFSISKNSGTRTIYSIKSESKLKKYQKNLLSNFFEYINISDQSYGFVKERSYKDYLQPHINNNLYKDRYYLRLDIKEFFESIKRETIKEELSFYFRLKDSKQTEEILKLVTDIVTLNDSIPQGAVTSPTLSNIIFRELDVKINAYCNQLGVVYTRYADDMLFSSFREHDKFAQPLIKVIYKILKTKGFKLNYKKTIKGKNQISLNGFIVGDNIRLSRKRKKDINNIIFHYYKSGKNIEQFLNSLSEVDLIYRHKNINSLGSLVNYLNGYRAFLIDWIPVNVSNDKISKHSKNIDTIEQIVERLENFKNSIRKLK

SEQ ID NO: 5104 - protein, 351 aa, Pseudoflavonifractor sp.
  source 1..351: note = Related to NFKO01000003.1
MRYLLFLFAWEDSMYTIESFCNAIWETSYSKVSQGVTKEEYGEFEIPKKGGSRVINYLGRDTSMWNLQHKLLKNFLEKQDLPVCVKGFRQGESYHSFLAEHIGSKFFLRIDISSFFPSITEKQIKNELSRLLACNSNEEKEKLLKLICDITTLNDCLPQGACTSPAISNLVMARIDQRITKYCQVFDIRYTRYADDLLFSSEGFNFKSKNWFLKKIKYILSSQNLKLNYSKIKYGENELVLNGYIISNKGICLSRSRLSDIRHVVSFAKKNRNLIEEFGSERFLQEINKLPLRHRDLTEYPFNTVFQFIQYMCGYRAFLISLVDRSYEETSFQKQLQHLIRKLETQITHYT

SEQ ID NO: 5105 - protein, 338 aa, unidentified
  source 1..338: note = Related to DWWA01000023.1; note = Candidatus Ruthenibacterium merdavium
MFTIESFCNAIWETSYAKVSLNILKDDYSEFEIPKKDGKRKISYLDKDSGLWSLQHKLLINFLNKQDLPVCVKGFKKGENYRSFLAEHIGAKFFLRIDISSFFPSITEKQIKSELARLIICNSDEDKEKLLGLLCDITTLNGSLPQGACTSPAISNLVMARIDQRITKYCQVFDVRYTRYADDMLFSSHVFDFDKKKWFLKKIKYILSSQDLKLNYSKIKFSQDQLVLNGYVISGDGIRLSRNRLSDIRHVVSFASKNYMLIQNSESQKFLQEVNKLPLQYRNLVDYPFKTVFQFVQYMCGYRAFLISLVDQNYAETSFQKQVQRLIRKLEIQIVHCT

SEQ ID NO: 5106 - protein, 390 aa, Faecalibacterium prausnitzii
  source 1..390: note = Related to NZ_CABVEO010000001.1
MAMPAAGVRRDHSSMCCVKHALRDLLGKYLYTALCFFLLEKNAMFTTESFCNLVWGTSYLKVLRKISKEDYNEFEIPKKGGTRTINYVDRQSSLWKLQRELLNKYLVKQDLPICVKGFKKGENYKSFLSEHIGAEFFLRIDIANFFPSIKISSVKRELALIIRCDNDAEEEKLLDLIGEIVTLDGRLPQGASTSPVISNLVMARIDQRITKYCQVFNVQYTRYADDLLFSSNTFDFENKKWFLKKIKYILKSQELSLNYSKIRYGHKEIILNGYVISNNEIRLSRNRLFDIRQIVKFTKENVPLIRSIGLDEFLSKANKLPLKHRNLKEYPFKSIFQFSQYLCGYRAYLISMVDTNCLQTSFQKELQRLIRKIEAQILLLEQALPIRNSN

SEQ ID NO: 5107 - protein, 329 aa, unidentified
  source 1..329: note = Related to JAGARU010000066.1; note = Clostridia bacterium
MIWNYSYSTVQSKIAQKKYKTISIPKRNGFRELSFLDPKTDLHMLQSGLVNFLKKIELPVCAKGFVKGESYLSYLEHHIGSIHFLRLDIKDFFPSITRKLIEREISCFMSFDSEEEKKKIVKLVSDLVTYHNCLPQGAVSSPVISNIVMIRIDQRILKYCQVLGIKYTRYADDLLFSSEEFDFNDKKWFLRKIKHIVSDGNFKINYGKLKSSTREISLNGYVISQEGLRLSRQRLNDIKKVVSFASSNRQMLQSDPNSYVQALNQLNLEHRGLSVYPFKSVYQFYQFLCGYRSYLISFLKYDIESQFRKKLCKLLDKLEKIIKQIASVL

SEQ ID NO: 5108 - protein, 334 aa, Acetivibrio sp.
  source 1..334: note = Related to JAHLPV010000019.1
MTIESFCKVAWNLSYNQVRSSITKKDYIQFDIPKKNGVRTITLLPEGSSLYVLQRNFNKYYLNKQGLPICVKGFVRGESYISYLESHIGAKYFVRMDIKDFFPSITSEIIKDTFSHLLSFDTDEEKEKILELISEICTYEGVLPQGVPTSPVISNIVMTRIDQRITKYCQILGITYTRYADDMLFSSNMFDFKTKKWFIKKIKFILASMHFKINYSKLKFSENEISLNGYVVSDTGIRLSRSRLMDIKKAITFSKNNHTLLKTDPTGFLRLVNETSLEYRNLKVYPFNSVFQFTQFLIGYRSYLISFLRYDIDSTFRKKAEKLIRNIEGELEFY

SEQ ID NO: 5109 - protein, 338 aa, unidentified
  source 1..338: note = Related to DWZO01000095.1; note = Candidatus Massiliomicrobiota merdigallinarum
MFDLEQFCQNIFGKGFDEIKEKINKEDYSSFVIPKKRGMRQIIALPKNSELRRMQKLLLDKFFANYSLPIPAKGFAKHESYKNYLMPHMGANYFLRIDISNFFNSIKFEHVEELLKDLFVFMDKDEKSKVIDLIWDIVSYNDSIPQGGVTSPIISNLIFRKLDQRILKYCQLFDIEYTRYADDLLFSSYEFNFMDKKWFLKKIKYILGSRKFRINYRKIKYGYKEISLNGFIVSNRDIRLSRSRLFDIRHIVSYIRNNEDAKRKDKCLLGINNLRFKHYDIEKYPFKSYYRVIQFLCGYRSFIISWIDDCIPNIANQKKLRKLVNEIEKAINILSEYI

SEQ ID NO: 5110 - protein, 343 aa, Coprobacillus sp.
  source 1..343: note = Related to QRWY01000002.1
MNAKEIFCLKIIGDSNFEILTVLSNKKNEYEKIEIPKKKGYRKIYCLKSNSKIKRYQQNLINNFFSHYPIPVVAKGFVEGENYFSYMKEHVGSNYFLRIDIKDFFESIKYEHFENFMYEMETFKDKNNEGIIKIIWNIISYNDYLVQGAVSSPMISNLIFRRTDQRILKYCQELGIKYTRYADDLLFSSSNFEFKKKKWFLKKINYILRQNKFQMNCSKLKCCDYQISLNGFVISYDNIRLSRKKYHDISQVVWYVNKSDIYEKNFFDELHKLGFYNNKLRTINTYYSLLQYLCGYRSFLIGSYKECEMGDDTKRKIEYIIKKIDMSIIKVISNKYPTYWVTK

SEQ ID NO: 5111 - protein, 348 aa, Ruminiclostridium papyrosolvens
  source 1..348: note = Related to NZ_ACXX02000002.1
MRIYKEEYFYNSILQCNKQKVLNGLEAKSEAYFKYEIPKANNKKRTISALDKDSLIYELQSNLYKNFFSFQPIPVCVKGFVKGNSYLDFLNAHIYDNYSTYFVRLDIRDFFDSISKETMISTLQEFINIEDVINVIYDICTLEDKLPQGAVTSPLLSNLVLRRIDQRVTLYCQSLGVAYTRYADDLLFSSNEIDFSQQKWFVKKIKYILGSIDLKINYNKIKYGKDLISINGYVVNSNVNLSRKKLYNLTSVLYFFNKNKGKYKKVYKVDNKIFMNTNWLHDLNTYLKNSTSTNLEFVSVHKLQNFLIGYRAYLISCISYSSENKVNQYSSKIKHIESIINKLLELNQ

SEQ ID NO: 5112 - protein, 347 aa, Clostridium sp.
  source 1..347: note = Related to NC_016791.1
MKIYKEEYFYNSILKHSKETVLKGLGAKSEAYFKFDMPKANNEKRTISALDKDNLIHELQSNLNNNFFSLQPLPICVKGFVKGNSYLDYLNAHIYDNSSTYFVRLDIKDFFDSISKEVLISTLREFVGIEDVINVIYDICTLEEKLPQGAVTSPLLSNLVLRRIDQRITLYCQSLGVTYTRYADDLLFSSNEIDFRLKKWFVKKIKYILCSIDLKINYKKVKYGKGLISINGYVVDNNVNLSRKKLYNLTSVLYFFNKNKGKYKKIYKVDNNIFLNRTWLEDLNTFLTNSTSSKLIFGSIQKLQNFLIGYRAYLISCIGYSSEKKIDQYSSKINHIESILNKLLQLN

SEQ ID NO: 5113 - protein, 346 aa, Acetobacterium woodii
  source 1..346: note = Related to JACQZP010000009.1
MFIFDENYFYNIVIKCDRNQLLNIIKEKNLQYESFEIPKNDGMRVISAIKKNSQLVRLQKNLNSNLFSKIPLPVCVRGFVSGESYNSYLVEHIGKKFFLRADISAFFDSIKKDTIISMLNEFISVINVIEQISEVVTLDDKLPQGAITSPSVSNLIFRRIDQRITKYCQELNVTYTRYADDMLFSSDKLNFNESTFFYAMIKKILKENGFACNNKKKKIEIDEISLGGFVISNDVHLSRKKLENINKLIYFFRKDKTFEKQKYLVDSLVFQDKHWLNEVNNLKLKENISFKCFSSNNQLIDYLCGYRAFIISIVQANDNNTENIKQLRKKINNIEMIIEAIIKHST

SEQ ID NO: 5114 - protein, 364 aa, unidentified
  source 1..364: note = Related to QXWO01000034.1; note = Lachnospiraceae bacterium
MISVNRYLKLYSKKYFLTRILECSEEELAQAKGEKGIVCIEDRIPKKGGFRSIVSVKPGSSLAKLQKKLYKNYLSQIPVSTAAKGFVKGCSYVNFLEEHVGHSYFLRVDIRDFFDSITKEKLAECLEPFAEKEIADEIMELCTWNGKVPQGFSTSPALSNLVFRRIDQRVRKYCRSYHKEMDRRIFYTRYADDMLFSSAGTLEFDFCKNKNFKRMIAHILHQNGFSCNESKTIYAKGEISLSGYVVSNDVHLSRQKLCNINEVIYQFDQRKSYGSISYSLDKATVNIKNIMCNLNKRKMKKADGTVIQFDSLSDLVYYAAGCRSYLMQIASTEHGDTGYDKQIAKKIRKLEMILDYLSEELGEV

SEQ ID NO: 5115 - protein, 335 aa, unidentified
  source 1..335: note = Related to BLME01000752.1; note = Lachnospiraceae bacterium
MVLYSYEYFLDKILESTQEEVEKAKREKIFVCSEMKLPKQSGFRNIVSVEKDSIMKKLQKNLQKNFLDKLPVCPSAKGFVKGNSYMDFLEEHIGHEYFLRMDIHNFFDSIAEGLLDENLKNFVRDEEEMSPDLEELESGAKGSRIREDIIELCTWQGRVPQGFLTSPSISNLVFRRLDQRIRKYCRAYQKEQKREIFYTRYADDLLFSSQGFDFKRNKNFKRMICHILEDYGFSCNENKTIYQNGQISLTGYVIRKDVHLSRKKLRNINEVLYQFREIIECDERVRSEKIKANLQMILQNLNQKKMKKSNGDPIYFADGNRLIHYVAGYRSFFTL

SEQ ID NO: 5116 - protein, 365 aa, Clostridium sp.
  source 1..365: note = Related to CP085988.1
MKKIYGWDYYCERILRKSQLFIENSLAEKENSYIVFDIRDRGKERTICQVDKTSGLYQLQNNLNRNLLAKIPLSKAAAGFVRGLSYQDYLRSHCGKKFHMRLDIHHFFDHVTEEQVIKSLEEFVQDEKIRENIGEITTFNGKLPQGAVTSPAVSNIVFRRIDQRILKYCQSVRKVREGKKFYQEDLIYTRYADDMMFSSDYLDFRRDLFVYRMIKHILKENGFSLNVKKTYMAEGEISLSGFVVGGEENGCSVRPSRKRLREINRILAYFDARRELDGCPYEADIKKLRDPRVIDNVNLMFPDGSVARFSNKKSLINYLCGYRAFLITFLKGENGQGSSQRALQGKIRNLEKLIDQCQRWWFHIE

SEQ ID NO: 5117 - protein, 365 aa, Lacrimispora sp.
  source 1..365: note = Related to JAJCIC010000020.1
MKKIYGWDYYCEKILWKNDAFIASSLAEKEESYSTFTIGDRGKSRVIQQVDQTSGLYQLQNNLNKNLLSRIPLSKAAAGFVKGKSYQDYLRPHCGKRFHLRLDIRHFFDHVTEEQVVESLKDFVQDERIRINIGQITTLNGCLPQGAITSPAMSNIVFRQIDQRILKYCQAVRKVKEGKQVLYEDIVYTRYADDMMFSSEYLDFRKELSFYKMIKHILMDKGFRLNHDKTYMTEGEISMSGFVVGGEAHGCMVRLSRKRMREINRILNYFDKRAKIDGSPYEVDEEKVKDFRVVDKVNALFPIGKIARFSNKKALMNYLCGYRAFLITFLKGENGQALHQRALERKIKNLEQLIDQCQSRWFGMT

SEQ ID NO: 5118 - protein, 372 aa, Clostridium estertheticum
  source 1..372: note = Related to JAHLDN010000040.1
MKRLYGFEYYAKNILKIDLLNQDEKTKFFNKLETNISESYVKFQIPKKDGMRDICAIDKSSILYTIQKNLNKNFLSKIPLSSVAIGFVKGKSYNDFLAHHIGKKYYMRMDIKDFFGFISEKHIKESLKEFVQESEIIESIVNICMREGELPQGAVTSPTISNIIFRRIDQRIIKYCQSIQNIRIAKKNYNEDIIYTRYADDMLFSSNILDFKENKYFKKMIKNILSNNEFKVNYNKMYYSSDSISLSGFVIEKDVHLSRKKMKNINSILYFFDKRIEYDKTKYNINIDKIEDTQLIKQLNDLNLNTLNGRKINFENIAQFINYLCGYRSFLISFLKMDIRKTDSINLIEKKVKKIEELINKINEINDFRTQN

SEQ ID NO: 5119 - protein, 374 aa, unidentified
  source 1..374: note = Related to CP094680.1; note = Clostridia bacterium UC5.1-1D4
MKIYTEEFLRDGILEIQEQPFEKLLVEKNKWYKCFEISKKDGKREICALSDEESGQKVKRLQKNLLHRFLRKIPIAVCAKGFVKEESYQSFLEPHIGSKYFMRLDIRNFFSSFSEDLIWKGLHEFVENAEALDMICELCTWENTLPQGAVTSPALSNILFRRADQRILKYCQTITERCSKNRYRPEAAGNENTLYYTRYADDMLFSSDFFDFSKEEYFMKMISRILKDYGFELNRDKTVISEDQIVLNGYVVGNAVWLSRRKMRDLKRILYFFRNKNHELYRIDKLKVKKTIESLKELNCFMEKNNSERNNFANSLELINYLAGCRSWLIAILQMRTEDNRTRRNLGKTKVRIEMLLSELSRCEEEKQRWAERG

SEQ ID NO: 5120 - protein, 400 aa, unidentified
  source 1..400: note = Related to SRYA01000068.1; note = Lachnospiraceae bacterium
MYRVRFFHSLSSPGITPIRKFSESACSFPKNIMKIYTLEFLFKILELQPEEFSQILLKKETAYNTFEIPKKNGRRLIHGLDAKDGKPLKKLQQNLYRKVLCKQPTAIPAKGFLKGESYLSFLEPHAGNQFFLRLDIHDFFGSFSEKMIRDNLNSFIEDKEALELVFELCTVSKKLPQGAVTSPALSNIMFARLDQRILKYCQALEQNKREQLHREKESWCNASISYTRYADDMLFSSDFFDFRENLAFLHMISRILGEYGFHLNRQKTMMAEKELSMNGYVVGENIRLSKKKTSELRRILYCLKDQEAETYQLNQELMDDPQKILKKIKQFSSETQKGSRTFSDIHKLIWYLGGCRSWIISVLQTEAKFGKEEKNMVKLIRRIECVLDALQAMTEDPNRR

SEQ ID NO: 5121 - protein, 364 aa, Coprococcus sp.
  source 1..364: note = Related to QRVX01000041.1
MQIYNYKFLLEKILKTSDEKLHAVLEGIEYAYEETEIPKKNGIRVIHMLRKTPEGRNLTNFQRNLVRRFLQKIPIAIPAKGFVTGESYQNFLMPHAGNHYFLRIDIKDFFDSFSEKLMKSNLKEFIQDREALETVFELCTLNAKLPQGAVTSPILSNIFFRRIDQRILKYCQSIEERYRKENTRSEKQGIRRISYTRYADDMLFSSDFFDFGEHIYFLRMLSKILKENGFEINRSKTMMCKGEIGLNGYVVGDGLRLSRRKLQSVKETLYFFRKQDQELYEVDMRKAEDLKESLKKLNEMRRENNKEAREFRSRQDFIHYLAGCRAWMISVLQTEQLLKKDSKRLEKTIQRLEELLKAVEKEEG

SEQ ID NO: 5122 - protein, 360 aa, unidentified
  source 1..360: note = Related to JAFTWW010000008.1; note = Clostridia bacterium
MFINEYDYFINGVLKTSETTLKNVQKDIKANYTTHKIPKKNGERIIHAIKKDSDLYNLQKNLCLHFLDTIPLPKPVIGFVKDENYVRFLSQHIGKRYFLRLDINSFFDTVNRKMLQKTFKEFFPGSDNTSLSTFIDLCTIDGKLPQGAVTSPVISNIVFRRIDQRILKYCQNFDDVYISKRSNKESITYTRYADDLLFSSDIIDFSKNAFFMGMIISILKDNGFTVNKTKTRCSTNEISFSGFVLGRDVHLSRKKLHELNKVIYFFNKADEHSYKKYRLNKAVFTSGDWLAKINSLELEGPFGQKKSFKTPEELLNYLCGFRSFLLLILRENPNGSPHMEQLDKKIHKLEEIIDLILCHT

SEQ ID NO: 5123 - protein, 372 aa, Exiguobacterium sp.
  source 1..372: note = Related to NZ_JACSJW010000001.1
MLIDVYAAFALRTRLIFSEGTYSILTIYSGGNNINIYEESYFYKKILGYESISLPLSLTNKLDAYNSFELSINNKVRNINAINSKSDLFAFQKNLLNNFLIYIPLPNCVCGFVKGKNYLDFLKEHLKKDFYLRLDIKDFFPSLKSENIKDVLDEYIIISDINEKTHVLDTIIDIVTLNGSLPQGAVTSPQVSNVVFRRLDIRIRNYCRKFNISYTRYADDMLFSSNDSRLHKDFFVKMISKILKDNCLELNRSKIKKTKEQIVLNGYVVSNRISLSRNKLKKVNTLIYAYENLDGKKKKPKNFNEYLNRITTLEDFFPSLPSNIEGRRNVIVNYLAGYRSYLLSFDKDTYRDICVTYPNKIKKIEFILKELM

SEQ ID NO: 5124 - protein, 342 aa, Exiguobacterium sp.
  source 1..342: note = Related to NZ_JACSMD010000001.1
MNIYEESFFYKKILEYGLTPPTDITSNKADAYNTFELIINGKKREINAISPKSDLYNIQKSLLDNFLTHIPLPNCVCGFIKGKSYLDFLEAHLKKEYYLRIDIKNFFPSLKAERVKETLSEYIKISNYTKKQEVLDNIVDIVTLNGSLPQGAVTSPQLSNILFRRLDIRIRNYCRKFNVDFTRYADDMLFSSNDDRLHKDFFVKMISKILKDNQLVINRKKLRRGQKKIVLNGYVISNHISLSRNKLKKVNSILYSFENIKGKKLEPKNFLEFYSRLSSNRSIFPDSSLTIEKKYDILFNYLAGYRSYLLSFSKEKHKDTCVDYSGKIKKLEYVLSKLNKWA

SEQ ID NO: 5125 - protein, 320 aa, Rummeliibacillus suwonensis
  source 1..320: note = Related to JAEMBY010000004.1
MLAIIDKNLAYKSFEMTTNGKVRNIDAIDSKSSLYKLQRNFLDRFLIDIPLPDCVCGFVKGKCYLDFLIPHCGKKYYLRLDIKDFFNSLKVDKIRSVLGEYIQVSDLNKKNLILDDIGVMVTLNDSLPQGAITSPQISNILFRRIDIRIRNYCRKFDVEYTRYADDLLFSSNKSKLHDKFFTKMIFKIIKDFDLVVNRKKIKKSEERLVLNGYVIDKNISLSRAKLKNINTLLYCVEYNSGTKAYPRTIIEFFDRLKNVKTCLRLTSDIKKNKSIVINYFAGYRAFLINFSKVGYKDYCKDYTTKIDRIEKALEIIQEIK

SEQ ID NO: 5126 - protein, 442 aa, Peribacillus simplex
  source 1..442: note = Related to NZ_VNKI01000001.1
MKIYSEDFFYKGLLGFDSRTVMKNSLIATNSYQSFELEVNGKKRKIDAIKPNTKLYYIQKRLLKNFLVNIPLPNCVCGFVEGKNYLDFLKPHCNKKYYTRLDIKSFFNSIKSENINGILEEYIQINDEEKKQQILNDFCEIVTLNGSLPQGAVTSPQLSNIFFRRIDIRIRNYCRKFNVEYTRYADDMLFSSNEETMHKDFFIKRISKILKDYKLKLNNKKIIQSENSIVLNGYVVSNKISLSRKKLKKINTFINAFNNSDGKKKKFIGTEDYTYRLTKSKNLSFTMTDDLYINKLKIINYLAGFRSYLMTFSKPNNEDYCEDYFDKINNIEKMLEKLTKEGLPYNDKKSNIAIIIDHVKFGRVNGFNIEVRKINKSSHSNRMLYKHLKMNLNDRTLFVKFYPFPLKLDELINDIDKKALKNRILQNNINEIRYALKINEKG

SEQ ID NO: 5127 - protein, 327 aa, Bacillus sp.
  source 1..327: note = Related to NZ_KK366017.1
MDILDEVPTIEDINEYYDTFNIQVNKKQRTINAVKQGSLLRKLQEKLLVNFLENIPLSDCVCGFVKGKNYLDFLIPHCEKKYFLRIDIKDFFNSLKVNLVRDTLSEYIDIKIPDEKENVIDEIITITTLNGSLPQGAVTSPQLSNILMRRIDIRIRKYCEKFKVEYSRYADDMLFSSETSEIHKSFFIGKLKEILKDINLRINSKKVIKTNEKIILNGYVVSNNISLTRKKLKKLNTLLYTFEYNGSIKKYPQTFTEYIRRLQSVNPILIDLSKGDDWSKVQIINYLAGYRAFLLSFNALSIKDYTCDFSNRIKRTEKMLERLSDIK

SEQ ID NO: 5128 - protein, 306 aa, Psychrobacillus sp.
  source 1..306: note = Related to NZ_CP073315.1
MVNKKVRKINAIKTNSVLHNLQKKISNNFLDNIPLADCVCGFVKGKNYLDFLLPHCGSKFYLKVDIKDFFNSLKESLVRDTLSEYVDIKNREEKDRVLKELIYITTLNGSVPLGAITSPQLSNLLLRRIDLRIKKYCEKFNVIYTRYADDMLFSSNNQEVAKPFFLGRLKDILIDFELKINSKKTIIAENKIILNGYVISSRVTLTRNKMKKLNTLLYTFEYKSGVKRYPRTFNEFLQRLKTVNEELFDLSKSIPETRIQIINYLAGYRAFLLSFNKSSIKDYTCDFSKKIKRTEKMLDILSDIRY

SEQ ID NO: 5129 - protein, 327 aa, Lysinibacillus sp.
  source 1..327: note = Related to NZ_CP091777.1
MNIYSGKSFFKEVFEMKYEDVKKVTDSNIEENYNIVKIPKTKGHREIYCIDDSSELYILQKNILMNFLDDIPISENAFGFVKGRSYIDFLYTHVYKNYKNIYYLKLDLKDFFSSIKSFHIERTLEKHVHTNSSKISKEIIDNIVKLTTVDNKLPQGAVTSPSLSNIVFRFTDIRIARYCEKFGIRYSRYADDMIFSSDRKVIHAPFFIKTIKKILNESNFYVNNRKTKFSIGSLNLNGFRITDKINLTRKKRAKLNTCLYICNNTKKKHVLTKLNLSGFNFSDFEDLANYLNGTRSFLIMIARSSNNNIVINELIKEIEVNINKFLQ

SEQ ID NO: 5130 - protein, 337 aa, Bacillus pumilus
  source 1..337: note = Related to PVQU01000010.1
MIIYSKEFFDNNILKISNEIDYINAIQTKESSYTHKSILKKNRLRNIEVIDRDSLLAKMQINLKDNFLNIIPIPHFVYGFVKGKSYKDYLIPHINNMSKNKYYIRLDIGNFFDSVTVELIKNALSEYLSLNDLQEKDQIILNIADLVTLDGKLPQGAITSPVISNIVFRRLDLRIKKYCDQLNITYTRYADDMLFSSYDNILLKNNLINLVRAVLNDYGFELNFDKTIRTKNFISLNGFVVSDNLSLSRKKLIEIKRILFILEKNKKNKNSLKILEEINSFGKYKKRNKFTSEEALHDYLAGYRSFLISLLPDNDDLWKEKCISTINRIEKAISVSF

SEQ ID NO: 5131 - protein, 347 aa, Listeria booriae
  source 1..347: note = Related to JAARWS010000006.1
MQIFDKGFFYEKLIAKSNLHDLNNVRDVYYRKFNIVINNKKRSIATVLEGTALYKLQFRLKNNYLDKLPLPDCVIGYRKGKSYRDFLVPHVKLDKNDRFFVRLDIKSFFDSINEDVIKEALQDYVKIAGEEDRNRVISDIIDICTLEGKLPQGALTSPALSNICFKRLDLRIRSYCRKLGYTYTRYVDDLLFSSTDLSLIQPKFIQMIKLILSDYGMKLNHRKIIQTKNLISLNGFVISDEIRISKSKMNHLLSLLFCIEQNLKSRNLAELLEKLNQIRQHDGKRDFLTVDDVMEFLSGSRAYLIAWNSSDSSAWKVKCTKFILRIERQLVSLDKKHGQELREVNFY

SEQ ID NO: 5132 - protein, 322 aa, unidentified
  source 1..322: note = Related to JAAVIG010000001.1; note = Oscillospiraceae bacterium
MDSFKILNKETWLQTLNISEEELMKVAELKSLFYKKYRKEKPSGYRTIYIINKDSVLYSLQSKIQKKIFRNIFLPECVYGFRENCSYIDFLTPHISSKNKFYLRLDIKDFFESISVEYIKDFFQYYIDDKISNEEKTFIVNSIIDVTTLNGKFIQGAVTSPSISNFAFREIDIRILSYCRKLNVRYTRYADDMLFSSENNYLNSKHFIIAIQAIINDLGYTLNHAKTLKYKNEISLNGYVIGADIRLSRRKLHKINELIFQLSKSDFYGFENNIEKYHIKNQLAGYRSFLIQVNRHVVDLPYRRHLEERILTIEKLIIKHFT

SEQ ID NO: 5133 - protein, 300 aa, unidentified
  source 1..300: note = Related to JAFXES010000214.1; note = Oscillospiraceae bacterium
CLSQKTDCYRVYSKQKKDGTRTIHAIKSDSGLYVLQHRMQQKFLNNIYLPDTVYGFREHCSYIDFLIPHISEEKDRCFLRLDIKDFFGSIRIDDLKEALKYYVSDEIENADQEKILDKMIEIVTVDQKVVQGAVTSPMLSNLVFRQLDIRIERYCSRFNLKYTRYADDMLFSGRTSYIHSRKFMAAIAAIIESKGFSLNYSKTLRAEQEISLNGFVIGSELRVSRKKLHKLNEIMHRLNSREFDKFSSDYELYHVRNQLAGYRSFLLQVLHTDESEARKYKIQIKIDRIEALMRKYCKID

SEQ ID NO: 5134 - protein, 325 aa, unidentified
  source 1..325: note = Related to JAFQWA010000012.1; note = Clostridia bacterium
MKSWQIHNYDSLISDILETSPEALEEAFKNVDKYYERLNLLKSDKKSYRTIYRLKESPVSIMQKNLLNRFFSNIYFPSNVFGFRKGCSYFDYLNYHQMIGDGTYYLRLDINSFFDNITIENFEDSITYYISDDCSDEEKQKIIKTLLKITTYKNHFVQGSITAPVISNIVFRELDIRIEKYCFTMGIKYSRYADDLLFSSPSSFLHSDRFIRMIINILNDKGFSINHQKTLKQVGQLVINGYVVDSAVHLSRNKLRTINKILHTIEKKKSKVLLTSWGAPNYRVLNYLSGYRSYLINVMKYCDEEKKNKLGKTLARIEDIINRYY

SEQ ID NO: 5135 - protein, 329 aa, Methanobrevibacter sp.
  source 1..329: note = Related to JAFQYD010000077.1
MNNITIKDKTAFLDLIMENPEDQDKFDREKATTYRLFKIKKHNGDRHIYAIKPTSIICKYQQNLYKNFLTKLLFPECVCGFRKDRSYFDFLVPHISKQNKRYYLRLDISDFFESIQLSDVKDCFQHYLNDDMDEEVKDDICNYFIKIVSYKGKIVQGAVTSPAISNLVFRSLDIRITKYCQPFGITYTRYADDLLFSCNHKKIFSYSFQKCIQAILSDKGFTLNIDKTLKFKDEISLNGYVIGESIRLSRKKVTRLNKILFELSQSNFDELKSERERYILINTLAGYRAFFINSMRYMIDPVQTKKMERKIQQTEKAIDKIRALPIQQI

SEQ ID NO: 5136 - protein, 324 aa, unidentified
  source 1..324: note = Related to JAFYGI010000008.1; note = Firmicutes bacterium
MIGFRITSKSQFFDEIVEISEEKMALALNNKKSAYHCYKKAKKEGFRIIYAIKKNNLIYELQNKLKNSFFMNLLFPECVCGFRKRKSYYDFLIPHISSNEPRYYLRLDISDFFGSIDVDDIEESLNYYIDDSISSEEKQLIINNIIGITTIDDKIIQGALTSPILSNLVFRSLDIRIEKYCKMLNITYTRYADDMLFSSDSSYIHNYRFQNMIKTIISEKGFNLNTKKTLKYKNEISLNGYVVGNSIRLSRKKLSQLNNIIYEMGKKQFKGFKSNKEKYTIKNKLAGYRAFLIQSIPYINRNNLVQISKKITKIENLITKYCAD

SEQ ID NO: 5137 - protein, 326 aa, Ruminococcus bromii
  source 1..326: note = Related to NZ_WQNQ01000008.1
MNSFRIETKEEFFKILDCDEDTFTSAIKDKEKAYFKYKLQKKIGSRYIYGLVKDNLIYTLQKKINREIFKNILFPDCVYGFCKRRSYFDFLVSHISNNQRKHYLRLDISDFFDSIEIDDIYQCLSYYISNDISGDDRDYILQLIVDITTLNNHAIQGAITSPAISNIIFRSLDIRIEKYCEKIGVHYTRYADDMLFSSESSYIHSYKFTNAIQAIISDKGFYLNRKKTLKCENEISLNGYVVGTNIRLSRKKYKSINKIIYTLTTSSFTGFKNNYHQYITRNKLAGYRSFLIQYSRYIQDENQNKKIQKKIETIQNLILKYCVSSI

SEQ ID NO: 5138 - protein, 349 aa, Ruminococcus flavefaciens
  source 1..349: note = Related to FRCT01000004.1
MDSFKIANKEEFIELIDVSEDELKEILKNKQNSYHKCFVNKKKRDSIRIIFALDQKSNLFKIQRALQRKFFCNFYFPSNVYGFIKQRNYIDYLEPHCSRNGTRNFLRLDIKDFFGTIDINHIKECLKYYIADTCDENEKKYIIDSIAEIVTYENKLIQGAITSPVISNLVFRKLDIRIERFCEKNNVIYTRYADDMLFSGIDFDVHKRTFINMIATIIKDYGFSLNYKKTIKMHEELSINGYVLGRDIKISRKKYESVNCLLYYINSKINKIPISRSFKYQLINILAGYRSLFIQVLRYVHDSHNKEVIQKKIAEIEKGINKISQFKENNIGANKDYEDKILEEICSKK

SEQ ID NO: 5139 - protein, 364 aa, Alkaliphilus sp.
  source 1..364: note = Related to NVVX01000015.1
MLHRASKQGDDTLKVWRVDNYNDYFSNIVKVPEKEFKSKIADNEKKLFYSEYINKTKKNGLRKIYCVTENSDLYKIQKNIKNNFLDNIMLSDSSYGFRKGRSYYDFLASHKSFYSGKYFLRLDIRDFFGSIEYSLIEDVVSYYFVVGENLTSSQKKELLQNTLSSMTYENKVPQGAITSPTLSNIVFRQLDLRIEKFCQNVDAIYTRYADDLLFSSYNRNLHSAKFINFIRSILISKGFHINHSKTIRTKNLISLNGFVISENDIHLSRKKLASLSRILFCLETPKWINSKASFVNLNMKLKTEGDKHLFEGKYALLNFLAGFRAFIIPIVRSMDDSKLRKKQQKYIVRIEKTIEKIEKLPPKK

SEQ ID NO: 5140 - protein, 349 aa, Clostridium botulinum
  source 1..349: note = Related to CP013683.1
MKVWKIENYDDYFNFIVKVSEDNINELLSQDEKKKYYSGYIEIKKKIGKRKIYCVDKDSKLFKLQKNIKSNFLDNIMLSDACYGFRKGYSYYDFLSPHKDFYSKKYFLRIDIKEFFNCIDYSIIEDVIKHYFVVGDNLTKSQKKKLIQYTLKAVTYRKKVIQGAITSPVLSNIIFRQLDLRIEKYCKYIDVIYTRYADDLLFSSYNRFLHSRAFINIISRILNSKGFDINYSKIIRARNSDKNSVSINGYVINDEIHLSRTKLKSLNRVLFYLENTKWKNCKNDFESLNKKMKAENDIHNFSGKYELVNFLTGYRAFIISIVKGTDDIILKQKYQKYIERIELLVKKLV

SEQ ID NO: 5141 - protein, 346 aa, Clostridium sp.
  source 1..346: note = Related to MNRT01000036.1
MKRWRIDNYRDFFNKILKVEEDELIALLENKNNVYSSYKIKKKKGHRTIYYLKDNLDLAKIQGNLIKNFLSNIMLSESCYGFRCNLNYIDFLERHTTLSNDRYFLRLDISNFFESISMELLIDVLSYYIEDSEYVTSDESNKIVYYIKEIVTFDDKLVQGIATSPIISNIVFRQLDIRIEKYCRKLGVEYSRYADDLLFSSEIKSKIHGDFFIGKIAKILSSKSFNLNHKKTIKADKELCINGYVVGKNIRISRKKMQTISRVLFFLNSVNIKKNLNFLDELNHKLKNEMKDNRIYFLNKIQLINYLSGNRAYLISILRYSDEYFGKRIIKKINNIEKLILELDES

SEQ ID NO: 5142 - protein, 347 aa, unidentified
  source 1..347: note = Related to JAFZQH010000027.1; note = Lachnospiraceae bacterium
MKIAKINNREQLYKGVLEYEKRIIDTALTDSAKKQYYGKRINIPKKGGSRGIYCVDSNTFLYEVQKSFAKNFLNNIPNSDAAHGFVKGKNYYSFLNAHVYPYSRISFLRLDIKDFFESITSEMVRNSLDYYVSNDDPRMHDEVLNIMTDIVCYEGRLIQGSPTSPAISNIVFRPVDIRIERYCMSQGVVYSRYADDLLFSSISGTQLSERFISGIKAILKDNHFRLNLQKTIRSVDYISLKGFVIEGQIRLSRKKTKSIRQVLYFLEKNRYENTNAWMSSFKEEMEGLGNDSAMDINNSYSLKNYLAGMRAFIISSIKESGDIYYKKRAAGIISRIEKQIDEIENKG

SEQ ID NO: 5143 - protein, 351 aa, Pseudobutyrivibrio xylanivorans
  source 1..351: note = Related to NZ_VTVE01000001.1
MGDNNGMNGWNIQDKEDFYNRIGVKTDLELKSYVSFLAKNKYYKQSVEIPKKNGTRLIYNIDKTSELYRIHNNLKKQYLDRIYISDAAYGFVKKRSYYDYLVPHLNKYKNRHYMRIDISSFFDSIKSEHIENAFGFILKECKDRDYIIERLKEIFLYNGTLAQGTPIAPAVSNIVFRELDIRIEKYCNKRKVVYTRYADDLLFSSDDNTVMRKDFYRGIRKILGSRGFNINEDKTINMSDSIVMNGIVVGKSIHLSRKKLKPIRTMLFALKLVEKEKDIEKCLKCINNTFQKAKIDKTFNSAIDVRFYLCGYRSYLIQILKYCEDINIENRLKKIINSIESYLNGPKKSFL

SEQ ID NO: 5144 - protein, 335 aa, Hugenholtzia roseola
  source 1..335: note = Related to NZ_KE383885.1
MWGKKTFFEPNPFFKRRLQWLYRQLLPLYEPPACAFAYIKGRNYAQYRAVHQKNHYIYAIDLKSFFNSITTPQVNNALQSFCSPAVAGYLADALTAEGVLPIGFPTSPLISNIVFKNLDEKIVEFANKEGLSYSRYADDILISSNKKITTQNLNAFVYLIEKNGFKINFKKFKKVDKNTNLSTLSLKERRFLNLLLHQWQKKGYMDTNLWFLAAHRKSYAKPQDALSNFLRAKIFPFKDDFPKLWAQFERISKQYPYQTQNQMEENSIPATEKTQIMKEQPKSPTQYAQAPEPVVVSATTNATKLTFSASRQELEQYRRTPVSGSIDNFFKNHCQ

SEQ ID NO: 5145 - protein, 502 aa, unidentified
  source 1..502: note = Related to QNFV01000088.1; note = Epsilonproteobacteria bacterium
MKKLNSYKVKKLIDRYMTSSEELGSMLLRASNLSRHILNTIDMNNTDKATHKFLSNYKEEIDDIQEHNSYSLSKFSSSKLGLSNRGILSTSMSLAGSYSKWDARHWVSYREDDNRKTQLYKEGSEILSPSPSGIEFDFNNDVFMGEVIGNINQLMGVIGKMSNSVIFRHRFVDGRRISMINPKLEKSLRDIIEAEFKGYAKNFYKMYNSFHLNIGSNREHVTGFIKGKSYIDHARAHLGCRSAVSIDISKFYDNISLLNIINNNLFYNSLLSFFKQETGLPFEASSFKEGYHYDLLSKLFGLMNVQFVGLMTFLTHNGLLPTGAHYSPNISNLILSNVDLHMVDEIKNINSNLKYTRYADDICISSDKDKDENGEYYLNMDFIKRLETIINDHGFHLNYDKTMIMGASDRKKIAGIILDHTANPPRLSIGSRKKLELQERFNGKDWKELTTSDIGTINWVKTINVNQYNFVCSGITGERLMPIPRGCERDPITSLVVDAVPF

SEQ ID NO: 5146 - protein, 431 aa, unidentified
  source 1..431: note = Related to JAGNEA010000001.1; note = Candidatus Woesebacteria bacterium
MKRLALKRTRYKKLRKQLCISRLPKNNNDLSAVSFLALYIDFLKLYRSTLILCCSIVYSDSIAIEISKKKKNKDFFNQHDIALFDSLYLSIISDYDLYKKDLNEKNRAVVVARIDRNSKLLMPVFNSLFELFGSVSNTFIFRNVVINNRQLSIISDSIDAGLTYHIKKNNKAISLFFSRYYSIFVNHYSLNDNVYGFIKNKSCVDNANYHLDNSPASLINIDINKFFNNCTVVKCLKNNVFTDTIDLFDASVDTKIAFSFGIISLLGYCTHNSVFPTGASFTPVLSNIMLIPVDVAIKSYLSETFGNNVCNIRYSRYVDDISISSDRAKINKSYVLTIDTIKCIESILNNYGFYVKYSKTSIAGPGDKKSVNNIILDNNNHKLSIGTDKKLKYKTIFSKLFADEEHDYVVANLPYIKDINKDQYDYITEQK

SEQ ID NO: 5147 - protein, 325 aa, unidentified
  source 1..325: note = Related to LT907983.1; note = Cytophagales bacterium TFI 002
MDYNTVITLLGHDNESWQNLIANGIRYSVFQLPKANKKLRLIEAPQGELKRTQKYLNNILYAEYHPQSPDCVHGFIRMKAAPRNILSNARTHLGKKYLINIDLKDFYHQITTERTTDLLWKRFPNLLPNEVDELNKIVVKDDRLPMGAPTSSVLSNMAFQECDMALMTYCDQHKIVYTRYVDDLSFSSNKQINSAILEGIYTIIKLNGFSENPKKVKHYGESDVKIITGIAMQGLHWHVSDDMKSRLEKNMSEYRKLRKLINNLKFLGVEAKAKTKLKTLKRAIAGQLEFVKQIEGIDSDFYRSMKKIWKQSDADTVNVDLSVYI

SEQ ID NO: 5148 - protein, 330 aa, Haliscomenobacter hydrossis
  source 1..330: note = Related to NC_015512.1
MHALFKNEPDQLAQSLNWPDDYQDVIKKQNYHQFSMPKKDGTLRAITAPGNKLKFLQKTLSHAFQLTYLNKIPDCVHGYVPGDIHPEVGTRHILSNAQVHFGAKYLLNLDIDDFFPNLDSLRILDALRYWYPEMPQATQELLVGICCYNNQLPMGAPSSPVLSNMCVHQMDLALLTLCAQHQVTYSRYVDDMSFSSSSDNLLALEPALIEALQSFGFTINQAKRMHFGPEGPKIVTGLIMDETDITVNDTFLDNLNECIKEYSQLRWLSRQLEMDKKWLQSKVRFAAQSIEGQLAFLSQIQGADDAVYQKYHRKFDKAQSMRPPNYDFYF

SEQ ID NO: 5149 - protein, 338 aa, unidentified
  source 1..338: note = Related to JADJTC010000010.1; note = Saprospiraceae bacterium
MNILNLQNASNRVQFCKVLAISEDALKSALANHKYYTFKVTKKNGKLRKIEDPNDERQYVQQRLSFELYPLYKTVLPPYVHGYIPTAISQNGSRSILSNAEAHLNCNFMVNLDLLDFFHQITISKIRGCLSKVYKIRSLNIIDLIVKIACYEGRLPMGSPCSPVLSNMIVIDLDGALFDYCQAQNITYTRYVDDLSFSSKLEITGVQIETLKKIILNEGFLLNEEKFRIFHQNDPKKVTGLVVHQGKLDVSDDYLNSLSRNIKKLKRIKRTYQHMRMLHPELKTNLQSRYRLIKSSVAGQLSFVQRILQPEDERCLALAEEFDDARTSSEVVDLHLYF

SEQ ID NO: 5150 - protein, 563 aa, unidentified
  source 1..563: note = Related to JAIUNV010000007.1; note = Bacteroidetes bacterium
MYSKKVKTPSDFLLLSNELENIRDFSGLAVLLGVNQDYLLMNILPSYTCFEIKKKSTLRKVYYPEYYVSEIQRTLNLYLTASYLTNYYLPTQLPVHSYIPRITLTEQSDSDICRNNKSNAEVHFGSERILKLDLANFFPSIKSIHVRDGLRRLLPRLPQYCIEWLVHLTTFEGFLPAGAPTSPTISNIILYDFDKFANSINGIKYSRYGDDLTFSAIDGRINLKQVERDVKIELEKWQFQIQEAKTFFLRKGQRLRITGVVLNEKLNISREYLKWLRAVVYSCESIGIEKAATKYGDRYFEKMLNSTRKKYRYIGVYVDKGLIKKCITNKELVSFLKASLLGHISYVSSVRGKDDVYVQNLRNRFINCLREEGLEKKEIEFEAKSFKENENLVYITNATSQSVVYYAYVFLKSAKLSDDDINRLRKHFSYKDSSNIDFKKIKENFINQSIYFLELYNYMFYRDRFKLFYESLSDDEWNQLFNRDQNFANKRTYPRWIYHLDFNCSNIRNNYNEEGVFHPNSGVFFEEEKANQVYNAYLLEKNFLDQLGMRTCLICQSNISEFT

SEQ ID NO: 5151 - protein, 326 aa, unidentified
  source 1..326: note = Related to JAGOCA010000016.1; note = Saprospiraceae bacterium
MKNKSAFYHFAKSFNLEQEDLYLVYSAPTYHTFEIPKRNGDLRTIYAPAPNLKKIQRKIAEKLSKYYSESLPASVMGFVKTAAWKKKRDIVSNARKHIKSKHLINIDIENFFPSIKTDHVARVLNEIIKLDNEGVQIIRQVLMKDDSLPPGSPASPILSNLVFKPIDLAIEHFCKGQKIIYTRYVDDLTFSSKKEITKTQICTIADILTKYNFRVNEDKTVIYKKNDIKEITGIAIVDKKLTLCESTIEEIKNNILYYKEWKQQILQQYGPNESVRKKISHMQRSIKGQLNFAKRIDGEKGEKYNELKELYEHSLDEKEFAFKVYI

SEQ ID NO: 5152 - protein, 399 aa, unidentified
  source 1..399: note = Related to JAJTGA010000020.1; note = Opitutaceae bacterium
MTNAPDSAPLTTPSGKKPPGLSVTLTVERHRLLHVILDPAAWRMFREALQTRGAWSRRGRILKATLVAEDFRGWSPRPYLPPDSPDWSETVMELHPPTEPAAFERLIATAMEHFRILEQEDAAAFDRSLRNTWEKVRRAAMAAHALAPSQLPRPFPVYAARLAAIPKKRPGEFRVIAVPDRAQLAAGRSLLPYLHSRLDPALPIHGFVPGRNPVTNAQPHRGFGWSLTMDLADFFDHVTADKLVDAGLPRSIARLITDRDGVARQGYATSPAASNLAFQTVDHRILALLAAECPGAVYTRYADDLTISANDREALIRVQRNLEALIASAGFKVSARKTHVLAARAGRRVVTGVAVGETDLRATRSARRRLRAAEHADNRMQARGLREWSLLKAPRDKLP

SEQ ID NO: 5153 - protein, 381 aa, unidentified
  source 1..381: note = Related to JAJTGA010000020.1; note = Opitutaceae bacterium
MNDYITLDLKGRSENGRSRQVHLTGEGLREFGEKLEKNGLQTEAPLIVRALFLRGEAGNLDSRPCFNGNGWDGNMLEIHLAPGIGSKVAEAGVEAYLDVTFDRKADGLFDRKWRAEMAKVRGNFPGFPGGGVAPFPAFDAPLVRIPKRRPGAFRLIATPTADQKRAARWLLPTLDKWIDYRLPIHGFVHGRNPVTNAKVHIGFRFSLGFDLEDFFDHVTVKKLVAAGLPRSLAVAVTDGAGIARQGYPTSPTAANIAFQEVDRALLRTVAQLDQGVAYSRYADDLTFSADSWSVLRRLRGLVEELVPRYGFRISHRKTTSWSAFAGRRMITGVAVGKDGVCAPREIRRRLRAARHQGRAPQASGLAEWNRVREPHVFRRSD

SEQ ID NO: 5154 - protein, 313 aa, unidentified
  source 1..313: note = Related to SSEH01000250.1; note = Hyphomicrobiaceae bacterium
MAARFARGPQGLQSDPSHLKTTGSHTSNRAAICGLVDVFIVEFGMQVLRIPKGNGKVRVVYAPSEEEKAELRSLLPALVKIAKRRCNLEVVHGFMPGRSPLTNALPHVGYQYTVNMDLQDFFDTVLITHVMHLIPPQILAKVMRYGAARQGLPTSPLVANIAAAQLDWDLITALPEDVVYTRYADDLSFSFDDQKLTKELPLLVKKMVEDHGFAVNTAKTKVQWAGAGRRIITGIAVDHSRVFATREVRRKLRAAHHQNNKGSKAGLTEWCRLKLPALYLAEQTRRGKKSKSHHRAEEPVVEKSNKERRSLRL

SEQ ID NO: 5155 - protein, 430 aa, Pelotomaculum thermopropionicum
  source 1..430: note = Related to AP009389.1
MKILKIPKKNGKYRTIYAPDAEEKRALRGIVGILNQKCQHVCDPAAVHGFMPLKSPVTNALAHVGRKYTVSFDLEDFFDTVTPEKASKCLTKEQKELVFVDGAARQGLPTSPAVANLAATDMDRAILKWIEKSGKSVVYTRYADDLAFSFDDPELIPVIQKKVPEIIRRSGFRVNTDKTTVQAAVAGRRIICGVAVDDEGVHPTREVKRRLRAAKHQGNELEAAGLEEWCKLKVPSGKRQKARETTEGLDELRKHWKLRKIDMAKAVSRKVIPEKDLGDNCYITNDPAYFMGMSTFTTGWKSCMRMDGGEYRKGVMAWLALPGTSVAVFLSDRTMNIAGVERRRMRARCLVHKLENGQLVYDRLYGNPDDTPVLVKKLEEAGIRPIREFAGKGIYVEGDVPASMAMPYCDNLWEEKINIKSGKRVVRFYV

SEQ ID NO: 5156 - protein, 431 aa, Thermoanaerobacter thermohydrosulfuricus
  source 1..431: note = Related to FNBS01000081.1
MKIVQIPKRNGEYRTIYVPDKKEKQKFKNLLGELNRKAKNILSNAVHGFVPGRSPVTNALAHVGYEYTISFDLEDFFDTVTPEKVSKYLTKEEKETVFVDGAARQGLPTSPVVANLAAADMDKAILKWIKKTQKNIVYTRYADDLTLSFNEPELIPVIKDKIPEIVKRNGFKINEKKTRVQAAIAGRRIICGIAVDKNGIYPTREVKRRLRAALHQGKIRQAKGLEEWMKLKLPNSEKKEEKIKRIEEAKVLIELWGIKKIDVEKALREKAIPEMDLGDNCYITNDPAYIFGMSYFTTGWRSCMAPDGGYGKGVVTWMMLSGTSVAVFLSDRKKATGSVERRVMRARCLVHRLRTGELVYDRLYGNPQDIEFLKKKLEEHGIKSAREMPKDSKLYVVGNVSRSLPQPYYDTLRKEKVVLKESQKKAYRFFI

SEQ ID NO: 5157 - protein, 305 aa, unidentified
  source 1..305: note = Related to RFGF01000109.1; note = Nitrospirae bacterium
MRRILIPKSHRTWRTIYVPGPAEKARLRGLVPVLHRLERSAAERHGTIHVAHGFVPHRSPVTCALAHLNCAWTLTADLADWFDHIHESQIAHGIELGGGDPNVAAQLCVDGAPQQGLPTSPIAANLAAIPMDRWILDRLPPDAVYTRYADDLQLSLRTAPHDPQAIVGILEEAASHMGWQIAPHKTRIYDARRGHRIIVGIAVGSRSIAIPRTTRRRLRAARHQRPQHPHTQGLEEWCRLLLPRALRPRRRLRFEQATDTPPAGLSSLSTPSSRISHAGTIERSQQHKPGLRRVFRFSVRNQSSP

SEQ ID NO: 5158 - protein, 323 aa, Vibrio owensii
  source 1..323: note = Related to CP033144.1
MNNDYSNTQGGSVNDNQWKEDLDGIWSITLTPKLSNIYNVLAYGEWLSDPNKIEALSVKKIHVDTGGKKRLIYSPNMDSKGFYQAILPKLNETFEKMEERAVAYGFVPKRSCVDQALQHVNYAYTISLDIKDFFDHVKIKHVKGLIDEELIPYLFIDGAARQGLPTSPMVSNIAFNAIDLEIITFLEERMGFTTSKPKAERDMFFWDLDLDFDQEQKRYYAYTRYADDLSVSLDQYEDIARVINGVQRILLRHGFELNARKTKILDSNNGRRVICGVGVDEETVYPTRKTLKKLRAAKHQKNLSSMFGHRAWIYSIDKKKPVR

SEQ ID NO: 5159 - protein, 316 aa, Vibrio parahaemolyticus
  source 1..316: note = Related to DADYEG010000002.1
MNNDYSNNEGSSVNENQWEDNSNGVWSITLTPKLSKIYADVVWGEWLSEPGMIEVLNVRKIHVDTGGKKRQVYSPDMNSKVFYQALLPNLNETFEKMEERAVAFGFVPKRSCVDQALQHRNYAYTISLDIKDFFDHVKPKHVKGLIDEELIPYLFIDGAARQGLPTSPMVSNIAFNAIDREIIAFLEDKITLIADKPKYGGSSWGGEEKKRYYTYTRYADDLSVSLDSYDDIARVINGVQRILLRHGFDLNARKTKILDAKNGRRVICGVGVDVETVYPTRKTLKKLRAARHQKNLSSVFGHRAWIYSIDKKKPVR

SEQ ID NO: 5160 - protein, 316 aa, Vibrio harveyi
  source 1..316: note = Related to NZ_CP045071.1
MNNVYSNYEGCGVNNNQWKEDQNGVYSITLAPKLSEIYADAVKDEWFFEPSKSDTLSVKKINVDTGGKIRKIYSPDMQSKVFYQALLPSLNEAFDKIEERTVSFGFVPKRGCVDQALLHLNYAYTISLDIKDFFEHVKIKHVKGLIDEELIPYLFIDGAARQGLPTSPMVSNIAFNAIDRQIVTFLEDKIGRVASRPKDEFFFDLEDDLKCYCSYTRYADDLSISLSLYEDVARVINGVQRILLRHGFELNARKTKILDAKNGHRVICGVGVDEETVYPTRKTLKKLRAARHQKNLSSIFGHRAWIYSIDKKKPVR

SEQ ID NO: 5161 - protein, 304 aa, Vibrio vulnificus
  source 1..304: note = Related to ABDZOA010000009.1
MNDNQWKEEINGVWSITLTPKLSKIYADAVWGEWLSGDGKSEALTIKKICVDTGGKKRQIYSPDTHSKLFYQALLPNLNETFEKMEERAVAFGFVPKRSCVDQALQHMNYAYTISLDIKDFFDHVKPKHVKGLIDEELIPYLFIDGAARQGLPTSPMVSNIAFNTIDREIVKYIEGKIGLSNTIKQTDDFFIWGDENDWKYAYTRYADDLSISLNDFNEIPQVINGVQRILLRHGFELNARKTKILDAKNGRRVICGVGVDVETVYPTRKTLKKLRAARHQKNLSSVFGHRAWIYSIDKKKPVR

SEQ ID NO: 5162 - protein, 644 aa, Vibrio parahaemolyticus
  source 1..644: note = Related to DAETXO010000001.1
MHELRINKGNGKFRSVVAVGKEERYFYRELLENQLEQTLTGHLKENGLFNVVHGRKYSNTVANAIPHQRYQYTLSVDLKSCFDSMTRDVAAKNGFPDLPEDCFVAISTSSEPVAAQGLPTSTVICNLLLVKTDIKILHLLHKTFKGEFAYTRYIDDLTISFNSFNEKKYTTLLSNLVYLVSQSGFEVNMSKVELQRALDGRRRVCGLAVDEGGVYLPRKLKRTIRALEHKESMNLFPSKQTRTLRGLLAYGELKLPNKLGAQQEDTESLIKSIVVSGEWGKKWLCYLIELSSKQSKNPGQEIFCFRVPHTLDDGSIRQLVEAYTIQESSIENDRKTLDINQVSSTEQPDIRTLSSYDIIATHHEVEVLGCTDAQSSKLKQAYFEKRVNFTSQDRKILGFLERREPIPRSLREVITIPPNTKKLDALVCAITGLFDSETILNICKREIWLSGALENVLNDEDRLLFLSQHPYAYRYMLHFVNERDLVKVLESNFYSAKHIFPHIKTAQMKRALGNTRELYRKLVSTNSYGAMYLVPPEWFKKERFISLCSEYFNLTSVMLYEVYSRSVAFYYLRERLYDSNFECASLDDVIRQCKAHTFRVVESEFPAAKNLDQNEICTVELRVNKLVTEIQSRWPWKFVIKNMG

SEQ ID NO: 5163 - protein, 387 aa, Ursidibacter maritimus
  source 1..387: note = Related to NZ_LEKN01000013.1
MKDRIEKIITISKNNGKFRKVFVPTPSYAEQLNKNLKYLNEILLERDKCKVNHAFLTGRNSVTNAMQHIGYRYCLQLDIEDFFDSITSESVKGLINDEVINLVFIDGFLKQGLPTSPMISNIAFIPVDQAILNFVKNLDENIVYTRYADDLTFSFNDIRCKGVIHKRIIKILDEFGFKINNKKTKFQKAVNGNFIITGISVNEKGVFSTRKTKKKLRALEHQYQKNIKFIINIIEDISFMEKDILKLVNVLKLLNTYYKNKDNILNWNLKFLDGFLNEACNIFVSFSGNIYISDVKEIGRYHKYLKYNSEYNHIINNHTDFKWIKYRKYKIKLEDIIKKCDECRYNFHSVIGFRGWASCALPKKEKKDAKVNQSSSNIFFDDDNIPF

SEQ ID NO: 5164 - protein, 387 aa, Glaesserella parasuis
  source 1..387: note = Related to WIUM01000095.1
MENRIAKVITISKHNGKFRKVFVPKSSYTEQLNKKRKYLNKILLERDECKVNHAFLAERNSVTNAMQHIGYRYCLQLDIEDFFDSITSESVKDIIDDKVCDLVFIDGILRQGLPTSPIVSNIAFIPVDQAILKFVKKLDENIVYTRYADDLTFSFNDIKFKDVIYKRVIKILDAFGFKINNKKTKFQKSVNGNIIITGVAVNGKGVFPTRKTKKKLRAIEHQYQANIKFLIKIIEEISVRENDESKLVNIFKLLNTYYKNKDDILSWDWEKLNFLLNDIEAIFKIFSSDIYISDTKELTKYQMHYIHNSIYYSNDSECFNRNNYTDFKWLKYRKYKIKSEDIINKCNECRYNFHSLIGFRGWANCPLPKKREKGNKNSSNFDNDIPY

SEQ ID NO: 5165 - protein, 316 aa, unidentified
  source 1..316: note = Related to DMMV01000106.1; note = Gammaproteobacteria bacterium
MDDFTEYHFEGSSWITPWYFPCWNSEWEWEYDDKIYRTIHEWNAAGRIIKKGEKKKCYLPCRKRLVFTIDQTARFDLFYISKKNGKFRRIFSLYRKQKDQLRKLIPYLEKILLKHDDDKVNYAFIRNRNCVEHAIQHIGYKYTVSMDLESFFESVNREHVSKYLTTNVMDQCFISGAPQQGLPTSPLIANLAFLDCDKAILNSLEKYNISSVYTRYADDLVVSFDDKKDIGKIIFLITNIVNKAGFKVNKSKTKIQSIKNGRIIITGVAIDNKGVRPTRKTLKKIRAAKHSGNDKSLSGLIEWSKCSLPKTHPQKI

SEQ ID NO: 5166 - protein, 318 aa, unidentified
  source 1..318: note = Related to JADJWY010000016.1; note = Hahellaceae bacterium
MEIEEYKISKIPKGKNSFRLLYIPTPTLKKKLQSHLSYLQYKNLELDEHRTCHAFLKGRNCVTNALQHVGYNYCVSMDIKDFFDSVRPHHVENKVSREVIQDCFIDGAPRQGLPTSPLLSNLALLDADAKIIEFLNQFRVVHRYTRYADDISISFDDERATGRIIFIVNSVLESYGFSVNQKKTKIQSKENGRIIITGIAIDKNGLFPTRKTKRKIRAAYHQKNISSVRGLEEWAKCKLPNNTPKNPKRFIRIVGKTLVSCMHCNQSNLIWAEQYPGRTFLVNSESGSRHKCKFLNAILSQRDLMTQLKKWGTRTSFL

SEQ ID NO: 5167 - protein, 487 aa, Alteromonas lipolytica
  source 1..487: note = Related to NZ_MJIC01000014.1
MQTEFTIKKIPKGKSFRTLYIPSSAYKKHLKSKLPLLLERYILFEGDNGFCHSFLPGRNCVTNAIPHIGFAYNISLDIQDFFDAITPDHVTSKISRELIQDCFIDGAPRQGLPTSPLIANIAMIDIDNEIVASISKLTSEFVYTRYADDICVSFNQKQYLYQAKYLITNLLNRHGFRVNNKKTTFQSLKNGRLIITGIAVDKAGVHPTRKTRRKMRAAEHQGSESSYRGLHEWALCKLPGQGISHSQELHQISPKSISCQFCGEQDLVWLRIGKSKLRLYSKTTKMIHDCGQHKRLDVFEHLTALGFTKFETSRKPWFTGFYILQQESLLLLFRKRGIDIYRIDFLEYFHDCTSPAEVIEDVNSTLVDHEMYETTTENNGSDELYLEDHVREELLQDNQIDEFQRGFTPSELCRDIFRPESKYLSLMERVNYKKFPLKVHKFILSLTTPINFREEFYSAYNNAISQQAKNGTLDFDDLDLIDWDIPF

SEQ ID NO: 5168 - protein, 1017 aa, unidentified
  source 1..1017: note = Related to SIAK01000078.1; note = Phycisphaerales bacterium
MWLQSSEAREIFDTDLTKTIGIDAAEIEKFRRELAAVPSATLVKFWFGAQRTSEPTTLEKHLREKLRTRAALFSWVHGPGTSIARDLLYVKLPSSEKRRLVNLLLASLRSRMPWIESRLIHAMAFRPAELNRVAEKTVGKTKGFQQWGPLYRGVKIGKRRGYRQLWIPNTPLKATQGALLRLIAPGLARVLQPFVFGASSGRRGPTFENAAAHLGKAYVATFDLRDFFPSTRVGDVIRGIQWAADHGHLLVDETRVPSYLEENPQVRSLRWTDDAMVLVARLATYRARLPQGSPLSPLLANVAFARFDERILDALGREFGKREFAYTRYFDDLTISLSGAAARDLGLKQTSTVRDRIEQKLQEVLEGSSFALNASKSRCTALTVERRPAAGKTIANSLGHHVTGVILRRESVELTRDLKRELRTTIHRLKHRDFVEDARVWHQSKNFLPPAFKSLSKGHRWEGNTIISRRCSAERLSVLMLRHFHPELRVRAILREWYPWQERFIGGEQVRRGKQAWPLIEWLLAALWEGTVTARRHGDNTIRFSQGGVAVCDVEAESALQFFLLAKESAIAVTEYWHHLQGLKGYLGACPIRPEFSDIIEWRDRLVEAMSALEIRGYEIEATEPIVENTSDGDPEPLTVSDRVKERSDRFIVVYREFARRMSIAGDTFLGTCEDAARVVATNSADFDRWISAIRGLFVTRLPRLPAVVEHRDSFDRRRLFDAVRVWDDGTKRLVADDYQFVADLRVALKIDRLDSEDTYQFARAQLRLFDWLLASFERSTETRRCGIGEVSALDRGCDLPVNLWSGTLKERLAEAFEELVSAHEVLRSSDGETKLFIQRSGEELHRERETIRCTEQWNNDRAWEHLCQVARVLFITTQESVEPSLWRDPVEDDQPVSAQNELRRKKTWKGVCDRVDSELRHRARLLAKLRNRDAHKANDDRRAEWCSIQADVARILGRSWESTSGRKHPQFHAKDDLELFGHEVTVVKLELIRSLTALFNRAAELQVWRPEHGMDR

SEQ ID NO: 5169 - protein, 842 aa, unidentified
  source 1..842: note = Related to JADLBO010000003.1; note = Phycisphaerales bacterium
MTSRLIHALAFRPSYFTRHPSSRWGALYHRREISRGTNKPRVLYIPNKPLRSIQRALLFLFLNRASHELGQSVFGARPGQRCPLINNAKRHLGQMYIVSFDLADFFPSITLGHIVSALAHIRTPLGHCALQDNEANLDRPRRDFPWTHDAAVLVARLCTYRGRLPQGASTSPLLANIAFSRFDDLIAERLGTGLVYSRYFDDITISVSKSAARRLHLNNAKALADYAQTCIETELIPAGFRLNAKKTRFGTAAAGFTVTGLRINKNTIDIPRKTRRQIRALLHTISTSGLLAAARKTWGAELEARIRWDSARQSHHSAGRRLPQEKLCALMLKRLLPDLVIRVFDRDETEAPRTTEITGRQATRVLEKLLTYAWTHRVSFRVHDDYVAVKAAGEREIARLFSKVSIEFFGLAPNELIRCTELFHKLAGWSAFLEDAENHGEARRVADLGRELRRVLAGVQAGTRSETTAYETGALRVDPAGLPLTAEQENRQLAREVFELIRQFMLFVSPGPISHDLPELERNFKAVANSEETFSRWLETTMRLYQIRAEVVPPESARREFRGHDIHETIRLLSDRLAGRRAPTYEIERDFYKKVSKDDVPDSPRAYLRHQFRVLGRLKSAFDCSLALRNQRGPTAWIQTLNENTWSRSIAARLHTAVQVLRERLVEMASQPGVMRVFQNAVLADLNAGMSELMTTVSSTTSELRWKSLFATGSVLSKLILEQVEASRLETETTEKRSHTEIAIASLTAGTGESHADLLRLIHLLRCRDAHPATDEQMNDWIKLQRLCGSRLRRVTTNIRMPDNAGAMFGNGHLELTELEANDLKLSIIEGVDRFLRQVSVV

SEQ ID NO: 5170 - protein, 306 aa, unidentified
  source 1..306: note = Related to LR594584.1; note = Gemmataceae bacterium
MAFREDRFQRLFAPAHGELYRRKRVPKGKCCYRTLFVPCAPLARAQRLLLSRCLNQMLGHSHPGVYGGRPQTSVYGNAQRHLGQKFVVTLDLRDFFPSVTVNHVVATLLRLPPVSLVRHVWLDQPTQGGRARVPQMHRYAWTQRAAVLVARLTTFRGRLPQGAPTSPAISNLVFARYDDRIATALPGFVYTRYVDDLTLSVSETAARDLGIRTAKQAQAVVVERVERALRRSGFMLHPDKTRVTAIEREHRITGLRVGADRVDVPRRVKRKAASLARDLRKLGLVDTARRRIGAEIHAATQARPWV

SEQ ID NO: 5171 - protein, 955 aa, unidentified
  source 1..955: note = Related to DTTU01000469.1; note = Phycisphaerales bacterium
MSDHIVEKIKALDAQFVQLEKLPHHVIYSEFTTPQQLLLDRKIQYREGAYQLLDWYPPIREARELLKHLPPFEMLKLVGGKPCSSLSLFTFIKRHLARKGTKSIFRWSDRKRFVYWVYRNKLLSSVLPYVRPASESKHLVLRYLLKPLKKQQGYYSSKVVHAWAFRPDFFKAKVDYEPLYITRKIAKSQRGYRTLDIPFAGLAKLQRAILKMLLNPACQRVLTDSVFGFTPGNDRTIFSAAEAHLGAKFLVGFDIADFFHTVKFNDITSTLMKLPPDILRASNSAISKNKSPLKWEWDLVLLLAKLMAYKGRLPQGAPTSPALANLVFHEYDVLIRQQLCDSFEYTRYADDLTFSISATKAKRLGIRSELDARQYLEKRLIQLFESSSFTLNSKKSRAVNLRQGGRVLGLYLNNEGVGVPRSTRRDLRTTLHKMRNHGLLCTARNHPALPDCSEFVHRDTKRGVRHFFKSGRVSMERLCSLTAHRICRNLTISDLRNEGSTRELIGNRLRDTLERVISNAWLGKLVLAKQDSKSLLVSFNSGDPALLLRAETGIDFLLLGRIDCVKCALLHQSLSGYLSFLEGAPNRATFAAIHDLAKQLGDVLGSLDIGQFQPAASRQAGTTDGERPSLTIDEDVTRKARAFLAKLGVSDFEHPDWSVLCRAVYSREQLDSWLTATDKLIKEKRVFAEGSRRNPVKFIDIRAGKIFGRRTGTYDEENQYLVRRLSEDGLSRPDLALQLQEELIEDLIEYAEQAGEQGETAYPEQSVRLERVCADLKKLRNQLTTTNESMLLFARRCSPENDTNIRKRLEKLEQPISGDSSGAVWYSLFEFGFCFVQSFQESLEHDDEGKPVATSRAWKDIKRYNVLSLLRNRHAHGWVKTAANLANLDEIQRTIAKRLGKIWKPKKNQVGDTLESLITLELTSFEANEFTLDILNQLRDSLIAVRQELQTPPSP

SEQ ID NO: 5172 - protein, 314 aa, unidentified
  source 1..314: note = Related to JAFRHR010000024.1; note = unidentified bacterium
MERTEITPWFYYDIYKTEKRTIHKPSHALKKVQRFIMRKFLKPHFKQMTTNEAASVHCGKKWIMKLDIKDFFNSITEKQIKDVIKKYVSYDNYDSSITYEHTWEVFSEEQIFSVCTLKGKLPTGASTSPYIANLVLRDFDIEIENFCLRYGVRYTRYMDDLFFSTNREQYFLSLVELEVLRLFKELGFEINVPKIKYISSNKCQQILGLGVNNKKPVLTKDTKREYRAYFYNLLAPIQFNNTEEYKKHEKELFGHLAYIMSVDKKFYYKMVAYIFNIIKRLNIWRKPCLKNLIKKIGNNFETEIEMFRFCSYLK

SEQ ID NO: 5173 - protein, 415 aa, unidentified
  source 1..415: note = Related to VXLT01000305.1; note = Gemmatimonadetes bacterium
MPPAEPTPSLGQAMRRLRLAAGLSQRELAGRLAVDPTYLSHLESDRRDPSVRFVKRFAALVDVPVTSLLVVAMWDEMAPSEQDMFQPVVSSLMHLTEAVVRMPASSPGPLRRLSVQKLVAVCRLSEQQFARLLESREKEYHEVSWEKEPGKTRTLHIPSERLKAVQRLILRYMIDRVPPHPCSACVKGRGNHWAYRRHARHPSMLRLDISDFFPSVGEDAVREAFIRLGAREPVADALVRLVTLPERLPQGAPTSVAVADMVLFPLDVRLAGMAEKHGFTYSRYVDDITLSGGNRLARFEQTVRRIVTDLGWELNEKGGLVGSDQRHSLLGGIVNAKPNVASEYYGRVRSYLRLVAKGREQPDEDDFRKLRSKVEWIVSVNPERKAALHALVDEALTTLKQQEASIRRREKIVPQ

SEQ ID NO: 5174 - protein, 320 aa, unidentified
  source 1..320: note = Related to JAGGSE010000064.1; note = unidentified bacterium
MFSLDELLSIFNDVEEVEMSPSFAFVYSQLVEKGTSAFWLGVRKHALRDWYEQYHNVLSEDVKVEYTPVRIPKRSGGFRTLYIPSDQLKERQRAWLKLTYILVPKVTHAYAFEKRRSLRDALEKHVGNYLFLRLDIKDAYPSIRKKVLDSVLVKHDVPLSVRQMLIRDCYFKGLPQGAPTSGRLFNIVLSQTDLVIAEVIARLHGVYTRYADDILVSFPKDAKISISKTSQVINRYLNKISLELHPSKLRVGRGKLRVLGCVVHSDKVTISRKVRRLYRAMLHNNKTGKISLSKHKINGIKGWLNMVYRSETVPAIGPIS

SEQ ID NO: 5175 - protein, 469 aa, unidentified
  source 1..469: note = Related to WKFN01000002.1; note = Alteromonadaceae bacterium
MIFIKLLLLPFYLIFGVLRNILSEGGHPFDGAYNDMVARQNEEHRKNLKERSDKIKKAINEIEKKSKEEPLWKLSKLTKISIEELKHTTGTYRKVNVKKKTGGYRELQIPNDQLKQVQKKLAKFINSQFKNDISPFCHSYRNNRGIISNSLPHLNCKVLVKLDVKDYFQNITFEQVMRELDLGFESIQFHPQSNFIRHNVSEPDSRISSYLASEEAQEILKKLVYSEQGLPQGAPTSPVISNLVLSDFDKEVYALVTSLNGAYTRYSDDITISFKEDSSQKIAQVIKFVEAKLAENGFKLNKKKGKINVLRPHQAQRICGVTINSGKPTISRKQRRLIRAAEHNAKQGKPTTFTEDQIKGHESFQKYIKEHGELLAGNERIQYLKTKVISARGCKVDKNFVILKGSQFDISKFDEAKEEFQTLFNQLKQEGVIVLKQNVARFKRNHQFKSKTLATSLLHLRNVRSSKWV

SEQ ID NO: 5176 - protein, 332 aa, unidentified
  source 1..332: note = Related to DNYA01000036.1; note = Cryomorphaceae bacterium
MEFAVDSISYELGTVLALLVVLVGLVLLTKSLARDYVSKYGGGARKHAQRKNSRTLLDTIDVREDVFFGVATDYALVKIPKRTGGSRQLQIPNAELKRLQRKLLVYLTAKLGHRVNRSVHSYKKYRSIKTNATVHLGAAVVIKLDIVNFFPKVTLKQCRQVLKLLNLTKPVEDRLVALLTTPGGLPQGAPTSPLLSNLVLRALDKSVWYYCWSRGHRYSRYADDITISLPIDDRQAVHRAISFVNHALKRAGFKLNRRRGKFHILRRHQAQRICGVTINSGKTTISRQKRRELRAIRYRLENNMEASISEIQLEGYEAYVRMVSGVSVKAFS

SEQ ID NO: 5177 - protein, 365 aa, Aeoliella mucimassa
  source 1..365: note = Related to CP036278.1
MLPHQIRPEHLAEAMGLSVNMLWSFARNMDACFKPRRMQWDGKKHRPIDPLYKPPKRLLKKLHRFLQNHHLCHPAAHGGVRRRSTFTSAQIHVGSRNVWTRDVTDCYPSISQAAMFSQLRKLKFQHDTALVLSMLFTYRDGVPQGSPISGDALNIFFWPLDQLLASMAGSLKLRYGRNADDFVWSGSNRENGDKLAARLESEIELLGLKINEKKKRANGLQTSSDERLVHGISVSKPSGTAISRLQSKKALALGEKYVAACRSVTADSLEAVAVKRAQLAGWMYYCRQAHIGPARTIRQLLEAGDRHVLKKLRAIGLSSQKNKWWIIDYRPRRNKPSRNEPKRLANAWRTRLARMSHKNVVATGL

SEQ ID NO: 5178 - protein, 359 aa, Botrimarina mediterranea
  source 1..359: note = Related to NZ_CP036349.1
MKPSEIRVEHLAEAMGLSINAFWFFARNIDNAYKPRRMRWDGKKHRPIDPLKPMAKKVLRRLHRFLQRNRLCHPAAHGGIKGRSCFTSARVHLGARNVWTRDAKDCYPSIAPEAMQKELQALSFRNDTSKALVLLFTYRGAVPQGSPISGDALNIFFWRLDQLLASMAGSLKLGYSRSADDFVFSGDDRDAGDQITACLENELLNRGMKINRKKKEESGHQTASDERLVHSIAVSRRRGTGVCRLHAREALELCRIFVAASRSVSANSIQSVASKRATIQGWLNYCRQADFGPAKTVRQQLEAGDRHVLRKLQSMDLSAKGNKWWYVNSTQGRDEPRRLSATWRAKQAKKSADLAGSNA

SEQ ID NO: 5179 - protein, 348 aa, Gimesia sp.
  source 1..348: note = Related to PAJV01000050.1
MNPKSITPAEIAAAMKMTERQLWTFTRNFEKLFKPTREIMIGSKKRAIDAPRDSAKKKLKLLHKWFFEKKLFHPSAHGGVRHRSCFTSAQQHLGKKFVWTRDASDCYPSITPEMFFYELKRIGFRQDTATLLTRLCTVRGSIPQGSPVSNDAINLYFWRIDQFLKSLSGANDLSYSRVADDFVLSGYKKYLGDNILLRLEGMLQQFGIQINDKKRRKSGFQNRSNPQLVHSIRVDLRRGTKISQEHRTKIIDLANSYEAACKRVQPSSLEPIAHKRQQLIGYLHYSRQADLSPIKHLKSKIQNGDRRVSRILKNLHISAFKGKWWLVSSKRNEPRRLKSIWMKRLEAN

SEQ ID NO: 5180 - protein, 384 aa, unidentified
  source 1..384: note = Related to CP036432.1; note = Planctomycetes bacterium TBK1r
MLSKNWLKWKHGSMRYSPAVKTRLSPPDLTVKRLAAVAQVDPSELMRYAGNTAVMYRSARKQWDGKKHRVIRPMNKKFKKMSKRLHKFFQRQPWWHGAAHGSICHRSCFTSAARHVGQRHVFTRDVENCFPSITTDALYRQLLLLRFKPDVADLLAKLMTCDGTIPQGCPTSTDAVNLFFAGLDQRLASTAAAMGAQYSRVVDDVVVSAKDKDAGQIVINRVEHEFERLGLKTNLKKKQTDGYRGPHQKRHVHGLDISSKRGVQISRQCKEKALAVAQSYLDSCKSATPLSLESIAAKRERAMGYMQHLRQGTGSTFRQLDQKVKAGDRAVQAKLRRVGVTCRKNRWWIIRGPQDRITKAARNIVREVARQWHATKYSTPSSSP

SEQ ID NO: 5181 - protein, 352 aa, unidentified
  source 1..352: note = Related to JACQXM010000014.1; note = Planctomycetes bacterium
MKPSDITPAMIAEACKVDEGRLWRIAERTESQYHSPRPKLIKGRHREIDPPNHDFKKVLRRLHRYLQRSLTFPRCVHGGLRGRSCVTAAGNHVGRKYIVTRDVKDCYPSIPTEALRRRLIDEGFRSDTALLLSRLMTNRGVIPHGAPVSGDALNLFLADSDRRLDHCVRRRGGSYTRSADDMVVSVGARESVTPLARVIEDEIEGHGLRVSEHKRRQKGVQHSNTRGGPRVHNLLVNNRRGVGAVPEHRAKGLRLAESYVCGARSVRPETLEGLASRRAELVGMINYFRQLRFSPARHLARLLRQGDRLVRSRLSTVGVSLTAKWWVNSRKRNRPREIGDRWRLKSDNSPAA

SEQ ID NO: 5182 - protein, 340 aa, unidentified
  source 1..340: note = Related to JADBLS010000178.1; note = Chloroflexi bacterium
MASLDGMASNMASWYKPARKVLIKGKLREIDPPTPVLRYRLRKLHRFIAANFRPHRGVHGGAKGRSCFSSARVHKGRRYIIKRDVKDCYPSIKTAALLDRLVAYGFCEETARILSLLMTLNGRLPHGSPVSADALNLFLFEADEVIVAKCTVLGGKYSRTYDDMVVSTNSGAASRELGEVLESQIAAHGLEVNSRKRAKEGFQPPHKRQLVHNIDVRSAGGVRIVREHEQKALAVATRYVRAARCVSPESLEPVALLRSQAAGYMHYCGQADFGPAKQLRRLLKQGDRHVRKRLTNECVTRCRKWWIISLRRNKAKQIAQRWRALQDEESRSSAPSTSIA

SEQ ID NO: 5183 - protein, 368 aa, unidentified
  source 1..368: note = Related to JADHYA010000008.1; note = Phycisphaerae bacterium
MKEKYRMQCKHKDVKKPLKGMTVEWLAEECGTTGDFLWILAKDSTFMYKPPRKQLKRSGNGYREIDPPKHQYKRILRKITKVLSSNMRHHPAAHGGVPYRSSFTSAKPHCGAKFIVTRDIRECYPSISSQNLFRSFRLLGASLSFAKFLSAIMTVHNHIPQGGPPSSLALNLYFRRMDDHFYRRAQSQGGNYRRFADDFVISNNSRKKAVALESELDHSISHRGLEVNEKKREKKGFLSGDQLKEIHSLVVNCRRGLKPKREHIAKGLQLAEHYARCCTCAKPADLPSLAKLRQRATGMMYYFRQADFSPARHIRNMLEHADKKVLRMLQSRGLQPHKNKWWLVHATRNEPQRLLCLWEPSAQVCSVA

SEQ ID NO: 5184 - protein, 366 aa, unidentified
  source 1..366: note = Related to JAAYDY010000091.1; note = Phycisphaerae bacterium
MNSETASRTADAGTLLRGITVEAIAQACETSPDELWRLARNSKLLFKLPRQQRKKGGGFRVIYPPTKTHKPLLKRMARFLSRQIPVHSAAHGGVKGRSSFTSAAKHLGATVLVVRDIEECYPSIGPQALANALKRLGASPSLAKFLSSIMTVDGQIPQGGPLSSLALNLFFYRQDEHLHRKARRVRGAYTRLADDLVASVGDTETGAAMGREFDSAISSRHLRVNASKRAKKGLLGGDKLKEIHSLIVNSRRGLRPKDEHVQKALRFLQNYCRRCRSATPADLESLAYLRRVVCGWMYYMRQAARSPARHMRKQIHLADARVTQMLKKHAIQAKKNKWWVLSSKRNEPRRLAAQWVWREVNAARAG

SEQ ID NO: 5185 - protein, 326 aa, Rhodopirellula rubra
  source 1..326: note = Related to NZ_JACHXU010000003.1
MSEHTFLDWVARGDERFLPTRIDSSSGKFRELDVPKPSDMRIFRMLNKSLGFDRLFHRVAHGGVKRRSSVTSAKSHIKAPFVWVIDVTNCFPSVKFDRFASELGHLGVTPAMQKIIAETLFCRGQIPQGCPTSNLALNLFFMALDYQMAEYCWKRLISFTRMADDIVVGAKERSRGEHAVDKLVAGLAKLDLTVNEKKRAKVGFQPNTGQQLVHSLEISSGSLLLCDEHRNRARQVAEKTVGACRSVQPQSLERAADYRRQLNGWFHYSSQSQDLLTSDLAKAIRVSDNAVKSRLQRAQLDCKRWRWWEIKTATELAARWGSHISV

SEQ ID NO: 5186 - protein, 405 aa, unidentified
  source 1..405: note = Related to JADJBV010000001.1; note = Deltaproteobacteria bacterium
MGDLIHTRRWDLPDIDELLRERGLPELSDGGNRVPISSLPIQRIAVRRRPRRPSEGNELDVLMRICTALGCNADWTTVVQVARASHWERHRRYKKSGAIRWLDVPEERLKTALGEIHRLLLSSMPRDGTSTAFHAGASPALHARVHSGAVAAAAADIRNFFGSVRPRHLLPWFGLTDYPKASLLPGWSELGRKAVCQLLFRYRDGKPAYLAQGAPSSPLAANLAGLWLDRAIVSAAARQFAPGKFAYSRYADDLVLSAVDCEEPTRFAEEAAQILARSVAGQGWTIQSSKSRQWTTADSVALHVCGLRVPTRPGEPLTLGRETWRRARSALHRLRHRSDFGLHAAGSPAVAHGLLAYSYSATGDLRWLAYTSARLAYLARRLGGPIFSESLLAGWSDESSLADVP

SEQ ID NO: 5187 - protein, 354 aa, Ruegeria pomeroyi
  source 1..354: note = Related to JAGQAG010000001.1
MPFSIKKREKTKLRDRFPVLWQVLGDLLANETCYCASDYNSFTFKARRSRKSRTIDAPCPHLKALQRQALNILLAPVVVHEAAMAFAPGKSIAMNARCHLGATHLYSTDIRSFFTSVSRVHVKEMLATRVKYLSVEAREEILDLVTWNERLPQGAPTSPHIANLVMFSFDELCTDMATRVGATYTRYADDISISSTSADVLLQMQKVVNMGLGALGMEPHPEKTRHLGPNQTKLVTGLDIGGSHIRPTRAFRKKTTALVRMSVKYPAEMEKHQEVIFGYLAFWYDVDPGDPQLANLLWQMGQPREASRAKATRQKQIGMMSKPSPTTPPPKEQQAVPLNAERKPSKPPVTKPDV

SEQ ID NO: 5188 - protein, 314 aa, Lutimaribacter saemankumensis
  source 1..314: note = Related to NZ_FNEB01000020.1
MEDVFYDRANSYHSFTIKARRSAKIRTIDAPNPPLKLLQRATLDKLLAPVVAHDASMAFAPGKSIAMNARRHLGASYLFSTDIRSFFPSVTSQHVREMLEARFQHFSPEAREEVQDLVTFNGRLPQGAPTSPHIGNLVMFSFDEICCAKAAEMGAVYTRYADDISVSSNSSEPPQRMQEVITGYLSAMGMELHPDKTRQLGPKQTRIVTGLDIGRSRLRPTKAYRKKAAALVRMSSKYPTKMARQHYKILGYLAYWNDIDPSDPQLAALLDQMKRPSWAAKVRASAARQKPRGQAMFHRFPEELLKDLGPGLRK

SEQ ID NO: 5189 - protein, 351 aa, Falsihalocynthiibacter arcticus
  source 1..351: note = Related to NZ_CP014327.1
MIFGSDDRKVNILEEYPTLCQVLEVSQEEGNCDCEVSYNSFIIKSRRSKKYRTIDAPCPHLKSIQRALLDRLLASVPPHDAAAAFVRGKSIAMNAQRHHGASHLFTTDIRSFFPSVKDSHVREMLRIHFPHFSQVFCEEIISLVTNGGQLPQGAPSSPHIANLVMSKFDERCQEASDNLKTVYTRYADDISISSNDAASLRRMERVVRIGLDALDMEIHSEKTRHLGPQQTKLVTGLDIGGSRIRPTRAFRRKTSALVRMSVKYPGKMNRHRDTIRGYLAFWYDIDPIDPQLPSLLNQMALHRWEVRLRAAQETNQRLLPIQPNPLQGRTQTNGYTKVRSNIVSLFKKLRD

SEQ ID NO: 5190 - protein, 323 aa, Mesorhizobium sp.
  source 1..323: note = Related to RCIZ01000009.1
MSSEQSVLSSVLGLDSTAIKPVMGWYGPMFYHSFDVKPKRRGRKARQILAPIDELKTIQRAILEKLLSHVSPHPAATAFFAGRSIVSNARQHHGCRYLYKTDISDFFPSVTTGMVRVVLERHFPHLSQSAIDEIIRLTTHEGTLPQGAPTSPHLANLALYDFDDSLSRLCNEIGARYTRYADDVTVSAQDEYALSIAAGAIRSGFAELGLAQHPAKTRCFGPNCRKIVTGLDVSGEVIRPPRSFRKKAAALVRMSETYPKRMERHSPRVMGYLAHWQGTTPDDPELYNLKHRMRQLQRREAIADHTVNAVSSWAIEDDLKISF

SEQ ID NO: 5191 - protein, 453 aa, unidentified
  source 1..453: note = Related to nan
MTAQTPERLVFEGREHPMFSEPLSDFLRSGSGRPEFQMQSTACWRGYIGTWEVIGRRLYLVKLEGRLKSGEKANLAAVFPSSEERVFARWFSGIIQLPQGDEIEYLHIGFASIYERDLLLRFEDGELVDRRLRVNGETGSDAPGDCALLPRREDAKLAAGPGHQLWEQIERAAEELSTQPKTFAALALREFYYTEGSVRIARKIRALACPSEQLKKLQRSILTSILDVAAPHKQATAFFRGCSIIQNARQHHNKHYMFKTDIRSFFGSITTEDITTTLRRFIPNLSQKNLEALTKVLSCDGTLPQGAPTSPHVSNLHMRDFDELVSSQAKKHKCSYTRYADDIAVSSDNKFAVHQMSEIVGDALGNARFTQNTRKTHLLGKFDRKIVTGLDVSGDHIRPTKKFRKTTKAMVRVFIVHDRKAMLPNIQSRLAFWRSIRPDDPEMLQLRKSIASA

SEQ ID NO: 5192 - protein, 304 aa, Qipengyuania sp.
  source 1..304: note = Related to NZ_JADMNM010000013.1
MLTEAPRHHLWKEIERAAEELSTHHPIIKLNAFNGYSGREFFYTEGSIRVARKRRALACPSEQLKELQRIILTSILDVAAPHKQATAFFRGCSIVQNARQHHRKDYMFKTDIKSFFDHIKSADIMRAVQRFIPNLSQANLDALTKVLSCDGALPQGAPTSPHVSNLHMRDFDELISAEARKRGCSYTRYADDIAISSDDKFAVHQMSEVVGEALEKAGFTQNKRKTHLLGKFDRKIVTGLDVSGVYIRPTKKFRKTTKAMTRVFIVYGRKAMLPSIESRLAFWRSIRPDDPELFQLRKSIDNER

SEQ ID NO: 5193 - protein, 494 aa, Kiloniella majae
  source 1..494: note = Related to NZ_MTSX01000001.1
MGKSKNNEFSRRQLLIAFASTSIIGIMPSITSASSHIYEKENALIWLIGTLQPISLNELENTSFFPDRSWLIETINNFEEQLLINKHKRISEFYFSLTHEGHEKLPWIHAHSKDITRLSILRSSIFRSKNKVKFDRWIASAGVSPPKRTNVPVSLGAHNFARIEDEMVSSDRLFSDKNQLISFNSAQDLADSIPQNLSQSEVPLYKFAIDLGISVEFFQKFFEHRYEMYKFKKTRKQNGTLREIEIPLENLKTLQSVMAWKLSFQLKPHKTVHSFIRGRSSITNAKEHIRGDFIGKSDIRNFFPNISSSKIYTSLISSGYNRFEAKFIALFCTIQKNKRSKLPHGSPTSPILSNFVLYDADETIYQYCKARDITYTRYADDFTFSGKNYSKIQQAIKYQISALENHDFQPNHSKVKISNARDFPRVTGINISGDIFPPRNLKKRARAVFHLIETGNSSPKVRSQAAGYLGYLSQFTSFTRTATYKKWQTILERR

SEQ ID NO: 5194 - protein, 334 aa, unidentified
  source 1..334: note = Related to JABHVZ010000016.1; note = Candidatus Peribacter sp.
GYYTFTIPKGSGGTRLITAPDDELKAKQRKLLKKMQKKHWISRKAHGFRKRHNCLTNAQVHAGKKYILNIDVKNFFPSITSIAYRNYATRERNLMETKYKDEDRGFPNLFFYAATPVFHSGSLPQGAPTSPFISNIYMRRFDTQIEKLLRQYISDDILYTRYVDDLTFSSNSRAVERVIPIVRGKLKSLRLEINDDKTKFMSPSQRQEITGINVNSGRPTIGKAYRRKVRAIVHRAEQGWVITSAQKERLLGMISHIALCHPSEAAKYRDALLPVSISPNSARMFSGVNRVKLPVKKTRSKKKQSNSNAGVTGANRTVKRKIAIDKKGEVHDID

SEQ ID NO: 5195 - protein, 356 aa, unidentified
  source 1..356: note = Related to JAFDVW010000003.1; note = Acidobacteria bacterium
MLMGPQQMQPVAAAAAWNVPRIESPDALADWLRLTPGELRWFADLNHLNDRSRIQKLSHYHYQISTKPAGGWRLIESPKPRLKHIQQQVLHHILERIPPHRAVHGFLKGRSIQTFAAPHVGRRVVLRMDLQDFFPTFRGARIRAFFRTLGYPETVADLLGGLCTNAVSHNAWPTRMHHEDSAHRSRVQAFYSRVHLPQGAPTSPLLANLCAYRMDCRLAGLAESAGARYTRYADDLAFSGEKDFERGIERFSTHVAAILLEEGFQVHFRKTRVMRQGVRQHLTGIVVNRRLNVMRPDFDRLKAILTNCVRLGPESQNREGHANFRSHLEGRIGFMEMIHPQKGARLRRIYREIRWP

SEQ ID NO: 5196 - protein, 442 aa, unidentified
  source 1..442: note = Related to JAFAPG010000514.1; note = Acidobacteria bacterium
MQKLFLVKVIAGAFLSGEPTIPEIVARLSRTLGKRWDWIHPLAQRYIKTIAGRTRPRRRDVVKFLLQDSGFKKAWSNHAHQLSIKQWLTEPQRMQPVSAAENWGIPVIESIGALAQWLELTPSELLWFSDLRGLGCRSDERRLRHYHYRILDKQYGNIRLIELPKPRLKQLQLQILAQILERIPPHPSVHGFVKRRSIKTFVAPHVGRPIVLRMDLREFFPSFRAARIQTLFRTIGYPEPVADLLGGICTNAVSRDVWKKPSPDVHPCRWSEARILYSKPHLPQGAPTSPALANLCGYRMDCRLAGLAKSVGAQYTRYADDLAFSGDKALEMRIERFATHVAAILIEEGFMVHYRKTRVMRQGVRQHLVGLVINHHVNTIRPDFDRLKATLTNCVRLGPESQNRNAHPHLRLHLEGRLGFVEMINPSKGKRLRAIFNQINWQ

SEQ ID NO: 5197 - protein, 442 aa, unidentified
  source 1..442: note = Related to QHZV01000271.1; note = Acidobacteria bacterium
MPFSSLLRTVAASFVAGETTTEEIIARLSSTLGRRWRWLGPLAQRYVKFVSARTRPRHSEVVQFLRHDAGFRRAWSRHKNEISIEQWLSGPAQMQPVTAAAGWDLPAIESIGELAAWFGLTVSELLWFADLKGLGYRQKSEKLHHYHYRILPKPSGEIRLIEAPKPRLRELQRHILSGILSRIPPHPAGHGFIKGRSIKTFVLPHVGQHVILRMDLRHFFPSFRAARIQTIFRTTGYPEPVADLLGGICANCTPRDVWNKYGSESDYDCRWQARVLYCRPHLPQGAPTSPALANLCTYRADCRLSGLARSAGARFTRSADDLAFSGGADFGRHVERFSTHVAAILLEEGFDVHYRKTRVMRQGVRQHLAGVVLNQHVNVMRADFDRLKATLTNCVRLGPKSQNRESHSSFRSHLEGRMAFVEMINPAKGKRLRAIFDQIHWE

SEQ ID NO: 5198 - protein, 451 aa, unidentified
  source 1..451: note = Related to JAIQGJ010000043.1; note = Acidobacteriia bacterium
MRNHSLLTSLARSFLAGEPDTDQVFTRASRLLGRRWRWLRPLARRYVMAFADKARPRQRDVVRFLLHDPDFKHAREKYFKELSVRQWLIGPQQMLPVAAAETWGVPAIGSIGALADWLQLTPGELQWFADLKALGYKRKDCPQLQHYHYKVFSKRSGSIRFIESPKPRLKELQRQILARILDRTPAHPAVHGFCRGRSIKTFAASHTGRRVVLRMDLQDFFPSITGARVQALFRTAGYPESVADLLGGICTNVVPRDVWKEPAHEIDLRQLWEARVLFSRPHLPQGAPTSPALANLCTYRIDCRLAGLAKSANAEYTRYADDLAFSGGHEFERSVERFSTQVAAILSEEGFAINHRKTRIMRQGVRQHLAGLVINQRVNVTRSGFDCLKATLTNCVRLGPESQNRENHPSFQAHLEGRIGFVEMINPAKAIRLRRIFERIQWTGMESQRER

SEQ ID NO: 5199 - protein, 442 aa, unidentified
  source 1..442: note = Related to QHYC01000242.1; note = Acidobacteria bacterium
MSRSSLLRVLATSILAGEPTVDHIVVRVSRTLGRTWRWLPPLSQRYVKAFAGRTRPRRRDVVQFLRHDPGFLCAWSKHFHELWVEQWLTEQQRMQPVAAAETWAVPVIESPGALADWLGLRTVELQWFADLKGLGYKSSRPKLRHYHYRILAKQSGNIRLIEAPKPRLKELQRQILAQILERIPPHPAVHGFVKGRSIKTFVAPHVGQRVVLRMDLRDFFPSFSAARIQAIFRTLGYPESVADLLGGICTNATPRDVWSRPAFDIDLSQVQEARALYSRPHLPQGAPTSPALANLCAYRVDCRLSGLAKSVGVEYTRYADDLAFSGNEAFERCVDRFSTHVAAILLEEGFAVHFRKTRVMRQGVRQHLAGLVVNQHMNVMRPDFDLLKATLTNCIRLGPESQNRDAHPRFRSHLEGRVGFVEMINPVRGRRLRTIFEQIQWR

SEQ ID NO: 5200 - protein, 445 aa, unidentified
  source 1..445: note = Related to QIAA01000032.1; note = Acidobacteria bacterium
MSKSSLQRALANSFLAGEPYLEQLVSRASRTLGRDWRWLRSLAHRYLKRFAGQTRPRHRDVVRFLNDDSGFRRAWLQNHSELTVAHWVTEPPRMQPVAAAESWKIPSISSAGDLAAWLGLSIGELQWFEDVRRLVYKEGSSKLRHYHYRVVAKQFGAVRLIEAPKPRLKTLQRQILSQILEQIPAHPAAHGFIKGRSIKTFVSPHVGRRVILRMDLQDFFPSFAAARIQALFRTFGYPESVANLLAGICTTTTPQSVWEGTGFDVSLKQLQEARILYSNAHLPQGAPTSPALANLCTYRVDCRLRGLASAAGAAYTRYADDLAFSGDTQFEQGIERFSNHAAAIILEEGFAVHFRKTRIMRRGVRQHLAGIVTNHHINIMRPDFDRLKAILTNCVRLGPQSQNRDAHSHFRLHLEGRVGFVEMINPAKGYRLRRILDQIQWPTET

SEQ ID NO: 5201 - protein, 444 aa, unidentified
  source 1..444: note = Related to JAFDVQ010000015.1; note = Acidobacteria bacterium
MGGPGFYAALANSMVAGEATEDAIAARLAQTLGHRWRWIRPLARRYVARFGGAMRPRRRTIAQFLITDEGLSRALRLHRKDIRIANWVAPAGDMQPHRAAKNWPVPAIETVGALAEWLQVTPSELEWFADLKRMISRREDGFEGPLSHYHYRILAKPGGDVRLIEAPKERLKKMQRQILADVLEKIPVHPAVHGFRRGRSIKTFAAPHVGQRVVIRMDLRDFFPSISAPRVQALFRTAGYPERVADLLGGICSNATPRTLWTKKGSGIDPLRMAEARQHYAWPHLPQGAPSSPALANICAYRVDCRLTCLAEASGAVYTRYADDLAFSGGMDFERCAERFAIRAAAILLEEGFAVHHRKTRIMRQGVRQYLAGIVVNEHVNVIRRDYDALKATLTNCVRHGWESQNREGHVNFREHLAGRVSFVEMVNAKRGAKLRALFERIRW

SEQ ID NO: 5202 - protein, 401 aa, unidentified
  source 1..401: note = Related to JACQZR010000185.1; note = Acidobacteria bacterium
MTLGRPWRWLRPLGQRYLARFSQGTRPRTAGVVDFLLQDPGFRRAAQRHARSLDVANWLCEPRQMQPVGKAAGWDIPTIETVTDLASWLEIPLDALNSAAVPFATSHHYHYRLLSKQSGMLRLIEAPKPRLKALQRRIAAGILDCIPLHPAVHGFRHGHSIKTFAAPHAGQRVVLRMDLRDFFPTITRARVQAFFRTAGYPEAVADMLGILCTNSTPGSIWKPADPKLVPEMRALHRTPHLPQGAPTSPALANLCAYRFDCRLSGLALASGAFYTRYADDLAFSGDTDFERSVDRFTTHAAAILMDEGFSVHHRKTRVMRRGVRQHLAGLVTNDIPNIYRGDYDRLKAILTNCLRHGPASQNRNGHPDFRAHLDGRISFVEMINPSKARKLRALFHQINWA

SEQ ID NO: 5203 - protein, 442 aa, unidentified
  source 1..442: note = Related to JAFAQG010000033.1; note = Acidobacteriaceae bacterium
MANPSLPNLLARSFLAGEPSLDQIVSRCTQVLGRRWLWLRPLAQRYLETTTSKTRPRQREVADFILRDPVFSRIWSERAHTLAIEQWLPAPSRMAPVPAARAWDIPLIDSPAALADFLWLDYAELDWFADLKKLTYKTAHPRLRHYYYRVLTKQSGGVRLIEAPKRRLKRLQREILAGILEKIPPHPAVHGFFKGRSIRTFVAPHVGRRVVLRMDLRDFFVSFGAARIQAFFRTLGYPESVADLLGGICTNAVPRHVWHDAGSDIDPAEFERVRSLYSRPHLPQGAPTSPALANLCAYRLDCRLAGLAKSAGVTYTRYADDLAFSGGSEFEKHVERFSTHVAAIALEEGFSVHHRKTRIMRRGVRQHLAGVVTNERINILRADFDRLKATLTNCVRHGPASQNRTAHPSFRAHLDGRVAFVETINPERGKRLRTLFEQIDWR

SEQ ID NO: 5204 - protein, 447 aa, unidentified
  source 1..447: note = Related to QIAH01000498.1; note = Acidobacteria bacterium
MKGSVFYSVLASSLLAGEPTVDLTSERLTRTLGRRWRWIRPLVERYIKRFSGHTRPHRREVFEFLRHDQHFQEARAKYRKEIRIEHWLMESELMRPVPAAADWNLPRIESVGALAEWLALDLMDLLWLADLKGLASKYNRPPLQHYHYRILPKASGRLRLIEIPKPRLKDVQRQILFHVLNKVPPHPAAHGFVKSRSILSFVRPHVGRPIVLRMDLQDFFPTFPAARIAAFFRTAGYPESVADLLGGLCTTTAPRSLWLKSDSDYAFENIYQARDMYSRPHLPQGAPTSPALANVCAYRMDCRLAGLARSVGAEYTRYADDLAFSGDESFARHVDRFSIHVAAILLEEGFSVNHRKTRIMRRGVRQHLAGIVANEXXXDFDRLKAILTNCIRHGPGTQNRKLHPQFRSHLLGRVAFFESINPAKGQRLRAIFEQIQWPERTGNEMKQ

SEQ ID NO: 5205 - protein, 435 aa, unidentified
  source 1..435: note = Related to JAFKEE010000018.1; note = Acidobacteria bacterium
MANPALVAHLARCFASGETTADRIAERAAEVLGRTWFWLLPLARRYLKEHKGSTRPKQHDVIRFLLDDGEFRRRANKLSVARWLMAPQRMQPVPAAATWSLPELVTAGDLAAWLGVSPGELDWFADRKGLNARTKRAPLDHYHYRILAKPRGGLRLIEAPKPRLKEMQRRILTEILNRIPAHPAAHGFCPGRSIRTFAEPHVGRSIVLRMDLQDFFPSLPAARIQAVFRTLGYPESVADLLAGACTHRTLSSVWRAAEPSISGAELFLARQLHQSPHLPQGAPTSPALANLCAYHADCRLTGLARHFGAVYTRYADDLAFSFDEPGDVSRFTSYAAAILLEEGFAVNNRKTRIMTRGRQQRLAGLVTNARLNIPRSDFDQLKATLTNCVRFGPAEQNRAGVADFRAHLLGRIGFVESIHPGKGRRLRILFDNICW

SEQ ID NO: 5206 - protein, 435 aa, Paludibaculum fermentans
  source 1..435: note = Related to NZ_CP063849.1
MANPALLSILARCFASGEPTADGIAARTAQALGRPWFWLLPLARRYLKAHGALTRPKRQEVIRFLLDDTGFRHRAHKLSVAKWLTEPQRMQPVQAAAEWNLPELVTEGDLASWLSVRPEELDWFADPKGLNARTSRPPLEHYHYRVLAKRRGGIRLIEAPKPRLKEMQRQILGEILDLVPAHPAAHGFCPGRSIRTFAEPHVGRPVVLRMDLQDFFPSLPAARIQAVFRTLGYPELVADLLAGVCTNRTHSSVLRTPRPAIPQVELIEARRLYHWPHLPQGAPTSPALANLCAYRADCRLTGLARNFGAIYTRYADDLAFSFGQPSDVRRFSTYAAAILLEEGFAVNHRKTRIMTRGMQQRLAGLVTNDHLNIPRSDFDTLKAILTNCVRLGPATQNRAGVPDFRAHLNGRVGFVESIHTGKGSRLRAIFDNISW

SEQ ID NO: 5207 - protein, 440 aa, unidentified
  source 1..440: note = Related to JACJWB010000023.1; note = Bryobacterales bacterium
MDRRTLATALARALCAGEADAASAAERLEQTLGRKWRFVAPLARRYAAAFEAVVRPRLADVERFLSRDGGFCRAARRHGPQLAVAQWIQEPAPAMRPAAAAREWGLPAVATPGDLAAMLGLEAADLDWFADLRGWGAGGVDAKLEHYRYRVVPKRSGRLRLIEAPKQRLKQVQRRLLAEILRSVPPHPAVHGFVAGRSVATFAEPHTAKRMVLKMDLRDFFPSVRAARIEAFFRTAGYPEPVARALTGLVTNAAPRRVFAKEGELGLVHGARSLYCRPHLPQGAPTSPALANICFRRADQRLEALARSAGADYTRYADDLAFSGGDDFARHARRFSLHVAAIATEEGFAVEHRKTRLAPESGRQRLAGVVVNHRPSLPRAEIETLEAILTNCARDSPETQNRDGHPRFREHLAGRIAYLAMLNPSKAAKLRAIFDRIAWT

SEQ ID NO: 5208 - protein, 441 aa, unidentified
  source 1..441: note = Related to JACMLA010000763.1; note = Bryobacteraceae bacterium
MQRSLVIKKLAEVFLASGINSPFLTSRCAVVLGRNWRWLRPLADRYVVTFSNRIRPSYREVLSFLETDTGLKEAFTRNSGQFEIKQWIEETPHMRPVPAAQAWPVPPIETTGALAEWLWLDAGHLEWYADLKAFAETSISEKLSHYSYHVLRKRTGSVRLIEAPKRQIKKLQTQILEWILNPVPPHPAVHGFIAKRSITTFVAPHTGQRVVLKMDLRNFFPSLRAARIQAFFRTAGYPDEVAQLLTGVCTNITPRRFWRAPELNLTLQEIQDMRDLYGRPHLPQGAPTSPALANLCAWRLDCRLQALAASAGAQYTRYADDLVFSGDEHFDRSVSRFSAHIGAVVLEEGFAIHHAKTRIMRQGQQQRVAGLVVNQHANVARPDYDRLKAILTNCIRHGPESQNQNAHTSFRQHLEGHISFVHMVNPAKALRLRALFDQIAW

SEQ ID NO: 5209 - protein, 377 aa, unidentified
  source 1..377: note = Related to PSQY01000227.1; note = Proteobacteria bacterium
RDRGLLRAYENYGHRINVITSFPEVQEMCPVPAARTWGVPPIRTEGELATWLGIELNELYWFSDVAGFGARLGAPPKTRHYSYWILTKRSGNIRLIEAPKSRLKALHRKILSEILERVPIHDAAHGFVKARSITTFAAPHIGRRVVLKMDLQDFFPSFHAARIQTLFRTIGYPERVADLFSGLCCASTPRELWKQMPIEVNPQQWRESRDLYFRTHLPQGAPTSPALANICCYRLDCRLASLANSAGAAYTRYADDLAFSGVGQFVRGIERFANHVAAVLLDEGFSVNFRKTRIMRHGVRQRLTGLVINQHPNVPRDEFDRLKAILTNCVRLGPDTQNREGLSHWRQHLEGRIGFVEMVNPKRGAKLRRIFDVIAWN

SEQ ID NO: 5210 - protein, 443 aa, unidentified
  source 1..443: note = Related to JAFAUE010000361.1; note = Acidobacteria bacterium
MRPNVCLFEALASAFVAGDPTVDGIVARSARMLGRDWRWLRPLAQRYVETFAGRVRPRRSDAVDFLRGDKRFRRICQRIPSHIGIAHWLTQSQRMLPMAAAKGWRVPSIESVSALADWLGTDENYVEWFADLKALSCKSDHNKLRHYHYRVLLKDSGDVRLIEAPKQSLKRLQQRILTGILNGIPAHPATHGFVTGRSIKTFAAPHAGKRIVLRIDLRNFFPSFRAARIEAFFRTMGYPETVAAMLAGICTNATPRDIWHNVKPGGGPVQFWETRSLYARPHLPQGAPTSPAIANLCCYRLDCRLAGLARSAGAVYTRYADDLAFSGSKSFEKSVERFSIHVAAIALEEGFSVNHHKTRIMRQGVRQRLAGVVVNQHPNVLRHTFDRLKATLTNCVRYGPSSQNRERHINFRAHLEGRISFVEMLNRNKGSRLRKLFGQIRWE

SEQ ID NO: 5211 - protein, 445 aa, unidentified
  source 1..445: note = Related to JAEUQG010000434.1; note = Bryobacterales bacterium
MTGRIAAAMNAAFLAALARSLMAGEQTVEAARARAMRTLGRRWRWAGPFAARYIAAFRHGPRPRLKDVIAFIRADEGFDLAALTYGSKLSIAHWLAAPQRMLPYGPAADWDLPSIHTEGDLARWLALHATELDWLADRKNLCRKQANPKLRHYRYVIEPKRRGGIRLIESPKRLLKELQRRILAEILDRIPPHPAAHGFVKGRSIVTFATPHTNQPLVMRLDLENFFPSFPAARVQALYRTLGYPDAVADVLTGLCTTSTLHDIVRAQTFEDRRLYEQRHLPQGAPTSPALANAMAYRLDCRLSGLARTAGAVYTRYADDLAFSGGDEFRRNAHRFQHHAAAIALEEGFAVNFRKTRIMRQGVRQSLAGLVVNGGLSIRRRDLETLEAILTNCLRHGPTSQNRANHGDFRAHLEGRISYVEMVHPEKGRRLRSLFDRIDSWANTL

SEQ ID NO: 5212 - protein, 432 aa, unidentified
  source 1..432: note = Related to JAFDVS010000120.1; note = Acidobacteria bacterium
MKISFPAAVVSAVARSLMAGEPTVEGAHVRMMRTLGRPYRWLLPLAGRYVRAFAGRTRPRLREVVQFLLNDRGFRRVRQRQLAVEHWLTEPQRMLPCGPAAEWGLPVVECEADLAGWLGLHLSELEWFSDRKGLCRKHGSEKLQHYHYRMEEKRSGGIRLVECPKRELKELQRWILGSLLDRIPAHAAAHGFVKGRSIVSFAAPHAGKAVLLRMDMENFFPSFPAARVAALFRTLGYPEVVAEHLMGLCTNAVPRGVWGTRVEGRMLYSRRHLPQGAPTSPALANAMAYRLDCRLTGLARTAGAVYTRYADDLAFSGGEEFRRVVDRFGIHVAAVALEEGFAVNHRKTRVMGQGMRQALAGVVVNQGVSIRRDELEKLEAILTNCVRTGLAAQNREGVADFRAHLEGRIGFVEMVHREKGRRLRAIFEKIRG

SEQ ID NO: 5213 - protein, 344 aa, Nevskia soli
  source 1..344: note = Related to NZ_CAJCHS010000439.1
LVAEWLPEAPRMRPVAAAEEWKLPAIETVGDLADWLSLYPAELEWFADLKHLNNRRPKLQHYHYRVLVKRSGGVRLIETPKATLKALQRRVLSGILDHVPVHPDVHGFVRGRSIVTYAQPHVRQDVLLRLDLENFFPAFPAARIQALFRTLGYPETVSDRLGGLCSNSAPADACGALYARPHLPQGAPTSPSLANLMAYRLDCRLSALARTAGGRYTRYADDLAFSGGVPFRRGVDRFASHAAAIALEEGFGVNHHKTRIMRPSTRQQLAGIVVNHHVIISRRELELLEAILTNSVRRGPASQNRDGTPDFRGCLQGQVSFVEMVNRAKGQPLRTLFEAIDWER

SEQ ID NO: 5214 - protein, 452 aa, unidentified
  source 1..452: note = Related to JAFDVZ010000005.1; note = Acidobacteria bacterium
MSRAAILSVLARSLLAGEPAYPAARSRAERTLGRRWRWLGPLARRFAGRFGDAVRPRHRDVVRFLARDAGFSEALHAYGGRIRIAEWLAEPQRMLPVEAALAWDLPVIETAGALAEWLGVTVDELDWFADRKDLCGRANASEQLRHYRLRLLAKRTGGARLTEAPKPRLKAVQRRILEGILDRVPPHPAAHGFVQGRSIVTFAEPHARRRMLLRLDLADFFPASPAARVEALFRTLGYPEAAAGLLAGLCTTATPRAFWRDCPAWLGAEEWSAARTLYARPHLPQGAPTSPALANAMAYRLDCRLAGLARSAGAVYTRYADDLAFSGDLEFARGVHRFAAHAAAVALEEGFAVNHRKTRIRGQGARQRLAGLVVNDRPNLPRRDLERLEAILVNCARRGPQGQNRAGEADFRAHLEGRVGYVEMVNPAKGERLRRILETIAWPERQGRTLDS

SEQ ID NO: 5215 - protein, 334 aa, unidentified
  source 1..334: note = Related to JAIEMJ010000003.1; note = Bryobacteraceae bacterium
MPEAWGLPKIASAEALAEWLGLDPPDLAWFADLRGMTRQAPTEALRHYRYHVIVKRHGNLRLIEAPKPRLKAIQRQILTEMLDRVPPHEAAHGFVHGRSIASFAAPHTGQSAVLRLDLDHFFPRLQRARVRAFFETLGYRKPVATLLGGLCTNRAPRFLPWPDFATMQVHTAPHLPQGAPSSPSIANSCAYRADCRLAGLAAAAGVRYTRYADDLAFSGGDEFSRGALTFATHVAFILGEEGFAVNHRKTRLMRQGVQQYLTGLVVNQHLNVDREDFDRLKATLTNCVRRGLASENREGLTDFRAHLEGRVGFVEWINPRRGERLRGLILQIKD

SEQ ID NO: 5216 - protein, 329 aa, unidentified
  source 1..329: note = Related to AP025252.1; note = Bryobacterales bacterium F-183
MHARFALSHPLPPLPTEVALADWLCLSPSELDWFANRRNLATSAARSHYRYHLLTKPSGGVRLLEAPKFRLKCLQKRIQTGILDLLPPHPAVHGFVKGRSVKSFAIGHVGQPGVLRIDLENFFASVRSARITGLFRTLGYPPPVAKLLSELCTNSVPKTVLADHPERFLYFNRHLPQGAPTSPLLANLCAYRADCRLAALAKADGSLYTRYADDIAFSGFVNNDLAAQASAILAEEGFTVNHHKTRLMSEGVRQHLAGLVVNAKPSTPRDEYDRLKATLTNCARYGLDSQNRDKHPNFRQHLEGRVAWVEYIHPERGAKLRTILAKLEP

SEQ ID NO: 5217 - protein, 432 aa, unidentified
  source 1..432: note = Related to JAEUQE010000020.1; note = Bryobacterales bacterium
MARILNGAPFDVPGMIASADEMLGRRFRWVRLLAKRYASAMAGKTRPRLRTTRQFLIQDGAVSEAWRKHKIRVEQWVTHGPRMQPAPAASEWDLPRIETSGDLADWFWIEPGELEWFADLKRLGNKLGVAKLQHYRYLILKKPNGRLRLIEMPKRRLKSFQRQILEFILDRIPVHPAAHGFVKGRSIHTFVAPHIGQEVVLRIDIADFFPAISQERIQALFRTMGYPEAVSDLLGGICTNAVPYEVWGQTPEGVDARVRYEARNLYRWAHLPQGAPTSPSLANLCAYRLDCRLAGLANAAGVRYSRYADDLAFSGGGAFVKNVRRFAVSVGSILQEEGFAANHRKTRVMRRGVQQRLTGLVVNERPNVSREEYDRLKAILTNCARHGAGSQNREGHAFFRSHLEGRVGFVEAVNPERGHRLRKILERIDWEE

SEQ ID NO: 5218 - protein, 454 aa, unidentified
  source 1..454: note = Related to JAEUQF010000393.1; note = Bryobacterales bacterium
MPLALEIEICAALAQAFTNAASLPDMVASADHLLGSRWRWVRLLVKRFAAANPSATRPRYRDAYQFLAKDGAVRRALYRHPGEIHLAHTIPSPPRMRPVPAAQPWNLPTLETLGDLAQWFWLSPEQLDWFAGLNRFSKNGSEELQHYRYRLEPKSHGGLRLIEIPKPRLRKLQRQILHYILDLIPAHPAAHGFVKGRGILSFAQPHAAKPIVLRLDLQDFFPSIYGPRVQTLFRTFGYPENVADSLGGICTNIVPSHIWNTTPEGTTLDAKVAAKALYRSSHLPQGAPTSPALANLCAYRLDCRLTGLAKAAGAVYTRYADDLAFSGDASFARGVDRFATHVAAIAAEEGFSVNHRKTRIMRLGVRQHLAGLTVNEKPNIRRDTFDELKAILTNCLRHGPATQNRENHPDFRAHLEGRVSFVASIHPAKGLKLQSLLRQIQWADTPRPAAPSPP

SEQ ID NO: 5219 - protein, 458 aa, unidentified
  source 1..458: note = Related to JADLFK010000145.1; note = Gemmatimonadaceae bacterium
MKPHDFATVLAIALLAGDQSDDAAVARLRLVARGRQRDLLRLVGYYRALAPNGVAPRRREVARQLRALFDAQRERGAAPWVRARTQVDVPLPSPVMRPSAMRTSAVRAAPAHAWDPAPRDRPDIATVGALASWLELPVEELLWFADCRDLNRRHSAPSLRHYHVSTRPKRHGGVRVIEAPQTRLKAIQRKILSEILETIPLYYSAAHGFVKGRSVRSFAAEHVGKPLLLRIDLADFFPTVSGARVQALFRTLGYPEAVADLLGGLCTATTSRHVFGAVRAQVDRRMLQHAMELYTRPHLPQGAPTSPALANACAFRLDARLTGLADWAGAVYSRYADDLAFSGGDEFARRIDRFCAEVGAIARDEGWRVQDHKTRIMRRGARQQLAGVVVNERLSTPRVAYEQLKATLTNCVRFGPASQNRAAVVDFRAHLLGRMAWVASLHAARGRKLHAIFDRISW

SEQ ID NO: 5220 - protein, 447 aa, unidentified
  source 1..447: note = Related to JACMJE010000135.1; note = Phycisphaerae bacterium
MPHQSLTIALARALTGGSQDEPSIALRLAVTLGRPPARWIARFAHRYVRAFSGNTRPREIEVAQFIVADRSWSARLAPTPTRPRQLVARWPLETPGMVPVPAAADWPVKRIESVGDLAEWLGIDSSMLDWFVDAKNIAHKQPHTKLHHYHYRVLQKRSGGIRIIEAPQERLKIIQRKILKDILEQVPQYYSAAHGFVKGRSVRTFAAPHVQQQAILRIDLQDFFPTIGRARVQALFRTLGYPETVADALGALCTNTTPRRFFAMTPRTAGDVALQVKARHLYGRPHVPQGAPTSPLIANLCAYRLDCRLTGLADWAGAVYTRYADDVAISGSGNFARNVERYAAEVSGIALREGWSVQHHKTRIMRRGVRQHLAGIVVNERLNVSRTDTDRLKAILTNCVRHGPTSQNREHHPDFQSHLRGRVGWVTFVNPLKGQRLATLFEQINWE

SEQ ID NO: 5221 - protein, 396 aa, unidentified
  source 1..396: note = Related to JAEUQC010000130.1; note = Bryobacterales bacterium
MHTLARAFLAGELNAQSAAARAAALFATPPRWLPALAARFVAAFAGKTRPRFLHAVAFLQAQPPRAAKLINWLTEPAVMQPVEAAKGWALPSLTSTGELATWLGLSIPELEWLADLRGTARPGHYHYQPVAKQSGAARLLEAPKPRLKAAQRQILRQILDLVPGHAAVHGFRRHRSIRTFAAPHAARPVVLRMDLRDFFPSISRTRVDAVFRTLGYPGPVAALLAGLCTTAAPTGGPLYRQPHLPQGAPTSPALANICFHRSDCRLAGLAAATGLQYTRYADDLAFSGEFISENLQARIGAIVLEEGFTLQYRKTRLMRQSVRQHLAGLTVNAGCNVRRVDFDRLKATLHRCVQLGPRDETRDALTGHVAFVESVNAARGRKLRALLERIQWTSHG

SEQ ID NO: 5222 - protein, 448 aa, Acidipila dinghuensis
  source 1..448: note = Related to NZ_SDMK01000004.1
MERPLQPLSHSSNEFLSLAHALLSAEQAVEPHLQILRTAFRAEPPPGRLRPLAVRTVGWASTRPRPRIRRFIEQLRAEPRLVRLIERHGLRQLPLVSVPLRMLPIPGTAPVVLETAGSLAAWLEVEAGQLLWFADLRDWNRKAGGDRLKHYTCRVLAKPYGAIRLLEVPGPRLKSMQRRILREILAPVPPHPAAHGFRRGRSIVSFAAPHAGREVVLRMDLRDFFPSISGPRVQALFRTLGYPEPVADLLGGLCTATTPRGVWRNTGCELSAADLQDARIFYARPHLPQGAPTSPAIANLCALRLDRRIGGLAEKAGVTYTRYADDLAFSGDALFARGAERFALRVAAIAAEEGFAVHPRKTRLMRRGVRQHLAGLTVNAQPQLPRRELERLEAILTNCVRHGPEGQNRDGHADFRRHLEGKVAFATMVNPARAGHLRELLERIAWGD

SEQ ID NO: 5223 - protein, 598 aa, unidentified
  source 1..598: note = Related to VANK01000001.1; note = Acidobacteria bacterium AB60
MGYHEPTPAISVPARPRVPHVSRVGDMGYHEPTPAISVPARPREPHISRLLETWDTTNLTRPSALSHERRCDLALASRPLAAQRPAAILLMRRSAPSWQGKKPSGLALTSLGLPQGNVAIRALVAGASLRSHADQLPPGQTRWSTPLAPRLSKSVLIRALATAFLHGEPTTEELIQRAAHTLGRNWRWLRPVARRFVERFAGKVRPTRRSVLAFLREDENVNRTWHSRRHQLTVASWVVEPDGPAAMQPMAAAADWPIPAIATVGDLARWLGLTMGDLEWFSDPRRLTAKTRTPTLQHYHYRVFPKSSGGFRLIEAPKFRLKKVQRQILHEILDRVPTHAAVHGFVPGRSIKTFASLHAGKQVVLRIDLREFFPSIGRPRVQALFRTMGYPDSVAGLLSGLCTNATPRRVWREGTAQPSRSVDPAASFEAAQFYARPHLPQGAPASPALANLCAFRLDSRLQGLANAAGATYARYADDLAFSGDAAFARSAERFAARVAAIAEEEGWTVNHRKTRIMRQGVRQHLVGLVTNTHANVRRADFDRLKAILTNCGLHDPATQNRENHPAFRAHLEGRVSFVESINPGKGRRLRALFDRIVW

SEQ ID NO: 5224 - protein, 483 aa, Posidoniimonas corsicana
  source 1..483: note = Related to NZ_SIHJ01000001.1
MRAYASYLTPDQTRWWGSAAAPTMLPSRTQVTPPVECTRNNLARALASAMAAGPVETDALMERASRLLGDQEQHKRLSWLRPLTRRVEAEFGAGPRPRAAALAEYLLCDEGFERAFQKHAPWPVGLVSAAPAMAPIPDAADWRVAPLTTVGQAASWLGLSVGELRWFADCRAWERRRPAGPLRHYQYRGLTKRFGQTRLIEAPKPRLKALQRQVLERVLDRVPPHDAAHGFRRGRSVGTFAAPHAGQRVVLKIDLQDFFPSIAGARVAALFRSVGYPEPVADVLTGLCTNSAPPDVWAEGPTSRAAAQQRRLYSAPHLPQGAPTSPALANLIAYRLDCRLAALAKSAGGVYTRYADDLAFSGGQEFLRSVHRFRTHACATAMEQGFSVNHHKTRVMPSSQQQRIAGLVVNERPAVSRVERGRLKAILSNCIRHGPESQNRDGHADFRACLQGRVAWVEMACPPQGAKLRSLLDLVDWTATRKR

SEQ ID NO: 5225 - protein, 440 aa, Posidoniimonas polymericola
  source 1..440: note = Related to NZ_SJPO01000016.1
METDIQSVARALAAAFAAGPLTADRLVGCGERTLGRRYRWLRPLAWRVEAEFAYGPRPRADHIADFLLLDERFRVYAARHDAAAVSRVHDPVEFCPFPAAQAWPVARLRTPGQLAGWLDTPPQQLAWLADVRGWERRRRRGPLRHYHYRALAKRFGATRLIEAPKPRLKAVQRRLLAEILHHVPPHDAAHGFRPGRSIRTFAAPHSGQRVVLKLDLEDFFPSTPAAQVNALFRSLGYPEAVADLLTGLCTNTAPAAVFSPDSARDWRAALQRARYAQPHLPQGAPTSPALANLCAYRLDCRLAGLAAAAGGVYTRYADDLAFSGGAEFARSVHRFRTHAAAIALEEGYRVNHHKTRVMPTAQQQRIAGLVVNAQPAVSRAERDRLKAVLTNCVRHGPASQNHTGHTDFRAHLGGRIAFVEMACARQAAKLRRVFEQIEWG

SEQ ID NO: 5226 - protein, 445 aa, Pirellulimonas nuda
  source 1..445: note = Related to CP036291.1
MRPGHSTAVALATAFVAGPLEVDPLVDRGAHVLGGRPRWLRPLARRVAARFGDQTRPRVTAVARFLLADRALLRAALTCQIQPGAGLGLTPEMAPLGPAARWRTPSLCNTRELAGWLGLPVGELEWFADLRSLESRQREGPLRHYHYRPLTKRFGQTRLIEAPKPRLKAIQRVILAELLDHVPPHPSAHGFCRGGSVRTFAAPHAGRPVVLKIDLEDFFPSIAAARVRALLRAIGYPERVADLLAGLCTNAVPPDVWKEAGAPATGHADRQLRRYAQPHLPQGAPTSPALANLCAYRLDCRLAGLAEAAGGVYTRYADDLAFSGGDAFARCVGRFQTHVCATAMEEGFAVNHYKTRVMRRGQRQQIAGLVVNHRPGVARDQRDRLRATLTNCVRHGPASQNREAHADFRAHLNGRVAFVEMVSPEQGQRLRRLFEEIRWEAGCGV

SEQ ID NO: 5227 - protein, 440 aa, Pirellula sp.
  source 1..440: note = Related to PNKX01000009.1
MPTPRITADALAAAFLAGEIEKDQLIARASRMLGRRPRWLAPLAKRVATAYGTRTKPRRAALATFLLGDPGFRAALAKGPLRIVDWTTDEPAMRPTTPAAAWVLPLIGNISELAAWLGVSLHELAWFADMRSWEAKRSSGALRHYHYRIESKRFGQVRLIEAPKSRLKTIQRRILAELLEPIPLHEATHGFRRGRSIKSFAVPHVGQAAVLKIDLQDFFPSIAAARVQALFRTVGYPEPVADALAGLCCNATPADVWNRSEADGDAAQRRQTRWLYEKPHLPQGAPTSPAIANLCAYRLDCRLSALAASARAAYTRYADDLAFSGGADFARSAGRFETQVCATVMEEGWAVRHRKTRLMRQGVRQSLAGINVNKRLNLCRRDVDQLKATLTNCVRMGATSQNHADHADFRSHLEGRVSFVEFINPERGAKLRRLFERIEW

SEQ ID NO: 5228 - protein, 440 aa, unidentified
  source 1..440: note = Related to RECD01000177.1; note = Planctomycetaceae bacterium
MASETIVRLLAAACLAGNLEVDEVVDRWGRAMGKRWRWLRPLARRVLAEFAGDARARESAVARFIASDRGFRRAALTHDLRVAEVLHASGPGMSPVRAAEVWQLPPLRTAGELAQWLGIDTRQLDWFADRRSFGSKRHQGPLRHYHYRTVAKRFGQVRLIESPKPRLKQIQRRILAGILDLIPTHPAVHGFRRGRSIMTFAQPHVGQRIVVRIDLQDFFPTVGRAWVQALFRTVGYPEVVADVLAGVCTHATPADAWESVDSEHFGRQPDRIHRLYSRPHLPQGAPTSPALANLCAYRLDCRLAGLARSAGASYTRYADDLAFSGQADFVRVAPRFCLHVGATAMEEGFSVHHRKTRRMRQGVRQHLAGLVVNERLNVRRKDFDLLKATLTNCIRSGPQSQNRGNQSNFRAHLAGRLSFVELVNPEKGRRLRELFDRIPW

SEQ ID NO: 5229 - protein, 440 aa, unidentified
  source 1..440: note = Related to JAGQPE010001238.1; note = Planctomycetales bacterium
MSDITVAQALTTAFLTGEPDLDQIVDRWSVTLGRRWRWLRPLAVRLLANLDEADQRREVAVAWFLFLDRGFQRACDSHDLDVAQWIHITRPPMRPIAAARDWQVPSICTPGELADWLDVEPNRLEWYADLRSLESYWPQNKLRHYHYRLLEKRFGQVRVIESPKPRLKQIQRQILTGILDHIPPHPAAHGFRRGCSISSFARPHVGKRIVVRIDLQDFFPSISHLRIRALFLSLGYPQQVAKRLAGLCTNVVPLDTWLGDCGNRSTFGPSGVQRLYSTPHLPQGAPTSPALANLCAFRLDCRLAALANSAGATYTRYADDLAFSGERDFERVAHRFHLHVCAAVMEEGFRVHHHKTRRMRRGVRQHLAGLVVNERLNVCRQDFDRLKAILTNCIRHGPQSQNRMAHPDFRGHLAGRIGFFESVNAAKARRLRALFDQIAW

SEQ ID NO: 5230 - protein, 440 aa, unidentified
  source 1..440: note = Related to NYXM01000103.1; note = Planctomycetaceae bacterium
MDSYATIADALATAFLAGDIETDELVDRGSLLFNRRWRWIRPLARRVVETFAAGVRPRQTSVVEFILADRGFFRACQKHDLRLANRLVAPPMMRPVIAAASWRVASIRTPRELADWLGVSFGELSWFADLRGLEHKRNHGRLRHYHYRPLAKRFGQVRLIESPKPRLRQIQRRVLTDILDHIPLHDAVHGFRRGRSIKTFAAPHVGRRVVLKIDLQDFFPSISAARIQAIFRTIGYPEEVADLLAGLCMNSAPTDEWDHEFSGSSGRQVRQFRWLYSQPHLPQGAPTSPALANLSAYHLDCRLTGLSRSAAATYTRYADDLAFSGARDFERVAMRFHNHVCATVMEERFTVHHRKTRIMRQGVRQRLAGLVVNERVNVPRVDFDRLKATLTNCIRQGPQSQNRQGHLDYRGHLQGRISFVEMVNPSKGHRLRALFDQIDW

SEQ ID NO: 5231 - protein, 444 aa, unidentified
  source 1..444: note = Related to JAAYAY010000047.1; note = Planctomycetaceae bacterium
MNFCNVTARALSAAFLAGDFDVDGLVVRGSRVLGKRRRWLRPLARRAVETFAGRPRPRRVTLAEFILGDPGFLQASRRHGLRPATLPTAPSIMCPVGAAESWQIPSIRSAGELADWLGVTIGELEWFADRRSLEYKWNHGRLRHYHYRPLTKRSGQVRMVEAPKPRLKAIQRRILAGILDHIPLHDAAHGFRRGRSINTFASPHAGKRVVLKIDLHDFFPSIRLARIQALFRTIGYPEEVADLLAGLCTNATPPDVWEADTIRLAGGQLQEACWLYSQPHLPQGAPTSPALANLCAYRLDCRLHGLAQSAHAVYTRYADDLAFSGDRDFERAAKRFHLHVCATVMEEGFSVHHRKTRIMRQGVRQRLTGLVVNERLNVSRRQFDCLKATLTNCIRFGPQSQNRSGHGEYRAHLDGRISFVETINPARGHRLRELFDRIEWPERD

SEQ ID NO: 5232 - protein, 440 aa, Bythopirellula polymerisocia
  source 1..440: note = Related to SJPS01000003.1
MSTRNHTANALARIFLAGKFESDEMVERASHLLAKRWRWLRPLARRVVAAYDGKPLPRSIALTKFILSDLGFSRALEKHEVHVVHPLINVPTMNPIAVANTWRLPSICTIKELADLLSITVSELNWFADLKLFEYKRNRGALRHYRYRPVTKRFGRIRLIEAPKPRLKVIQTLILSTILNNVPPHTAAHGFRRGRSIKTFAEPHTDKMAVLKIDLSDFFPSISIARVQSLFRALGYPELVADTLAGLCSNATPLDVWDSPKVDSPAKNIRQVRWLYANPHLPQGAPTSPTLANLCAYRLDCRLSALAESVGAVYTRYADDLAFSGDDSFARVAKRFQIHVCATAMEEGFRVHHRKTRIMRRGVRQRIAGLVVNKHLNLARNDIDRLKAILTNCIRFGAHTQNRSEQDDFRAHLYGRVAFVESINPRKGSKLRQLLEQVEW

SEQ ID NO: 5233 - protein, 459 aa, Aeoliella mucimassa
  source 1..459: note = Related to CP036278.1
MSLRARLESLGYSAACLIAMSSPKRIAEPLAAAFLAGPLEVEGMVARGSQLLGKRWRWLSPLAKRMHRYFGGTTRPRQARLINVMLCDEGFYRACTKYELQLVDLQACQPAMAPSLAALSWNVPALCTTKQLADWLGLAVSELEWFADMRRWETKPASMQTQHYRYRVLSKRNGRLRLIEAPKSRLNMLQRQILTHLLDRFPVHSAVHGFRQGRSIRTFAVPHIHRPVVLKLDLRDFFPTIRIAQLSALFRTAGYPERVADLLAGICTNTTPTEVWDDEGLAASPSEIRRMRMLYEQPHLPQGAPTSPTLANLCAYRLDCRLAGLAEASGGVYTRYADDLAFSGDERFARTAERFAIHVMATVMEEGFEVHPRKTRLMRPGVCQRLTGLVVNQHLNIARSDRDRLKAILTNCVRHGPATQNHEGHRDFRCHLRGRVAFVESINPTWGKKLRGLFDQIVW

SEQ ID NO: 5234 - protein, 437 aa, unidentified
  source 1..437: note = Related to JAGQOY010000114.1; note = Planctomycetales bacterium
MCSYVSIARNLAASFVAGQFESDAIVERGAQLLGRRWRWLRPLAIRVIEKFSKGPRPSHASVVQFILRDHGFIRAYEKHNLQLIDLIGEATEMSPIKKAQPWTVPIINNIAELADWLGITMGHLEWFADLNSLEYKCNRGRLRHYHYRPLAKRFGSVRLIEAPKARLKEIQRKILSGLLDQIPAHEAAHGFQRKRSVKTFAACHVGKSVVLRMDLHDFFPSITLSRVRAVFRSTGYHESVSDLLAGLCTNCAPLDVWENLVPSGPGRQSIMLYSQPHLPQGAPTSPALANLIAYRLDCRLSALAHSAGAVYTRYADDCAFSGGPEFFRIVKRFACHVGAVVMDEGFSVNFRKTRIMREGVRQKLAGLVVNEKTNFPRADYDRLKATLVNSIKHGPESQNRTQHRDFRAHLLGRISFIEMLNPNRGRKLRQLFQGIAW

SEQ ID NO: 5235 - protein, 377 aa, unidentified
  source 1..377: note = Related to JAGQOX010000111.1; note = Planctomycetales bacterium
MARFILSDRGFLRAYERHNLQLVELLTTAPVMLPLPTAEGWEVPQLPEVNDLADWLGVSLATLHWLADTRCLESKWNRGKLRNYYYRPLAKKQGTIRLIEVPKPRLKGCQRQILTGILDHIPPHDAAHGFCRGRSIKSFADKHVGKQVVLRLDLQDFFPSVHGGRVQAVFRSLGFPASVADLLAGICTNSTPRDIWESLQFPQPQLRLTQWQYDNVHLPQGAPTSPALANLCAYRLDCRLSALARTVGADYTRYADDLAFSGGQDFSRAVRRFHVHASAIAMDEGFHVHFRKTRIMRRSARQRLAGLVVNQHANISRAEYDRLKATLHNCVRSGPSDQNRTGHTDFRAYLNGRISFIEMVNPARGAHLRRLFDRIPW

SEQ ID NO: 5236 - protein, 454 aa, unidentified
  source 1..454: note = Related to JAGQPK010000195.1; note = Planctomycetales bacterium
MTHARPDSLGVLDRFPMTHSDQTIARFLAAAFVAGPLVADEMATRGARMLGRRWRWLTRLALRVSEEFQHGPRPRRATVEEFLLGDSVFHKACERHELEIANYSITAQMCPVDAARNWPVPPLCTFADTADWLNVRSRELEWFADLRGLAARASHQKLRHYHYRTLSKRFGQVRLIEAPKLRLKEIQRQILREILDAIPAHNAAHGFCAGRSIKTFAAGHVATSVVLRMDLRDFFPSISRAQVEAVFRSVGYAESVANVLAGLCTNCAPDDIWDGVEVPVQQLRSVIARYARPHLPQGAPTSPALANLCAYRIDCRLAGLAESAGATYTRYADDLAFSGGDEFRRSAKRFSQHASAIVMDEGFDVNHRKTRIMQSGARQRLAGIVVNAHTNVPRKDYDRLKAILVNCLRSGPQSQNRDQHADFRAHLNGRVAYVELINPPRGKKLRELFRRIDW

SEQ ID NO: 5237 - protein, 440 aa, unidentified
  source 1..440: note = Related to JAGQQK010000642.1; note = Planctomycetaceae bacterium
MNEAAIAKALATAFLADTMTITAMEARGSHVLGQSCDWIRPLAARIMAAFPGGVRPRRQRVVEIIRQSRAFLLACEEHDFHALNPTLLPTKMHPAQSIRTWNVPSITSTDALARWLGISPAQLDWFSGRFRRSASVRIGSLGHYRYRLLQKSSGQVRLIEIPKWRLAELQRQILTRILNHIPPHAAAHGFRQQHSIHTFVAPHTGQAMVARIDLQDFFPSITLPRVAAVFRTVGYPEAVADALAGLCCHQVPDHVWHSEAGNLGTSSRNQLRLLYRQPHLPQGTPTSPAIANLCAYRLDCRLTGLAQSARATYTRYADDLAFSGDDEFRRSAKSFVLHACACVMEEGFTVHFRKTRIMPAAARQRLAGLVVNGKTNVPREDFDRLKAILTNCIRSGPDSQNREQHVNFQAVLSGRISFVEHINPSRGRKLRTLFEQIVWA

SEQ ID NO: 5238 - protein, 459 aa, unidentified
  source 1..459: note = Related to DNWZ01000023.1; note = Planctomycetaceae bacterium
MQSNRVLIRTIAITLLRGDWQVEAMAIRTAKLLGKRYRWISPLIKRLDQQFGSSRRPKQSELIDFLRLDRGLCRALEKHEPEIFDWLQEADVMQPIPSAEAWQIPSITTEGELAEFLGAATSDLIWLADEKSLHSKNTKKYSGHYHHHLVNKKNSVLHFCNPHDLDAIANRLRIPSESIRLIEAPKRRLKSIQRNVLNGILDRVPPHRSCCGFRQGESIVDYSRPHVGKSIVLKMDLRNFYPTITLNRIISIYTSLGFPETVSRLLAHLSTTVTPPEIWRNHKGASQLRYLESLYTCRHLPQGAPSSPALANLVAFRLDCRLEGLAKHVGADYTRYADDLAFSGGDEFRRIAKRFSTSVSAIVMEEGFGVNFRKTRIMPAASRQRLVGLVVNHGLNVQRQEYDRLKAILTNCIRHGPESQNRDNHPSFRRYLEGKIAFVSMINIEKGNKLLGLFRAISW

SEQ ID NO: 5239 - protein, 376 aa, unidentified
  source 1..376: note = Related to JAGQPD010000106.1; note = Planctomycetales bacterium
MANQSGPQDRDRVKPRVVSWRPRGTEMRPVSAASQWHVPEIRTPRELAAWLNVSFKQLDWLADIRSLEYTPGRGRSRHYCYRVLSKRFGAVRLIEAPKSRLKAIQRQISSEILSQIPVHESVHGFRRGKSINTFAAPHVGRACVTKIDLEDFFPTVTRSWVRGIFQSAGYPDAVSVLLAGLCTNSAPHDVWQDMREQLPRQRLRYIEALYATPHLPQGAPSSPTLANLAAFRLDCRLSGLARKMELTYTRYADDLAFSSDSPATRDIHRRLPYIYAIVMEEGFRIHFRKTRVMPSAGRQFLTGLVVNDRLNITRTDYDVLKAILTNCVRHGPDGQNRDRRNDFRAHLSGRIAFVESVHPERGNKLRQLFERIQWPT

SEQ ID NO: 5240 - protein, 443 aa, Bremerella volcania
  source 1..443: note = Related to CP036289.1
MHTIQFYAINLAGVFVDGPFDVDALVERGSQILSKRGRWLRPLAKRLAKTFGDRIRPRKSDVVSFLLADQGFRNAYQNGRFKFSSLLRPAPEMVAPAVTTTWQAPLNLRTPQDLSHWLDLKPGELAWFSDRRQLEAKQNKPKLQHYRYRLLPKRPGEFRLIEAPKPRLKTIQRRILKDILNHLPPHDASHGFRCGRSISSFARPHIGREVVLKMDLQDFFPSIRAAQVQAIFRSLGYPDCVADLLTGLCTNSAPTEIWNALDHAPPAKIQYKIRRYARPHLPQGAPTSPVLANLCAFRMDSRLAGLARKMNASFTRYADDLAFSGDCEFARICRRFSVHVAAIAMEEGYTVHYRKTKIMRKGVRQRIAGIVVNKRPNILRKDYDRLKAILSNCVRTGPASQNREGHDDFQSHLAGRVSFVEMIHPDRGRKLRAILEQIDWTVS

SEQ ID NO: 5241 - protein, 442 aa, Blastopirellula cremea
  source 1..442: note = Related to QPEW01000030.1
MHSVTHSANILATAFAAGRFDPEELVQRGSQVVASRGRWLRPLAVRLAEAFAGKIHPRKSTIVAFLVADAGFCRAYHNDRVQIANLLGPIPEMIPTATAANWQGCLALPTPHDVSRWLNLAPGELDWFADRRRMAHAQSNPKLQHYRYRLLQKRPGEYRLIEAPKPRLKAIQRRILSDILNHVPPHEAAHGFRRGRSITSFAAPHVGKQVVLKMDLQDFFPSTRAAQIQSIFRFLGYPDTVADLLTGLCTTSAPQDIWPTAAPRPAQPTQRQMRRYAEPHLPQGAPTSPVLANLCAYRMDLRFSGLASTVNASYTRYADDMAFSGNQDFARVCQRFSTQAAAIAIDEGYTVHFRKTRIMKQGACQRVAGMVINRRLNISRKDYDRLKAVLTNCARHGPDSQNHDAHNDFRSHLEGRVSFVEQINPERGRRLRALLERIDWSK

SEQ ID NO: 5242 - protein, 465 aa, Blastopirellula cremea
  source 1..465: note = Related to NZ_QPEV01000005.1
MIPHAERDSLVIPPSTFFLMRTSKKTLAAALATAFVAGSFEVDDLVERGYGVIGKKPRWMQPLAERLHAAFPWDMRPRRASVERFLLFDYGFHRAYRRSKLTVASRIGSSPVMNQGVVASGWKAIRPLTTPAELADWLDVPLRQLDWFAGVGPYKRVPTEMKLQHYRYRVLKKVDGNVRLLEAPKARLKRMQQKILTEILNHVPPHATCHGFRRGRSITTFAKPHQGQAVVVKLDLRDFFPSIRAAQIHALFLYLGYPEPVAHLLTGLCTTSAPETVWREIGASPRNNLTQEQIRRYARPHLPQGAPTSPALANLCAYRLDYRLSGLALAAGATYTRYADDLAFSGDAVFRRAAQRFVVHATAIVLEEGYQVHHRKTRVMRQSVRQKIAGLVVNQQANVPRKDFDRLKATLTNCVRHGPESQNRADHANFRLHLRGRIAFVESINQKRGEQLRSIFAQITWPQSA

SEQ ID NO: 5243 - protein, 437 aa, Bremerella volcania
  source 1..437: note = Related to NZ_CP083740.1
MHSRKLLAATLASAFVGGPVETDALVEHVRVLLLDKRKQRWLKPLVKRFVQASSVGPRPRQPQVEAFLLADYGFLKAYHKNHIRLSGALAPSPVMSSTIESITSSDRISLITPAELARWLDLPIRELDWFADRRGWEAKHANAKLQHYRYLTFAKPSGETRLVEAPKSRLKGIQRRINTDILNHVRPHEAAHGFRAGHSVRSFAEPHVGKRVVLKLDLRNFFPSIRAAQIHAIFRSIGYPDAVASLLTGLCTNTTPSEIWEERLPLALDFPMYERPHLPQGAPTSPALANLAAYRLDARLGGLAKSAGANYTRYADDLAFSGNTPFERVVRRFADHVAATVMEEGFFVHHRKTRIMPQGVRQRIAGVIVNEHLNVDRRTYDRLKAVLTNCIRLGPDSQNVDAHEHYRHHLEGQVSWVESINPQRGQRLRELSNRIMW

SEQ ID NO: 5244 - protein, 446 aa, unidentified
  source 1..446: note = Related to JADLDX010000443.1; note = Pirellulaceae bacterium
MLNDPESPTKRWQMLADILLHCRWTSADHLALGMGAIKRQPNAVRNMIAAIHQAFPWVPSRTQLVTFLASRSDLLKGLRWKRLPDIQCQRRLYPTTMQPTRFAQQTWEPPPLPTLGSVADDLLRLPASLVEWLSNPRVQHYVVSVIAKRGSAGSAGTGAATGRILEQPKRLLKAAQRDILREILRDVPAHPAAHGFVPHRSVVTFAKPHTGRPVVVRMDLANFFTSIPAARVNAVFRSLGYPLPVAHQLTNLCTTACKLDAVEGLADYSAAERVRLENLYGRPHLPQGAPTSPALANLVAYRLDARLSGLARRVGCEYTRYADDLLFSGDRRLLRQAQSLVVQVSAIALDEGFQVQHRKTRIMTQAVLQAAAGVVLNQHTNIDRRDYDNLKATLTNCVRHGPATQNHLQHPNYREHLLGRIGWVHHLNPTRGSKLMRIFERIQWPN

SEQ ID NO: 5245 - protein, 444 aa, unidentified
  source 1..444: note = Related to JAGQOV010001318.1; note = Planctomycetales bacterium
MQTPHTVAETLAEAFLQGEFATESLVQRGAQALQGTPPRWLRRLASRAVQTYGLGPRPALPALSRFIAHDAAFQSAMRGRRPVVARAWLCVPEMFPIAAARSWEVPPLCTLGSLAEWLDVPVGRLDALSDVKSLERLHPRESLRNYRYRVLSKGGGRVRLIEAPKPLLRAIQRQILAEILRAAPVHDSAHGFCHGRSTKTFATPHVDQSVVISLDLKEFFPSISAARVDALFRSLGYPARVAAALTALCVNCTPSWVWKKLSGDALTRRRIELERLYGFAHLPQGAPTSPALANLCAYRLDCRLAGLAAVCGGNYTRYADDLAFSGGERLRRSAARFQVHASAIVMEEGFKVNHRKTRIMSQGACQKLAGVVVNRTTSLPRRDVDQLKAILTNCVRFGPTSQNREGHADYRGHLRGRVAYVQFLHPGRGAKLRAIFEQIDWNAS

SEQ ID NO: 5246 - protein, 463 aa, unidentified
  source 1..463: note = Related to JAGQPV010000013.1; note = Planctomycetaceae bacterium
MPDDLAAARRLALAFLTAEWNPQSMAEHGRRVLGLKGSPKWILRLAEQVCRQYPAAPPPTQLELSRLLATSGRLRQAIRRREQSNQPLDSGTLLLPPMPMRPVVGLPAGWELPNLTSAGQLAAWLDITPDELDWFADVRRLQRDRPPGPARHYQYRWIPKAGGRQRLLESPKPRLKQVQRSLLHGLLDRIPPHPAACAFRRGHSLASFLAPHAGRRILLHVDLRHFFPSISSARVHALFRTVGYPEAMARSLTGLCTTSTPRQELDRPQDREAEAALHRLYGSPHLPQGAPTSPALANLCARRLDVRLNGLARRTGADYTRYADDLLFSGGHELERMLSRFRVWVCAIAIDEGFTIRHRKTRELPRSGRQQVAGVVLNEKLNQPRAEYDRLRATLHNCIRHGAASQNRNGHPRFREHLGGRIAWVNMLNPNRGARLKQLFQQIDWPEESTGSPPADSQPAKPD

SEQ ID NO: 5247 - protein, 461 aa, Symmachiella dynata
  source 1..461: note = Related to NZ_CP036276.1
MTDVRAVARGLATVFLSGEWTRAGITQRVQTALEQRVKSRAVDLLVGRILRACGEQPPPPTLHKLTKLILSDPVFHKYIAEEDGYPRRLNLAHLPPPVMAPAPAIPSDWQLPTILTPGALADWLGLSSPELEWFADCHGRERQRAREALRHYRYRWIPKRTGGRRLLEIPKQRLKDLQRTILQWILGRIEPHAAAHAFRRGRSIASFAQPHSAKRVVLRIDLRHFFPSVQPSRIKSLFRTVGYPEAVARLLCGLCTNSVPDDILGVAEQQFATNERQPVERLYAAAHLPQGAPTSPALANLAARRLDGRLSGLATAVGGDYTRYADDLVFSGGRALERCLPRFRTLLLAIVLDEGFSIRHRKTAVMPAGGRQQVAGIVVNEHPNLNRKEFDRLKAILYNCAHHGPRSQLTGCLPQPNEPPTEATLEQLRSHLTGKVAFVRMINPAKGERLSKLLREIDWVG

SEQ ID NO: 5248 - protein, 448 aa, Schlesneria paludicola
  source 1..448: note = Related to NZ_JH636435.1
MDDSFRQFTANLAETLARGTWSLDELLKRADQSLTETSSRAWIIRLTERTMVAFPGRQSPQHCLLMQFLAHDRGLRRVWNNCERDERPFPEIDLTKLVPPVMQPASEVIAAWPVRPLVTIQDVSQWLGLTLGELDWFADRTRRKSRVPEGPLRHYRYRWIAKSSGGQRLLEIPKPRLKELQRKILAEILDAIPPHPAAHAFRRGRSVRGYVTPHVGQQVVLHIDLREFFPSIRASQIHALYRTVGYPERVAAMLTGLCTHITPRDAIPLNGEQQASNSNWKRLGSPHLPQGAPTSPALANLVAFRLDCRLAGLSQKVEAVYTRYADDLLFSGGKELARCASRFRLLVTAIAHHEGFEIRARKSRTMHSGTRQQVAGIVLNRQPNIPREEYDALRATLYNCQRHGPTTQNVNQHPHFRDHLLGKINYWSNICPERSRKLRLLFDQIVWP

SEQ ID NO: 5249 - protein, 442 aa, unidentified
  source 1..442: note = Related to CP036268.1; note = Planctomycetes bacterium Pan189
MHDFEDEFPTPDAESVARVFLAGAFSPESCTARLTVVFGRVHHRRIERLVRLVFAVFPPHSAVPTLRRLTLFLLRFESYFPDQFRISPPRDLTGHRTIPAEAITGSLPILNNIRELAEFLDLTPERMLWLADPHGFETKRPRERQRHYRYRWVERTGRTPRPLEIPKQRLKAIQKKILAEILNKLRPHPAACAFRKGQSVRDFAKPHVGRRVVIRFDIANFFPSILQPRVQATFRAVGYVEEVAFLLSALTTNRLPTDQLHAEATGSGARHLRQHLLSAHLPQGAPTSPALANLCAFHLDRRLTGLAARFSLSYTRYADDLLFSGNLSDAEIYRFRIRALAILIDEGFEARSSKSAVLRKGSRQQACGVILNTRLNIAREDYDALKATLHNCIRHGPELQNHEGVADFRSVLRGRIAWVHSLNVAKGEKLLAMFEQIHWNTS

SEQ ID NO: 5250 - protein, 425 aa, unidentified
  source 1..425: note = Related to JADZEF010000070.1; note = Planctomycetaceae bacterium
MSERIRMVMAARRQSRWHDQLAKRVHDEFAAVIPRPTRDRLAEFILFKGRIPRRVRAPEHRDGPLRNTSLLSLPAPAMIPADAIAARVALPAITTQGQLADWLSISPSELDWFADPAALLARWGVADRGTLRHYRTRLLPKPRGRWRLVESPKPRLKEIQRKILADLLDLVPVHPAAHAFVRGRSIVTGVTPHFGRDVVLSIDLREFFPSVHAGRIHAMFRTLGYPERVASLLTGLCTTRTPADRLAQGAFSTAQRQLYQSLHLPQGAPTSPALANLAAWRLDCRLEGLARRFGAAYTRYADDLIFSGDSTVHRALPRLRMWATAIVLDEGFAIQRRKTRVMPSGQRQTVGGLILNARANIPRREYEALKATIFNCLTYGPSSQNREQHPRFYEHLRGQIAWVAASSPPRAARLLEEFQRIDWSR

SEQ ID NO: 5251 - protein, 446 aa, Rhodopirellula sp.
  source 1..446: note = Related to JABMPE010000532.1
MPSEFIRKLSWVLLAGRWERGELENRGRLALRRATCPMWMVQLANRLIVTFGDNVTVPQRRQLELFLSWDAPLQKRIRTWDRNGSFPKLVVPPQRMAPAADRFIESRLPELTTTSSLAAWLSISPSELDWFADQRRWERRQVNEAARHYRYLWIPKSGGMCRLLESPKPRLKAMQREILDCILAKVPVHDAAHGFCRGRSVRTYLEPHVGRDIVFSVDLRQFFPSVRVSQINAIFRTVGYPEEVARMLTGLCTNSTPENVLHSKRVPDAGVENSRMLRRYRDVHLPQGTPTSPMLANLAAFRLDRRLTGLASKFGASYTRYADDLTFSGDSDFRCALERFKILVYAIVIDQGFEIRHRKTRVMTQGQRQLVTGLVLNNRLNVPRNSFDVLKATLHNCVRFGPSSQNREAIDNFSEHLAGRISWVDSVSPARGAKLKALFNEIDWSR

SEQ ID NO: 5252 - protein, 418 aa, unidentified
  source 1..418: note = Related to JAGQQF010000113.1; note = Planctomycetaceae bacterium
MPSRRPSPSYIALCLAVAWEHKTGRNDELLEDAVAVLGLTDRPRWLRHLCRHLAGRWGDPLRRPSRGKVVRLLLASESFIAAVGAVPLQDNLAPAPYWTTILPAWSWNLPEFPSTGALANWLSVSPADLDWLADVRGLNPRSPDPQLWHYHYSVRPKSDGRSRLISAPKLRLKQLQRQILGQILQRIPVHPAAHAYVSGRSMATCLAPHVGRDVVLHLDLDSFFPSIQASQVRAVWTYVGYGASVAAMLTGLCTENVPDSVLSRLNASRQAVDRFRERHLPQGAPTSPALSNLCAYRLDCRLSGLAGHFGAAYTRYADDLIFSGDAHFRRRLFDFRTTVGAILLDSGFNLQGRKTRVLPASRSQRVGGLVVNRRLNIPRREYDDMRAILHNCARFGAESQNRERHPHYREHLLGRIAY

SEQ ID NO: 5253 - protein, 451 aa, Planctomyces sp.
  source 1..451: note = Related to NZ_CP011270.1
MDEPEFRERVVLDALARTLLPLADDVSVAVRAARQLLGWKPERWFRTLVANVLAWPEMRAGQMTAGELAARLSGIPSLMEALDEGKGVVLDLSAIPRPRMRRSPVAGMGPIVRLETVGDCLDWLGLGLNELDWLTDPKGWLPAAGQSRLAHYHCQWIPKPAGGVRLIEAPKRRLKAIQRKIHEEILRHVPPHEAAHAYRPGRSMVTALTPHTGQETVWHLDLTSFFWSIGSGRVRRFFRRIGYPEGVAGVLTGLCTSRVAPGLLEPAPLSEREKQQLLARHLPQGAPTSPALSNLCAFRLDCRLSALSARYDVRYTRYADDLVFSCGPKLRRRLPGFRNTVLAILIDEGFQIRRRKTRVLRRGQRQQVGGLILNETLNVPRSEYDTLRAILHDCGRNGPVVANRDQHPSFREHLQGRVAWIAHVSPGRGRKLKEMFERIDWSGSEEPTGAG

SEQ ID NO: 5254 - protein, 438 aa, unidentified
  source 1..438: note = Related to JACKHO010000006.1; note = Planctomycetaceae bacterium
MTYRAFLRSLAFILDQGFWHEEAALEQVLDVLPTRQRQAKWPRRLIGRIFTTFSRYTRPSFGELSRFLQGDKELKADLRRLTAIPLIVWRPGDQTRPHPVLRVSGDLPILKSVRDFANFLRMPVNSLQALADVNSREARTLDARHRHYNYRWIQKRSGGQRLIEIPKERLKHAQSQLLECILRHVPVHEAARAYRRGLSLRDAVEQHVGQRILLRIDLQDFFPSIGVGKVRQVFRHLGYPSVVAMHMAGLCTNVVPQAVLETTSSNHRLSHVYQLPHLPQGAPTSAVLSNLASYRMDARLTGLAAYWSMQYTRYADDLLFSGDSLSAAQVSRLRTQILAVASDEGFRIRRYKTKVMRAGRQQSALGLTLNSQANTMRRDFDNLRALLNNAVRHGLESQNRDNHPKFLEHLAGRVAYHRSMNPKRGARLDRLLSRLTNE

SEQ ID NO: 5255 - protein, 435 aa, Caulifigura coniformis
  source 1..435: note = Related to NZ_CP036271.1
MNGEILRAARIAEALLAGPWDLKSLTGRLKTTFHAVARSRWPRQTAVELVAEFPAPPRAIRLAFWITRNRHLAPRQKDVPLADLPRPRMRPHPAAASLLVPALCTPGDIAAWLRLDPGQVDGLAGAGVPERRRHARARNYAYRWLKKSDGRVRLIESPKWRLMAVQRQILSDLLDHVPPHPAAHAFVRGRSLQTFLSPHVRRNWVLRLDLADFFATIAANRVVEVFRFLGYPEASAQWLTRLCVNAAPSDVLCDGIGHAADAHVQRLRSRLSGLHLPQGAPTSPALANLCLFRFDQRLARLAESRGLQYTRYCDDLVFSGDRETRSDVVDLRRTLFMILADERLSVRHAKTRIMPAGRRQNVCGLNLNHGLNTPRAAFDQLRAILHRCGTKGLTAEEQQDSSRFRQHLQGRIAWVSSINPHRQAKLVKLFEAIAW

SEQ ID NO: 5256 - protein, 456 aa, unidentified
  source 1..456: note = Related to JAGQQQ010000113.1; note = Planctomycetaceae bacterium
MGQQSRRLAEAIAQTVLNGPFAFDAIVSRLKRITPGPCLRGWKQRVARSVLDRFGEGGGVPSLFTLRQYLIDSGLLIDVEADDFPEDWIDETETTIIRPDRVPHAVFCPRIAAFQNLGLPEWTTTRELADWFGLTDGQLLWLSGGRRSDGKSAFERYRLKCQRSSSGKVRCLEVPRSMLKSIQRELNRDLLTRIPIHSCAHGFVPGRSIHSYVEPHVGQDVIWKTDLANFFPSITRSRIEAQFRLFGYPDAVARTLSGLMTVRQDRTKIEELSQQFPRDQFRDLASLLTQSHLPQGAPTSPALANLAAYRLDCRLSGLATKFHANYTRYADDLTYSGGQRFQRSLDTFRVHALAIIVDEGFRNRLRKTRVMMSSRRQTVAGLVINQTQNVPREEYKTLKAILFNCRLHGPASQNRDGIPDFQAHLRGRIEFVRSANPERGEKLMAMFEEIEFHAET

SEQ ID NO: 5257 - protein, 446 aa, Planctomicrobium piriforme
  source 1..446: note = Related to NZ_FOQD01000001.1
MNLFLDALATVVLSGPFDQKAICARIRKSLVVRSDAPLEVKLTTRWVTPLVKAFLSAVPARPRHRQVVSFLSTQQLSAQAEYFSIETSRCSPPLFLPLKPQFAEWGLPQWRTTGQLADFLGISPVRLDWLCGRYPVRDSQEIRQRYQIRWQRSRTGKLRMIEIPCPQLMRIQRQLLHDVLDRIPVHAAAHGFRAKHSTLTCVSPHVAQAVVWKLDLASFFLSIPRCRVTGLFRMLGYPEAVAEDLGWLTTNAVPSKVLQRMKAKIGTDQFQELERFAAAGHLPQGAPSSPALANLIAYRLDCRLNGLATAYGAHYSRYADDLLFSGDYRFKRYLAGFRIQVLAIILDEGFLIRRRKSKVMVHSRRQQALGIVINQHPNLPRQEYKLLHAILHNCVVQGPHSQNRDGHLDYHAHLAGRIANLRRLNPARAAKLQTMFEQINWQRFDS

SEQ ID NO: 5258 - protein, 423 aa, unidentified
  source 1..423: note = Related to JAFBGL010000010.1; note = Verrucomicrobiaceae bacterium 5K15
MSSDELATILLSGAFEQAAFEERLVMAVGAPKFSRKLAGRVIRHFGSGSRPSVRMLAEWLESDRRYQKKQRRGELQLSGQILPAEMAPDMRVAADWKIPSITTSGDLAHWLDLPVSQMEWFAGDYNSVPADTKLSHYTVQTVVKKSGGFRVLEKPKWQMKQVQRYILHGILDHLPPHPCSHGFQKNRSILSYVQPHIGRKMLIKMDLKDYFLSIERSRVRALFHLLGYPPLVSVQLAGCCTNRLRLADVPSGVAQRDRYTVSHLPQGAPTSPALADRLLYRLDLRLHGLAQKMHMDYTRYADDFAFSTNDSVRRPQVEAFLNLVDQIVREEGLQLHKTKTSVMHHSQRQRLAGLVLNEKHNVARGEYDRLRAILHRCGQNGLDAENKNDHPSFLQHLEGRVEFIRQTNPRRGKKLQGMLDKLV

SEQ ID NO: 5259 - protein, 445 aa, Fimbriiglobus ruber
  source 1..445: note = Related to NZ_NIDE01000017.1
MKIDPVFLDMARVLLAHPWDRAAVLACGHKLLGRKPKWWAAAVEKFVAWFPTRPPTAARLARLLAAHPRLAALRDKDKLPQPRADLLREALQYQVDHLRYPDLPKLATPAQLADWLNVPEPVLRWLADIKCLNARQAPAVQNYRYHWVARRRGGHRLIEAPKEILKRLQRQILDRILDLVPPHDVAHGFRAGRSILTHAAPHTGQIVVIKFDLKDYFPSVAGKRVGSLFRWLGYPDEVAWLLTCLCTTITPAAVEATAPAGADDVSLTFQTLYRRRHLPQGAPTSPAVANLCTFRLDRRLSGLAAKLGARYTRYADDLLFSGDAVFARKRRSFIACVYRVILEEGFQPAFRKTRVMARSTRQLATGLILNETLNVPRPDFDELKAILHNAMKHGLASQNRAGHPHFVDSLRGRIAFVSQANPRRGAKLKLKFEAVLENEKRPAST

SEQ ID NO: 5260 - protein, 429 aa, Roseibacillus persicicus
  source 1..429: note = Related to NZ_BMXI01000009.1
MTPTTLWLKNLSTLLLEEERQLDAWLALIRKVIPGKPRRNFLIITREVWKVAKTRTVLENRELQQIFRENRRFWNWQRKWYATRTPLPPALIVGPATPVLDTSAWHLPELATVGDLADFFALQPDDLGWLLSPKAQHYHEQWLPKRKGGRRLLESPKPLLKQVQRTLLRELLDKVPPHECATGFRAGHSIVDFAQPHANKSIALKMDLANFFPSLGRSRIKRLFMSLGYREGVALALAVLTTHRSASPDLTFTEKELYSRYHLPQGAPTSPALANLAAFRLDCRLAGLAKSAGASYTRYADDLLFSGTEELARGLHRFENRVIIITREEGLEINFRKTRRMAASQRQAAAGLVFNQKLNVPRREFDTLKAILHNCRKHGVSSQNHSHHPDFQAHLRGRIAWIASLHPVRGERLRAAFEELDWSKPNAQE

SEQ ID NO: 5261 - protein, 477 aa, Rhodopirellula sp.
  source 1..477: note = Related to NZ_ANOH01000392.1
MSDYPTAVGFELTQHSDRLASARLELSPRNERIVHRASLSPVFTMAPRPVVKRSVSAAELTKLLAASLSARWLGDTESVSRRLRKLTGSRAKWVQELAVSLNQQFGKQGYASGAEIIRHLRNNPYLQSARKNNKLFRLPVAEAISAPESDSPSIETDTQLVDFLGLPSLRALEWLLLPHLRRQTNVDHYTRRTLHQTNGKTRLIEEPRPVLKRVQRLILTEILSHVPIHDVAHAYRPERSVFTCAAPHTDCRVVLRMDIRDFFGTITLRRVAAQFRRCGYPRPIAFTLARLCTAATPITSESTEREQHLTIPHLPQGAPSSPTLANAVAFQLDRRLAGLTRAVDANYTRYADDLLFSGGQCLASRVDRIATTVAVIAMEEGFQIAHRKTRTMFSGHQQRVLGLTVNQKLNCDRRQYELLRAILTNCLRHGWESQNRDSHPNFAEHLRGRIAQIVQANPNRGQRLLHLYEQVSWNDPG

SEQ ID NO: 5262 - protein, 464 aa, Rhodopirellula rubra
  source 1..464: note = Related to NZ_JACHXU010000006.1
MAPPSVAKRTVTASQLADLIASELATRWLGDVDEVTRQISKLTGSRAKWVRTLATSVTQQFGKTGHATRIQLLRSLRNEPHLRNARKKKKSFNVPVLSTTQPTSSLFPTIETDDQLVDFLQLPSLTVLDWLLVPHFRRQTQVDHYTRRVLRRRDGTTRLIEEPRPLLKRIQRLIHSEVLVDVVIHDVAHAYRGERSIFTCAAPHVGHQAVLKMDLQNFFGTITLRRIAAQFRRCGFPRPIALTLGRLCTAPPVSVVSPQTGKGFVQVNLINSGSANSGGNLNAVRMPAHLPQGAPTSPTLANAIAFQLDRRLLGLANAVGANYTRYADDLFFSGDRGFASRIDRFATTVAVIAMEEGFTVAHRKTRKMFSGHRQQLLGLTANEKLNSHRQQYEQLKAILTNCVRHGWESQNRENHPNFADHLRGRIAQTLQCNPNRGQRLMRLFHEIAWNETQPSRPSPDKPDP

SEQ ID NO: 5263 - protein, 445 aa, unidentified
  source 1..445: note = Related to JAGQPR010000068.1; note = Planctomycetales bacterium
MAALSLVPLRMDEKAAVNRAAFIKVLAFELSRTWLGSRQRIRQVLRRMLGRMPAWCEELSSMVHEEFSAAAYANQLQLRRFLGRVAALRSVFRKGRNLRIRTTALGRATAYRWPVPQARNEAELQDLLCLRSTVALDWLIKPHVVRSTNVDHYRRKMICKHDGQIRLIEEPRPLMKRVQKTIHRHLLAAIPVHSAAHGFICGRSIFSAASPHCGKRLVLCMDLANFFGSIDRRRTSALFRLCGYPAPVAFLLGCICTAPESNSPDMPGGELVKVSRLPQGAPSSPSIANAVAFRFDQRLAGLAHSVGADYTRYADDLTFSGNEQFVNSASRLIPLVGAIAIEEGFAVNHRKTRRFYAGHRQTVLGLTVNVSPAAARQSYESLKALLTNCVRHGPESQNRDNVDNFRSHLRGRIAYVGAQHASRNKKLLELFGRIHWDQSTPRDLQ

SEQ ID NO: 5264 - protein, 426 aa, unidentified
  source 1..426: note = Related to SJPU01000001.1; note = Planctomycetes bacterium Poly21
MESSLTRSQLAMLISRDLSRRWLGNSSVIHRRLRRITGSRARWTDQLAEALHLQFGRAGHAQQVPLQVWLDGHPVMKAAFRNRQTLRVDVATANQINRPGYRWPVPAAANLLELTDLLCLRTPRAIDWLVRPHLRRSTSVDHYVRRRIPGRQGRGRWLHQPRPLLMRVQRCIAREILTEIPLHAAAHAYRRGLSVRDCAAPHVGHRVVLKIDLENFFGTISLRRVTALFRAAGYPDEVAVTLGRLCTVPARTPSGTEDCRIAGTCLPQGGPASPAISNAIAFQMDRRLAGLASSVGASYTRYADDLLFSGGPDLASRIDRVATTVCVIAMEEGFQVQHRKTRKMYSGDRQRLLGLNVNTQLSTDRSDFELLKAILTNCQRQGWRSQNRDQHPEFRLHLQGRIAHIGQTNPGRYQKLARLFDAIDWT

SEQ ID NO: 5265 - protein, 434 aa, unidentified
  source 1..434: note = Related to JADYZV010000153.1; note = Pirellulaceae bacterium
MAEKTLDPALVSRRQFCRQLAGCMSRCWLGNDAHVRERLEQVLDCQATWVAELAKSLSASFSEIGYANRFALESWLRKQPTIKLFFKGKKSRRLTDEVQRALASRNHRWPVPPLDSDDDLCRLLEIASLRELQWLVLPHVRRNTAVDHYKRTCLKKKLGGYRWIEEPRPKLKAVQRRMLESVLPGIPLHSAAHAYRTGCSVQSCAEPHVGQRVVLKLDLRDYFGTISIFRVKALFANAGYSWPIALRLAQLCTAPARMDDLRDEARSLTRTRLPQGAPTSPSIANAVAYRMDRRLAGLAASVGASYTRYADDLIFSGDDNFAARVDRFATSAAAIVIEEGFAIQFRKTRKLFHGAEQRILGVTVNEKLNLNRRAFEGLKAELHNCARRGWRTQNRTEHADYRAHLRGRIAYAQSLNPTRGAKLLQLFEQVKWNE

SEQ ID NO: 5266 - protein, 462 aa, unidentified
  source 1..462: note = Related to CP036526.1; note = Planctomycetes bacterium K23_9
MTARRETRIDIGRARLVRILIARLNHRWLETPAQVLRLTQGLFGSQHSLEKQLATQLSQAHRENRLSTQQPLSRWLLRNELLIRYFRKKQTISICKSIVDSIEKSEHAYRWRVPAVDDEVQLAKFLLLGSSQVLQWLTLPHRRRRTDVNHYRRRAIPKRDGTLRWIESPSPILKRTQRIIAADLLPHVPLHDAAMGFRRGHSIHDSAARHVGKASVLRLDLQDFFGSIHFGRVRSLFAYAGYSSKVASTLAMLCTAPSETAPLDTSPPCITPLSNSARTSTRSALPELPSRLPQGTPTSPAIANAIAFRMDRRLDGLATAAGANYTRYADDLVFSFDSPSVAFAKRFATSVAVIAMEEGFKMNFRKTRLMRRGNRQRVLGMTVNEKLNVSRQAYETLKAILHNCAKRGPRSQNRTEHPNFREHLRGRIAHVASIHTGRGNKLTAVFETIDWDDDAPDYRQPD

SEQ ID NO: 5267 - protein, 430 aa, unidentified
  source 1..430: note = Related to JABDKS010000522.1; note = Pirellulaceae bacterium
MSSHTVTIDVDLKRFAGLLHRRLQYRHLPAPASVRDAIQPLFGRDKKLCEDLVQQIVDAQRNPQPLRHPQMLTWLSKNPAVKKRFRHRKRIKIQQSLVIQIESDGVYRWPVPPIANEGQLADFLSLSTPRIIDWLTLPHRRRSTSVDHYTRVASTKRDGTIRWIEQPAPTLKRVQRLIAQQILSTIPLHDAASGFRAGHSVPDCARQHVRRSLIIRMDMRHFFGSIHVGRVRNLFLIAGYPPQVARTLAFLCTAPASIDPDADELLRRSRLPQGAPTSPAIANAVSFAMDRRISGLCKTLNVTYTRYADDLIFSCDHFGLSQAKRFATTVAVIAMEEGFQINFRKTAFMRHGNNQRVLGLTVNQKLNSARKEYETLRAILHNCRRDGPAGQNRHDHPKFRCHLRGRIAHIASVNPHRGAKLMEQFDQIYW

SEQ ID NO: 5268 - protein, 444 aa, unidentified
  source 1..444: note = Related to JAGQOZ010000019.1; note = Planctomycetales bacterium
MPPATYSLDQVAAAFAKAAVVGVWKRTAVLDQWRKLIEPLPNGLKSVAMQLIGQFAHVPSQQVVAEFLQSNRMFQQAYAKNLVMRRVGWCDHQIVDAALAPKSRHVRNWDLPELTSPTDLASLLDCPENLLWQLADHRRCYWLRQSHYRLRMSRKRSGGLRLIEAPKPKLKTVQRRIWKRIIRWIPAHQAAHGFQPRRSIRSNAALHTGQSVVIRMDLQNFFASVSGARIAAIFRTAGYPESVALLLARLCTSKVSRFVWQMLCDENQAADLHGLVDQVSVWHLPQGAPTSPALANLAAFRLDRRLTGLAASMSSRYSRYADDLIFSGPTDLAKRSQAFVAKVTEIMVEEGFLPNTRKTRIMRPSVRQSVCGLTVNQKVNSNRADFKQLQAILHNCVTLGPAGQNRANVADFRAHLAGRIQFQRFIHPQRAAKLEAMFVRIKWP

SEQ ID NO: 5269 - protein, 450 aa, unidentified
  source 1..450: note = Related to JAEUHH010000058.1; note = Verrucomicrobiales bacterium
MPPEPLPECMIAAAAEQLAGWLQLRLLPEAQSLEAALESGLPGSISDRKPLLRRLSGIKEIATMPEADLAKIIAADPWFQAHGARSARHWRHQTRVREMTPRWEGLPILATEGDLCLWLGGLRPAELHWLAQTERGDHDPAGKLAHYVHRWIPRRHGAPPRLLASPKPLLKSLQRKILRDLLDHLPLHEAAHGFRRGRSIRSFAHPHTATDCVLRLDLADFFPSIRFGRVAALFETAGYPSPVARLLAGLCCHSAPRAVVRSAGLPRALADRLLRPHLPQGAPTSPALSNAVAFRLDRRLAGLAAAAGAQYTRYADDLAFSGGRDLWRGATRFLDRATAIVLDEGFEVNFRKIRVMPACARQRIAGVVVNEKTNTVRETYDALKAALHRWETRGLPEDDALFPERLLGRISALAQLNPEKGAKLRQRYDRVREGSGFHEMGSPPTSGGLL

SEQ ID NO: 5270 - protein, 346 aa, unidentified
  source 1..346: note = Related to JAGROW010000047.1; note = Verrucomicrobiae bacterium
PHPAVMTARWEGLPLLPSLSDLADWLEIASLSELHWLAGIDRGREAPPSRAVHYTYRWILRKNGSPPRLLECPKPKLKAIQRKILRQILDKVPLHDAAHGFRLRRSIRTFAVPHTGRECVLRADLADFFPSIRFGRVAAFFETSGYPASVARLLAGLCCHAPSKRGIRAAKLSPFSAAKWLRPHLPQGAPTSPALSNAIAFRLDRRLSGLAQASGAHYTRYADDLAFSGGSDLSRGADRFLALVATIALEEGLELNYRKSRVMPACSRQRIAGVVVNETPNTTRAIFDELKACLHRWETKGFDACAADDPEFSDRLLGRIAALAHLNPRKGEKLRQRFERLRGARQ

SEQ ID NO: 5271 - protein, 384 aa, unidentified
  source 1..384: note = Related to VFZW01000070.1; note = Acidobacteria bacterium
MTTAIPRLLAQAFLNGKLQRAGMIKRGAELLGQKWKWLGPLATRFLKEFGGAKPRLGDAVRFLRHDEGLCVARAGLRIAKWTPSNGVAAMRWKLPEMESPAALAEWLGLTDAEVAWFADRKNINKGKSSHYTYCVFEKPGKPARLIEAPKTRMKELLRRLLTDVFEKIPVHAAAHGFVARHSIKTFAAPHAGQPCLLKMDLANFFPSISRARVESLLITAGYDERVAELLAGICTNRAPRDVAPDPIYTRPHLPQGAPTSPAIANLCMFRADRRLRGLAESAGAVYTRYADDLAFSGASVGDRSALRIVRRTHLRIVRRTQAAEPVKHESPRLRHSRAGRPVQCSSMRTDSHQIAIRIIRVFGCCGCAVWVFHDDRQPPQRIMG

SEQ ID NO: 5272 - protein, 440 aa, unidentified
  source 1..440: note = Related to JAGQPM010000203.1; note = Planctomycetales bacterium
MATHRHIAKVIAGTAAAGQLTEDEIVARVAGVLGKRWRWLRPLARRMEERFAGRTRPRESAVHRWIIADDGFHRACRQHAIVIVEELPHRPEMRPPTGIAMTWNVPTITTVYDLAHWADLPLDELEWLADRRGREPSAEAKYRRYRYRVLSKGQSRFRLIETPIYRLKLLQRHLLSGILDHLSPHDAAHGFRKGRSIHTFADNHLGRQVVLKMDLRDCFTTIDFGRVSHLFRLAGYPERVADTLAAITTNTVPDQVWEAASGAHVFCPSERLPSIYASPHLPQGAPTSPAIANLCLYKLDLRLTGLAKACGASYSRYADDLAFSGDADFARCVQRVRHHIAAIIQEEGFEVNHRKTRVMRASTRQRITGIVVNQHRNIPRREYDQLKAILHNCISRGLQSQNRDKHTDYRAHLAGRVAFVEAVSPSRGQRLRDMLNQIDP

SEQ ID NO: 5273 - protein, 448 aa, unidentified
  source 1..448: note = Related to JAGQPF010000096.1; note = Planctomycetales bacterium
MKRVAEWFAVLFSRAATIGEMKGAAARLIGGQPRWVAPMLRRAEADAQVRDPPSELVGLSFQSWMHWLLHDRGFLARVSDPFAAIHRGPAESMMLPAAAAMDWPVPQILTVGDLAHWLDISPAELHWLANLDASWKLTGREGRHYQRVAHQKRFGEVRIIEAPRYRLKVVQRRILHGLLNRIPAHDAAHGFVAGRSTRTFAEMHARSRMVLRIDLRNFFVTIRRFQIAGVFALAGYPADVAYVLSRLCSAQMSVQEFSDLVGSPLEFRRASGAPSLAQTRRLYTRPHLPQGAPTSPMLANLCVYRLDCRLSGLAAAVGGRYSRYADDLAFSADLDVRQSKRLCTQIAAIVIEEGFQVHDRKTKRMRRGTRQRIAGVVINEHPNVTRQQYDQLKAILHNCARYGPESQNRDQCADFRAHLEGRVAHVGMLNPTRGAKLKRLLQQIDWGR

SEQ ID NO: 5274 - protein, 338 aa, Mariniblastus fucicola
  source 1..338: note = Related to CP042912.1
MKFPVPKIRTLLQLANLLEIEPEQLRWLANPCGRRSAPDSWSRHYRSHWIRKRSGGWRLIEAPRSRLRYVQRILLDTIFNAMPPHVLAFGFCRNRSVIDFVKPHVGKDVCWRFDLTDFFTSVTTGRVAGLLRNSGYPCDVANSIAMLTTVQTSPRILSVEHPRATFSVQSPKHLRRHLPQGAPTSPAIANLCAYRLDARLSGLARSVGGVCYSRYADDILFSGDSDLARQSGRLRAHVGAIAIEEGFEINYRKTRLARASQRQFAAGIVLNEKLNVPRENFDRLKAILHNCVRSGPTSQNRDNHPAFRQHLEGRVQWVEMLNRGRGEKLRKLLERIEW

SEQ ID NO: 5275 - protein, 445 aa, unidentified
  source 1..445: note = Related to JACRUV010000555.1; note = Planctomycetes bacterium
MATQRFVADYLASAFVCGRWECDDLVDRGADALGRRWRWLRPLAQRALHTLGHDRRPSRFQVLRFLRQDEGLRRACHKHDVRVGGLQRKPPEMAPTAGHPVNWDVPPLVTVGELADWLDLKLTELDWFADRRGLERKVPRGPLRHYRYYWLSKRIGGSARLIESPKQRLKAIQRCILHEILDRIPPHEAAHGFCRGRSIRSFVAPHAGQSIVLRADLRDFFPCIPRRRVAGVFRTAGYPEEVSQCLAALGTNEVPDDVWRSFPQYGNVADRWRHQRLYGQPHLPQGTATSPAIANLCSYRLDCRLAGLARSFRGRYTRYADDLLFSGGRVLARSIGKFHRVVYAIAMDEGFEINPRKTRIMRQGVRQCAAGLTVNRHPNIPRDEFDRLKAILYNCARRGPGNENHARLPEFRLHLDGHVSFVESVNPARGQKLRSLFERIQWPAT

SEQ ID NO: 5276 - protein, 445 aa, unidentified
  source 1..445: note = Related to VGYH01000867.1; note = Planctomycetes bacterium
MVNQDLVASALAAAFVGGRWQVDELVARGARALGRRWSWLRPLASRLLHVLGEDSLPSRSQIERFLLQDAGFQRACLEHAIRVGGPGRNYPMMSPAAGSPASWGVPPLVTVGELAKWLGLEGKQLDWFADRRSLERTTPAGPLRHYKYYWLSKRLGGSARLVEAPKWRLKMLQRRVLRGILDNIPPHAAAHGFWRGRSIRSFAAAHVGQAVVLRMDLKDFFPSIAKARIVAVFRTAGYPEDVCQLLAALCTNHVPDDVWQRFPQYGGAADRWRHEGLYARPHLPQGTPTSPALANLCAYRLDCRLTGLAHAVGGKYTRYADDLLFSGGEALARSLRRFEATACSVIIDEGFAVNFRKRRIMRQGVRQHATGLVLNRHVNVARDEYDRLKATLHNCVCQGPTGQNRGGVRDWRLHLQGRIAFVESINPDRGRRLRRLFDRIQWPRD

SEQ ID NO: 5277 - protein, 447 aa, Planctomyces sp.
  source 1..447: note = Related to JAEUIH010000118.1
MSSRKSIARRLTVAVLAGRFGKDSILERTLPLIQGSPTWLKRFVDQLIRRFGNQRPKRSYVLAFLLSNREFIDASLNEDFDVQPYLLPSEFSPSPGNFEAIDVIRLRSSGEVAAWLKLNENELSWFADRHQLERLSTVGPLRHYRYFWKLKRHGRCRLIEAPKFRMREIQRRLLREILSRIPVHNAAHGFRRGRSANSHAAPHVGRSVVLKLDLEDFFPSVPPMRLTRLLMHTGYPEDVAEILTALCCNHVPSDVFDSFPHRDDWKLRRRAKQLYCRPHIPQGAPTSPVIANLCAYRLDTRLAGLAQSANATYTRYADDLLFSGDDQFSRGIDRFRILAAAIAMEEGFAVNHHKTRVMKRSIRQEAVGLVLNEKINTRRDEFDRLKATLHRCILKGPEAVNCGQHAHFRQHLIGRIQHIAQSSQSRHTKLMALFDQINWSDPQSPST

SEQ ID NO: 5278 - protein, 441 aa, unidentified
  source 1..441: note = Related to JAGQQS010000555.1; note = Planctomycetaceae bacterium
MNTPESAARRLAVAILAGKFEKEAILQRTLPIISGSITWMKRLVNQIIKRFGNQRPRRRDLVTFLLHSRGLSNASEQEDFQIRAYDQAADFLPSPGLFENVGVLPLRSVGEIGEWFGLGESELLWFADRRQLERVLPDGPLRHYRYHWKLKRHGKCRLIEAPKFRLREIQRKLLREILNQIPVHNAAHGFRKNRSAQSHAAAHVGKAIVLKMDLEDFFPSIAPAQLVRILMHVGYPEDVAEVLTALSCNHVPYEVFSSFPHMADGRQKRHAQQLYCRPHFPQGAPTSPAIANVCAFRMDRRLAGLARSANAVYTRYADDLLFSGDEKFARSINHFRISVAAIAIEEGFTINHHKTRVMKRSVRQEAVGLVLNEKLNTRRDEFDRLKAILHRCVLRGPAAVNEGRHADLRSHLRGRIQYVAQTNQGRHAKLSRLFEQIDWSD

SEQ ID NO: 5279 - protein, 479 aa, unidentified
  source 1..479: note = Related to JAEUHE010000137.1; note = Verrucomicrobiales bacterium
MSVARFIARATLRWRADPLTHNGTRWSTVPLSTLMEFANQVARQLAIAIQQGRIEEEALVQRIREHCLGRQRWLRSFARRFVAHFGEGRRWRRLRMERFILKDAGFRRAVAMSQLSLRSGINPAPGMCPAAGAPEHWKLPELATTGDLARWLNLEPGELAWFSDSRTQEQTLPEGPLRHYRYHWVLKRGGSARLLECPKQRLKLFQRHVLFQLLNRIPIHPAAHGFQAGRSVQSFAQPHVGREIVMRLDLQDFFPSVMKSRVLAIFLTAGYPEPVAAMLAGLCTNASPFAVLSSCPATVHPTQRCHLKDLYRRPHLPQGAPTSAALANLAAFRLDLRLHGLAKAAGAAYTRYADDLVFSGDSAFARMVERFYIQVCAIALEEGFAVQTRKTRMMRRSVSQRAVGLVLNDRLNTPRREFDCLKAILHNCVVQGVAAQNRADHPRFKEHLAGRIAYMESINPGRGIRLRRDFDRIIWPDPT

SEQ ID NO: 5280 - protein, 442 aa, unidentified
  source 1..442: note = Related to JACPRJ010000368.1; note = Verrucomicrobia bacterium
MRLAAKIAHALATAILNGTLTTEGVYKRGAAVLGCRWAWLRPLAKRIIAHFGEGTRPRVFRLERFILANGGFLKACEKHQLTLRPDAHFEPAMCPAAGPPRRWKVPRIRTPGELARWLGVEFNQLLWLADCRTQEQKLPPGPLRHYCYHWQPKRDSSARLIESPKPRLKTIQRQVLHEILDRIPPHAAAHGFRAGRSIRSFVKPHVKREVVLKLDLKDFFPRIARARVLAIFLTAGYPEAVAELLTGLCTNSVPSEVIKACPAATNPLRAREAKQLYQRPHLPQGAPTSPALANLAAYRLDCRLAGLAKAAGARYTRYADDLVFSGGKPFARMVDRFYIQACAIALEEGFEVHTRKTKIMRRSLSQRAAGIVLNEHPNVPRREFDRLKAVLHNCVVHGPASQNRDGVADFRAHLAGRVAHVEVINPARGRKLREGFERIEWE

SEQ ID NO: 5281 - protein, 386 aa, unidentified
  source 1..386: note = Related to JAIOQE010000901.1; note = Planctomycetales bacterium
SRTALTRFILGNAGFQAVCEEDPDLSLSGSRHFVPAMTPQNSRAASWPVPPLVALQQLADWLGITPGELAWFGDLNSLQRSVPNGPLCHYGYHWIRKRGGSFRLVESPKARLKQLQRKVLHELVDKIPPHDSTHGFRQGRSICSFVKPHVGKRVILKMDLQDFFPSITRWRVTGIFLYAGYPEEVARLLAGICTNEAPPQVLRSLPACERQRAWQLESLYQIPHLPQGAPTSPGLANLCAYKLDSRLAGLARAAGGTYTRYADDLLFSGDDAFARSVKRFYIHAAAIVLEEDFTINFHKTRIQGQSVRQRAAGLVINSHANIQRDSFDNLKATLHNAARFGPAGQNRGGVADFRAHLGGRIAFVEMVCPPRGEKLRRIFEQIAWEG

SEQ ID NO: 5282 - protein, 451 aa, Aquisphaera giovannonii
  source 1..451: note = Related to NZ_CP042997.1
MERPPLSSSSFHRLRRYCLILARAFLAGPWERQGLVERGRATVQRKAKWLDSAAKRAMEAFPTCAALREARLADHLAGDPDVLKAATSGRVPLRPQALVDLRPEMRPPPGPSAAWSVPAIATPAELAAFCDVSPVQLEGLADCQGRERRTPREPLRNYRYRAFPKASGGFRIIEAPKPRLRRMQRLLLDEILAKIPAHEAAHGFRPGRSVMSFVERHVGRHVVLKMDLADFFPSITAARVLAIFMTAGYPEDVAKLLAGLCTNAVPMHLERLLGGTPVGDWRSRKLLAGPHLPQGAPTSPALANLAAYRLDLRLDALARSAGAHYTRYADDMVFSGDESFARSAGRFALSVSAIALEEGLAVRNRKTRVMRRGVRQRAAGIVLNERPKIPRDDYDKLKATLHNCLRHGPAGQNRDGHMDFRAHLLGRIAYVARIHPGRGERLMRSFDRITW

SEQ ID NO: 5283 - protein, 441 aa, Aquisphaera sp.
  source 1..441: note = Related to NZ_JAALJH010000014.1
MSSSRHPHRRFALVLARAFLAGPWEHPELVGRGRTAIGRKGRWLDAVARRLLVAFPSPAALRARWIADHLLADPQFLKAIGKARVPLRAELSPVMRPAPGEPASWLVPAITTPAELAAFCGVTITQLEGLADCQGREKKARREPLRNYRYRVVAKPSGGSRLVESPKPRLKAIQRRLLDEIVARIPPHDAAHGFRPGRSVSSFVAGHAGRHIVLRMDLADFFPSITSARVEAIFMTAGYPEDVARLLAGLCTNVVPRHLEDGDGADRATGWHSRRLLAEPHLPQGAPSSPALANLAAHHLDVRLDALARAAGARYTRYADDLVFSGDDAFARSVRRFSIHVAAITLEEGFAVRHRKTRIMRRGVRQRAAGIMLNVRPNIPREDYDALKAILHNCARHGPEGQNRAGVSDFRAHLLGRIAYVSGIHPQRGARLKRTFDRIAW

SEQ ID NO: 5284 - protein, 449 aa, Singulisphaera acidiphila
  source 1..449: note = Related to CP003364.1
MGRPPLLSTQNAEFIVRELANAFVEGVWDLDGLVARGEQTLGRRPRWLRHLARRLLAAFNDGRRPPAAQIARFIHNDRGFDRVRERYELTMEWSRRPPPVMSPGPGEPESWPVPAIVTPEDLAERLGLTRSELDWFADSQAREGRGSPEKLRHYHYRWQAKRSGSARLIEAPKPRLKAIQRRLLDEIVAMVPPHDAAHGFRLGRSVRTYVEPHIGRTIVLKMDLRDFFPSISAAWITALFLTAGYPEPVARLLSGFCTNSVPPDIWADPRCPIQGPEHWRLRRLHRQTHLPQGAPTSPAIANLCAYRLDCRLQALATSVEARYTRYADDLAFSGDQRLARAVERFQTQVGAIALEEGFVVQHRKTRAMRQAVRQRVAGVVLNVRPNVPRPDYDRLKATLTNCIKQSPQSQNRDGHADFQAHLRGRIAYVAALNPNRGQRLRALFEQIAW

SEQ ID NO: 5285 - protein, 445 aa, unidentified
  source 1..445: note = Related to JACKIC010000007.1; note = Planctomycetes bacterium
MVLSASSLPLRLARTLLSRPFTWQAVEEALVDARGGPDPGLTRLVTVLLLRLRALRTRARSRAALHELVDYLDNSRRVERLFGEVGPELAELPPPTMLPLPGAPKRWQVPAITTVAQLADWLRVQPDELLALACRWRQDREHRDDRLQHYHRRWLPRRGGPPRLLEAPKARLKAVQRRILTGILNAAPPHRAAHGFVRGRGVGTFAAAHVGAACVLRLDVADFFASVRGARVRGVFLAMGYPIDVAELLACLCTTRTPDRVCHRGLHDFGTVGAVLATRLRARHLPQGAPTSPALANLVAFHLDARLTGLARRFGARYSRYADDLLFSGVGAFVRGANRLAVYVAAVLLQEGFAAAHRKTRRMPQGVAQHAAGLVLNVHGAVPRRERERLEAVLVNCVRHGPASQNRVGRVDFEAHLRGRIAHVEHHHAPHAARLWRWFDRIVWE

SEQ ID NO: 5286 - protein, 439 aa, unidentified
  source 1..439: note = Related to JAGQRA010000173.1; note = Planctomycetes bacterium
MPLSVEQHARDVARTLVARPFTAPAIEAVLVVECGRPDPRLARLAKALALRFGGLRRPRAREVADYLVRRRRYAETAAACEMQLQDLPRRSMLPLPGAPATWKVPAIVTTTELAAFLRVGAEELAAWCRRWRRSPGRPDPRHEHYHCRWLPRHGAPPRLLEVPKTALKRVQRRILTGILQAIPPHPVAHGFVRGRGVATFTAQHTDRDCVLQLDIEDFFGSIQERRVRAVFVAAGYPVDVAAALARLCTTHTPPRVLAELVSNDRARRLATRLAMTHLPQGAPTSPALANLIAFRCDLRLAGLARRFGGGYTRYADDLLFSGGPEFAADARRCATHAAAILETEGFAVAHRKTRVMRRGVAQRAGGLVLNRHGAVPRASRERLEAILTNCVRHGPASQNRAGVVDFAAHLQGRVAHVAHHHPPHGVRLLRLLAQIDWCR

SEQ ID NO: 5287 - protein, 436 aa, unidentified
  source 1..436: note = Related to JAFEGM010000060.1; note = Verrucomicrobia bacterium
MNRPDLAAALVARRIVAGTIEPAAVTEALVETGGLRLRRARPLARQIVRQFGGVLRPRWRDVARLLAGNRMFRRQCRGSAAAGAAAPPTMRPAAGAPQQWPVPPLTTPGELAAWLRLSPEELLFLAARWRERLPSEPRVRHYHYAWHPRRHGPPRLLEVPKARLKWVQRRILRGILDHIPPHAAAHGFRRGCNILSYTSTHTGRACVLRMDVQDFFPSLRRGRIVRIFLTAGYPEPVATLLADLCTTATPAEVLRPLAAPISARAAQLRVALRSRHLPQGAPTSPALANLCAFGVDARLAGLARRFGATFTRYADDLLFSGDAGFARSARRCEVRVGAILLELGLTVAHRKTRVLPRSVCQRAAGLVLNERPGLPRRERDRLKAILTNCVRHGPASQNRANLPDFAAHLRGRVAHALATHPASAARLLALYERIVW

SEQ ID NO: 5288 - protein, 439 aa, unidentified
  source 1..439: note = Related to JAGQQE010000253.1; note = Planctomycetaceae bacterium
MSLLSRDVDSLVDAFVAGEWTEPSMLHRCGVIVDGKPKWLPFLIQRVLKRFPGVRPTRRALTDFLYEDRRLAAASERITTLTNHIRMNSEFDCQLTSLKSSVRPTWTTVRQLADWFDLPVEHLLWFADSSQIGRQHPHGPLCHYHYRWVEKRRSGRRLIESPKPGLRQMQRRLLNECLRHLPVHDAAHGFCKGRSVDTFVQSHTGRQVVLRMDLQNYFPSLRPFRLMRLLMLAGYPEVVARTLSNLCTNTTPSSVLRDYSSISLSNSDRHLTVLLRQPHFPQGAPTSPLIANLLSYRLDARLQGLAQSAGIHYSRYADDLLFSGDERFRRCVKQFRIHVAAIVIAEGLNVNHRKSRIMLQSRQQRATGLVLNQHPAVSRRDFDLLKAILHNCIRFGPQTQNHSGIDNFRMHLLGRIQHMARYHPSRAQKLMHSFEQITF

SEQ ID NO: 5289 - protein, 434 aa, unidentified
  source 1..434: note = Related to JAGQPY010000402.1; note = Planctomycetaceae bacterium
MKVSHLADAMLAGVWVQQEITERVLQVVKTPRRWVPSLVRRTILAFPDHRPLRSVLCQFLMTDDSLRSRACDDEFEVLAYSGNDEFDNHRFDDSARRPVRWQTFGQLAEFLDLEISELSWLADLRGLQRTAPDGPLNHYHRRWQLRRRAVPRLIESPKPRLKSVQRRILQCCLSRLPLHSAAHGFRKGRSVSTFLQHHAGQSCVVRLDLHDFFGFLSPIRLLRLLMMFGYSESVARTITAICSTTTPEHTIERMPQNFVDRRQATTLQRLRSRHFPQGAPTSPAIANLIAWKLDQRLTGLATTFGATYSRYADDLLFSGDEDFRRRAQWFTTCVAAVAMDEGFEVQHRKTRIMTRSVRQQACGLVLNHRPTVSRREYDVLKATLHNAVRFGPESQNRSRHSGFRQHLLGRINYVRQWNPARAVRLMALFDSIRW

SEQ ID NO: 5290 - protein, 431 aa, Luteolibacter pohnpeiensis
  source 1..431: note = Related to NZ_JAENIJ010000042.1
MPSRIHHARRLATALAAGSMANHDELIHRAAPLMGDIRKARWLKALARNLSLEFAEAPRPTIRKITDRILHDPGFTRAWILGKARIGIGFTQPEMAPAPGIAVAWGVPAITTLAELADLLRLHPDDLGWLTARNSSEHYRYRWQIKPKSGRYRLIESPKELLKGAQRRVLRKILNLIPPHEAAHGFRPGGSIRNFVEPHSGKPMLLRFDLEDFFPSITSTRIFHIFLTAGYPENVAQALTAICTHSTPSQTIGEKPLNSHERSRLTTRHLPQGAPTSPALANLSAYRLDCRLLGLAQSIGATYTRYADDLLFSGDQKFARKSKGLQAMIGGIILEERFSINHRKTRVLRQAQKQHAAGLILNQKPNIDRREIDQLKAILTNCIRFGPESQNRNNHPDFAAHLAGKLSWIRFIQPQKALKLESLFERIDWPA

SEQ ID NO: 5291 - protein, 430 aa, unidentified
  source 1..430: note = Related to NEUO01000019.1; note = Verrucomicrobiae bacterium Tous-C4TDCM
MPSQAQHVRRLAAALAAGPMDDREAMLARVKPLVGDLRKARWLEPLVRNLSLEFGEAPRPAIHHVAGRILGHPPFVKAWIAGQGRILPLPVTPQMAPAMGAPRDWQIPAITNLTELADELRLHGDDLGWLIAHGQADHYRHRWQAKPKSGRFRLIESPKTLLKFAQRQVLRRILDAIPPHEAARGFRPGNSIRDFVEPHTGRELLLRFDLEDFFPSLCAARVLRIFLTAGYPETVARALTRLTTRATPHSTLEEKTLAWAERRRLATPHLPQGAPTSPALANLGAFRLDCRLAGLAEAAGARYTRYADDLLFSGGADFARQSRRFETAVGAIILEEGFRPNHHKTRVLRQGQKQHAAGLVLNDKPNIDRRDFDRLKAVLTNCVRHGPASQNRDHHADFAAHLQGKLAWVRFIHPGKEEKLQGIFDKIDWD

SEQ ID NO: 5292 - protein, 451 aa, unidentified
  source 1..451: note = Related to JAFLEF010000009.1; note = Verrucomicrobia bacterium
MTPTEERWIASLAKMALAGEWEAAALLERGQVWLGSRPRWWLRLVHRLLRQFGPGTRPRLSRVESFLRRDPWLRKVLLKGDLKGDANPPEPVQCAARGRPATWKLPSFTRPVELASWLRVSVGELEWLADAQGWRSGEACERLGHYHYRWLRKRDGSARLIESPKQHLKLIQRGLLDAVVSAIPAHESAHGFQPGRSTLTHVGPHIGREVVLKYDLRDFFTRVTRPRVQAVFRTAGYPEAVAALLAALCTHRTPARIWRQFPGFETDPLIRARARNWQCPHLPQGAPTSPALANLVAYRLDCRLAGLAKAAGASYTRYADDLLFSGGSELARGAERFGIMVGAIALEEGFELNTRKTRVLRRGVAQRAVGLVLNDRINVPRAEYDRLKAILHHCVRQGPAGQNREGVPDFAAHLAGRVAYVTQTNPQRGARLQQWLDQIDWSRSSESAAAT

SEQ ID NO: 5293 - protein, 445 aa, unidentified
  source 1..445: note = Related to JAHWKS010000775.1; note = Planctomycetes bacterium
MQTARDAARTIAQLLLSGPFDEPAVWERLRPLAGRRRWLRFCIRRMLTAWKGTGHPSSAWIIDFLLSDARFQASWPTLRTPEPRMSPAAGAPLQWPVPSLGTPDEVATWLAVSHRELEARADTWGREARTPAGPMRNFDYSWRGKRSGAARLIEAPRPRLRSLQRKVLHGVLDAIPPHDAAHGFRRGRSVATFTAPHVGKQIVVRMDLRDFFASIHRAQIQAIFATAGYPPAVAKLLAALCWNAAPDDIWLDFPGTLPDDLGRLPAARLYRRPHLPQGAPTSPAVANLCAYRLDCRLAGLARSAGAAYTRYADDLLFSGDADFARTARRFTLHVAAIAREEGFAAHPRKTRLMRQGVRQFAAGVVLNERPNVPRRDYERLKAILHRAARIGPSPSAGETLMTYRARLAGKIAWVASISPRRGEKLQAVFEQIDWGRPNVGHSLCE

SEQ ID NO: 5294 - protein, 429 aa, unidentified
  source 1..429: note = Related to JABGQM010000001.1; note = Verrucomicrobia bacterium
MLKARHIESLTRGVAAALLAGPWEWEAMLDRSADALGRRWRWRRGLIRDMLLQHPSPVAYEALVQAIAANPHFRGAINDRTRPHIVHWFPWPTGMAPRYPAWHLPVISSVGALAALLDLPEEKLHWLADCEHRQGRPDELLRRHYRHYWLRKPSGGWRLVEEPHYLLKQAQRGILHGVLDRVPPHPAACAFVHTRSVVDYAAPHVGRELVLHLDLKEFFPSIPASRVHAMLTTLGYPTEVARLVTGLCTSTVPGYICRQRPGGKIYSAPHLPQGAPTSPALANLAAYRLDGRLAGAAASVGACYTRYADDLAFSGDEPFARSVNRFQAMVWRIVAEEGFDIHHRKTRLMHKSVRQRLCGLVVNDHLSIDRRVYDRLKAILTNCLRHGLESQNRDGHSDFRAHLCGRVAFVEQVNPARGARLRDLLKQVA

SEQ ID NO: 5295 - protein, 479 aa, Burkholderia ambifaria
  source 1..479: note = Related to CP000442.1
MRRKSAGCALRNDCSRSTCHVDSSSRPFLAMHASRFDTARMIAEAMLAGPPERGGMLERIKTVLGAAPSWSHELVDHAIAHFGTHWADVDTDLLASALADTSAFMIAWYGRDRPVVMRIVRRPPVQRLLPARLAGADVPQWPTCGDLARWLGVSAPELDWLSERWRVDARGSGSPLHHYTYTGYDKRRGGCRLIEIPKGRLREAQRRILHGLLDRIPPHDAAHGFRKGRGIVSFAAPHADRDVVVRFDLADFFVSVRAARVHALFVTLGYPAEVARTLTALCTNRVPSARLLEADLRDRFDWTGRQRYRNRHLPQGAPTSPALANLCAFRLDMRLAALARSLDATYTRYADDLAFSGGGALAREAGRLQVRVAAIALEEGFALQLRKTRVMRRGVRQQLAGVVVNRHPNLARDEFDVLKAILTNCIRHGPASQNRAAHPDFRAYLAGRVAHARALNAARGAKLHALFARIAWDGCSFGA

SEQ ID NO: 5296 - protein, 420 aa, Burkholderia ambifaria
  source 1..420: note = Related to NZ_CP086299.1
MHASRFDTARMIAEAMLAGPPERGGMLERITTVLGAAPSWSHELAEHAIAHFGTHWADVDTDLLASALADTSAFMIAWYGRDRPVVMRIVRRPPVQRPLPARLAGADVPQWPTCGDLARWLGVSAPELDWLSERWRVDARGSDSPLHHYTYTGYDKRRGGCRLIENPKGRLREAQRRILHGLLDRIPPHDAAHGFRKGRGIVSFAAPHADRDVVVRFDLADFFVSVRAARVHALFVTLGYPAEVARTLTALCTNRVPSARLLEADLRDRFDWTGRQRYRNRHLPQGAPTSPALANLCAFRLDMRLAGLARSLDATYTRYADDLAFSGGGALAREAGRQQLAGVVVNRHPNLARDEFDVLKAILTNCIRHGPASQNRAAHPDFRAYLAGRVAHARALNTARGAKLHALFARIAWDGCSFGA

SEQ ID NO: 5297 - protein, 449 aa, Burkholderia anthina
  source 1..449: note = Related to CABVLY010000011.1
MHASLFDTVRTIAEAMLAGAPERGGVVDRIAAVLGAAPPWAHDVSDDALARFGAQWADVDTDRLAGMLADAPAFLNAWYGPHRPVVIRVVRRPPVQRPLPPRLAGCDVPLWPTCGDLAEWLGVSTAELDWLSDRWRVDARSADTPLHHYTYTGYDKRSGGCRLIEMPKGRLREAQRRILHGLLDRVPPHDAAHGFRKARGIVSFAAPHADRDVVVRFDLADFFVSVRAARVHALFDTLGYPVDVARTLTALCTNRVPSARLLAPDLRDRFDWAARQRYRYRHLPQGAPTSPALANLCAFRFDMRLAALARSLGATYTRYADDLAFSGGDVLARDAERLERRVAAIALDEGFALQLRKTRVMRRGTRQQLAGVVVNRHPNLARDAFDLLKAILTNCIRHGPASQNRAAHTDFRAHLAGRVAHAAALNPARGAKLQALFDRITWDTCSPGA

SEQ ID NO: 5298 - protein, 449 aa, Burkholderia seminalis
  source 1..449: note = Related to CP013399.1
MHSSLRDTTRTIAEAMLAGSPERDGVVARMAAVLGGAPVWADEVADASLARFGAHWADTAIDALAAVVAEAPGFVRAWYGDPRPAVIRVVRRPPVQRPLPAPLAGCEVPPWATPGDLADWLGVSVPALDWLSDHWRVDARSGATPLHHYTYVAVDKRSGGCRLVEIPKGRLREAQRRILHGLLDRIAPHGAVHGFRKGHGIVSFAAPHAGRDVVVRFDLADFFVSVRAARVHALFATLGYPVEVARTLTGLCTNRVPSARLLAPDLRDRFDWIGRQRYRERHLPQGAPTSPALANLSAFRFDMRLAALARSLDATYTRYADDLAFSGGGALARDIERLQIRVAAIALEEGFALQLRKTRVMRRGARQQLAGVVVNRHPNLARDEFDRLKAILTNCIRHGPASQNRDAHPDFRAHLAGRVAHAAALNAARGAKLRALFDRIAWDAHDAGR

SEQ ID NO: 5299 - protein, 449 aa, Burkholderia cenocepacia
  source 1..449: note = Related to CP015035.1
MHSSLRDTTRTIAEAMLAGPPERDGVVARMAAVLGEAQPWTPECAGTALARFGANWADTDTDALAALLAEAPAFVRAWSGERRPVVIRIVRRPLVQRPLPAPLAGCDVPQWPTPGDLAGWLGVSAPELDWLSDHWRVDARSGATPLHHYTYVAVDKRSGGCRLVEIPKGRLREAQRRILHGLLDRIAPHGAVHGFRKGHGIVSFATPHADRDVVVRFDLADFFVSVRAARVHALFATLGYPAEVARILTGLCTNRVPSARLLAPDLRDRFDWIGRQRYRERHLPQGAPTSPALANLCAFRLDLRLAALARSVDATYTRYADDLAFSGGGALARDVARLQVRVAAIALEEGFALQLRKTRVMRRGTRQQLAGVVVNRHPNLSRDAFDRLKAILTNCIRRGPASQNRDAHPDFRAHLAGRVAHATALNAARGVKLRALFDRIVWDAGGAGR

SEQ ID NO: 5300 - protein, 449 aa, Burkholderia cepacia
  source 1..449: note = Related to CP011301.1
MRASLSDTVRTIAEAMLAGLPERGGVASRIAAVLGDAPPWAHELADAAIARFGPNWADADIDALARFVADAPGFVRAWHGDRRPGVMRVVRRAPVQRPLPAPLAASDVPQWPTCGDLAAWLGVSASELEWLSDRWRVDARSSGSPLHHYTYVAYDKRRGGCRLIEIPKGRLREAQRRVLHGLLDRVPPHDAVHGFRKGRGIVSFAAPHADRDVVVRFDLADFFVSVHAARVHALFDTLGYPAEVARTLTALCTNRVPSARLLAPDLRERLDWATRQRYRNRHLPQGAPTSPALANLCAFRFDMRLAALARTLDATYTRYADDLAFSGGAALARNAERLEVKVAAIALDEGFALQLRKTRVMRRGVRQQLAGVVVNRHPNVARDEFDRLKAILTNCIRHGPASQNRDAHPDFRAHLAGRVAHATALNAARGAKLHALFGRIAWDAGGFDT

SEQ ID NO: 5301 - protein, 449 aa, Burkholderia pseudomultivorans
  source 1..449: note = Related to NZ_CADFDQ010000020.1
MYAPLSDTVHTIAEAMLAGSPEPDGVAARIAAVTGDAPPWARPLADAATVRFGPRWADLDIDTLARFVVDSPGFVRAWYGADRPAVIRIVRRPPVQRPLPLPLAGCDVPHWPTCGDLAGWLGLDAAELDWLADRWRVDARGSETPLHHYTYMACDKRRGGSRLIEIPKGRLREAQRRILHGLLDRVPPHESAHGFRKGRGIVSFAAPHADRDVVIRFDLADFFVSVRAARVHALFDTLGYPAEVARMLTALCTNRVPSARLLAPDLRDRFDWTGRQRYRNRHLPQGAPTSPALANLCAFRFDMRLAALARSLDATYTRYADDLAFSGGATLARAIDRLQVRVAAIAFDEGFALQLRKTRVMRRGARQQLAGVVVNRHPNLARDEFDLLKAILTNCVRHGPASQNRDAHADFRAHLAGRVAHAAALNAARGAKLRALFERIAWGDAEAGT

SEQ ID NO: 5302 - protein, 451 aa, Burkholderia sp.
  source 1..451: note = Related to JAAGPL010000085.1
MYSSLYDITRTLAEAMLAGPPETDGVAARMAAVLGDAPPWVHAVARDAIERFGNLGKQWAAIEPNDLSLLVASAPGFVAAWHSDARPTIVRIVLRPPQQQPPPPALDAPDLPRLPTLGDLADWLGLSVPELDWLADRWRVAPRSETPLHHYTYRAFDKRGGSCRLVEIPKGHLREAQRRILHGLLDRVPPHHAAHGFRKGRGIVSFAAPHADRDVVIRFDLADFFVSIRAARIHALFRTLGYPLEVARALTALCTNRVPSARLLAPDLRDRLDWSGRQRYRNRHLPQGAPTSPALANLCAFRLDTRLAALAHSLDATYTRYADDLAFSGGAVLARAAERLPARVGAIALEEGFALQWRKTRVMRRGVRQRLAGVVVNRHPNLARDEFDTLKAMLTNCVRHGPASQNRVAHPDFRGYLAGRVAHATMLNDARGAKLQAIFDRIVWDAGDGDA

SEQ ID NO: 5303 - protein, 445 aa, Paraburkholderia flava
  source 1..445: note = Related to NZ_SMRO01000001.1
MNASLYDLTHTLAEAMLAGPPEPDGVTARIASVLGDSPPWAREVAVNAINSFGPRWADATPRDLSFVIADTSGFVNAWQSDNPPTIARIVLRPPEQRPPPQALAALDLPQWSTTRDLADWLGLAIPEFEWLADRWRVEPRSSGTPLHHYTYRTFDKRDGGCRLIEIPKGHLREAQRRILRGLLDRIPPHEAAHGFRKGRGIVSFAEPHVDCDVVIRFDLADFFVSIDAKKVHALFATLGYPLEVVRALTALCTNRVPSARLLAADLRDRLDWAGRQRYRERHLPQGASTSPALANLCAFRLDTRLAALAHSLDATYTRYADDLAFSGGPVLARVAERLPVRVASIAIEEGFTLQLRKTRVMPRGVRQRIVGVVVNRHPNLARDQFDALKATLTNCVRHGPLSQNRDAHADFRGYLAGRVAHATMLNAARGSKLQAIFDRIVWEGV

SEQ ID NO: 5304 - protein, 464 aa, Burkholderia guangdongensis
  source 1..464: note = Related to NZ_JACBNX010000003.1
MHSSLYDTTRTIADAMLAGPAEPDGVAARIAAVLGDSPPWVRDVALDAIARFGERWADVEPDELSRLVVGAPGFVEAWRRGGRPTIVRILRQPAVQRPLPPPLAALDLPPLPPLPQLPTSGDLADWLDLTVPELEWLADRWRVAARGSETPLHHYTYRAFDKRDGGCRLIEIPKGRLRDAQSRVLHGLLDRVPPHDAAHGFRRGRGIVSFAAPHADRDVVIRFDLADFFVSVRAARIHALFGTLGYPAEVARTLTALCTNRVPSARLLAPDLRDRFDWSGRQRYRNRHLPQGAPTSPALANLCAFRLDTRLAALARSLDATYTRYADDLAFSGGAGLARAIERLQVRVAAIALEEGFALHMRKTRVMRRSVRQRLAGVVVNRHPNLARDAFDTLKAMLTNSVRHGPASQNRDAHPDFRGYLAGRVAHATMLNATRGIKLRAIFDRIAWDAGDVDTIPDGNGSQP

SEQ ID NO: 5305 - protein, 449 aa, Burkholderia ubonensis
  source 1..449: note = Related to CP013414.1
MRSSVYDTARTIADAMLAGPPDPGGVAARMAAVLGDAPPWLHDVERDAVARFGARWAAVEADDLTRLVAEAPGFVAAWRSDSPPAIVRILPRPAVQRPLPAALGALDLPQWPTPGELAGWLGIAVPDLDWLADRWRVAARGSETPLHHYTYHAFDKRDGGCRLIEIPKGRLREAQRSILHGLLDRVPPHDAAHGFRKGRGIVSFAAPHADRAVVIRFDLADFFASVSAAKVHALFDTLGYPLEVVRTLTALCTNRVPSARLFAPDLRDRLDWSGRQRYRNRHLPQGAPTSPALANLCAFRLDTRLAALARSLDATYTRYADDLAFSGGAVLTRATEWMTVRVAAIALEEGFALQLRKTRVMRRGVRQRLAGVVVNRHPNLARDEFDTLKAILTNCVRHGPASQNRAAHADFRGYLAGRVAHATMLNAARGMKLQAIFDRIVWDAGDIGA

SEQ ID NO: 5306 - protein, 449 aa, Burkholderia sp.
  source 1..449: note = Related to VWWJ01000001.1
MQPGFRNTLVIVCDAMLAGAPEVAGVVTRLTATFGLYGAWMEEVAQQAVDAFGSRWDATRVDELTPLLENAPAIVAAFSSQASPEIIRIIRRAPAQRPPPPQLAHIGLPHLPTLRDLAEWLELNDSDLAWLATRWRVDPGEASSPLHHYSYHAREKRDGRHRLIERPKSLMRFVQHKLLHGLLDHVPPHDAAHGFRQGRNIVSFAAPHADKSLVIRLDLADFFASITQARVHATFHALGYPLAVSRALTALSTNRVPVRVLSCGALKDKFDWTEQQRLRARHLPQGASTSPALANLCAFRLDTRLAALARSLDADYTRYADDLAFSGAARLERVADRLPLWVAAIALEEGFTVQPRKTRVMARGVRQQLAGVVVNRHPNLARDRFDALKALLTNCVRHGPVSQNRDGRADFRASLAGHVAHATMLNPARGAKLRAIFDRIDWNRLESAS

SEQ ID NO: 5307 - protein, 445 aa, Paraburkholderia acidisoli
  source 1..445: note = Related to NZ_CP046915.1
MRLNFRDTLVAACDALLAGPPELAGMVARLVSVFGTYRAWMDDVAREAAHGFAPRWDAIPAHELARSLEQLPVFATVFGNASRPEVVRIVRRAPVQRPLPPGLEQVSLPRLATLRDLAEWLEVAGGDLAWLATRWRVEPGEAASPLHHYSYHAREKRDGRNRLIERPKPLLRFVQHKLLHDLLDRVPPHDAAHGFRRGRSIVSFAAPHADQPLVIRLDLADFFASITQGRVHAVFHALGYPVAVARALTALSTNRVPSRMLTSGALKDKFDWTEQRRLRARHLPQGASTSPALANLCAWRLDTRLAALAQSLDANYTRYADDLAFSGAARFQRVADRLPLWVAAIALEEGFSVQPRKTRVMAQGVRQQLAGVVVNRHPNLARDRFDALKALLTNCVRHGPASQNRDGRADFRAALAGHVAHAAMLNPSRGAKLQGIFDRIDWSQS

SEQ ID NO: 5308 - protein, 449 aa, Burkholderia sp.
  source 1..449: note = Related to LMPF01000021.1
MRLNFHDTLVITCEAMLAGPPEVASIVARLMLIFGEHSPWMDDVARKAADLFTPRWNDTPIDELIRVVEDTPTFVAAFGTHIRPEAIRIIRRPPVQRLPPRRLAHVDLPHLPTLRDLADWLELDGSDMSWLATRWRVEPGEAVSPLHHYSYHAREKRDGRYRLIERPKALIRFAQHKILRELLDRVPPHDAVHGFRRGRNIVSFAGPHADKALVIRFDLTDFFASVTQARVHGMFRTLGYPIAVASALTALATNRVPSRLFTLGELKGKFDWDAQQRLRARHLPQGASTSPALANLCAFRLDTRLAALAHSVDAVYTRYADDLAFSGEASLKRGADRFSARVAAIAREEGFNLHFGKTRVMGRGVQQRLAGVVVNRHPNLARDRFDMLKAILTNCVQHGPASQNRAGRADFRASLAGQVAHAMMLNSSRGAKLRAIFDRINWSQGNSAG

SEQ ID NO: 5309 - protein, 445 aa, Burkholderia sp.
  source 1..445: note = Related to JAAGPF010000151.1
MRPGTPKTIALLCEAMLAGEPEPAAVAARLVLACNRHERWMEALAQLAVERFARVWRDTEPDELASLFALAAPFPPGWSARDLPAIARIVRRAPEQQLPPPRLVHLDLPSLPTLRALADWLELSDEDLAWLATRWRVAPHEAASPLHHYRYHVREKPDGRHRLIEQPKPLLRMAQHTLLHGLLDRVPPHEAAHGFRRGRNIVSFAAPHAGQPLVIRLDFEDFFGSVTEARVHGLFRTLGYPVAVAQALSALATHRVPSRLFDVGDLKGKFDWHAQQRLRARHLPQGAATSPALANLCAFRLDVRLAALARGFGASYTRYADDLAFSGGDKLKSVARDWPLWVARIAREEGFAVRSQKTRVLRNNMRQQLAGVVVNRHPNLSRERFDLLKAMLTNCVRHGPASQNRDGRADFRASLAGHVAHATMLNAARGAKLKAIFDRIDWTRG

SEQ ID NO: 5310 - protein, 455 aa, Paraburkholderia acidicola
  source 1..455: note = Related to NZ_MTZV01000006.1
MQLSLHQTVIAIAEAMLAGEPYRDSVAARAASILGAQLPWLSEAADDAVHRFGHRWDDTQPDEVAPFIADLPGFVSSWMSEERLSVIRILRRAPVQRRLPPPLAQIEIPQLPALGDLADWLELSPADLGWLANRWRVGARDGPSPLHHYSYRVCEKRGGRYRLIERPKSLLRAAQHKLLHGLLDRVPPHEAAHGFRKGRNIVSFAAPHVGQPLVIRLDLADFFVSVTEARVHSVFRTLGYTSAVARAMTAMVTNRVPSAQLLAPDLKGKFDWLEQQRFRTRHLPQGASTSPALANLCAFRLDTRLAALARSLNANYTRYADDLAFSGGAQLMSVADRLPVKVAAIAIEEGFSVQPRKTRVMPRGVRQQLAGIVVNQHPNFSRDKFDTLKATLNNCVKHGVASQNRSAHRDFRASLAGHIAHVTMLNSARGAKLKAIFDCIDWSEPVGDEHGTSAL

SEQ ID NO: 5311 - protein, 489 aa, Robbsia andropogonis
  source 1..489: note = Related to NZ_CADFGU010000011.1
MSHCTARAPLRTAQARSRHTGTLIRGSSFTMQLDLSAAVQLIAEAALAGPSKHASVVERIVAVVGADPPWCHDVATLAVQRFAYCWREASPEDLALLIVDVPAFAAAWSGVDRPTFVRVLKRVPTQVAPPVSLAHISIPLLPTLADLADWLELRSTDLEWLADRWRVEGHARRLHHYGYHACEKRDGRYRLIERPKPLLRSAQHKILHQILDHIPVHAAAHGFCKRRNIVSFAAPHAGQAMVLSFDLQDFFSSVTAGRVHAIFRTLGYPFAVARAITALTTNRVPSAYFDAPPLRGKFTWHERERLRARHLPQGAATSPALANLCAFRLDMRLSALARALGARYTRYADDLAFSGGSVLARASERLSIQVAAIALEEGFEVHSRKTHGMPRGVRQQLAGVVINRHPNLARDCYDRCKAVLHNCALHGPASQNREAHGDFRAHLMGKVAHATMLNPRRGAKLKVLFDRIIWPEDAPARPPDDGTVHAMPQ

SEQ ID NO: 5312 - protein, 490 aa, Paraburkholderia phenazinium
  source 1..490: note = Related to FNCJ01000001.1
MISAVRRMSPLCVLRKTAHAALDALTRRPASFHAMRLSPLQRITYAIADAMLAGPAEPDSMVERMSDSLGVPSDWMLGLARRVAKRFGARWDSVDSKEVALVVAKTAGFVAAWRSEARPFVVRVLRRPPVQQLPPPRLREIALPKLATLGDLAAWLEVEVAELDWFADRWRVLPQGADTPLHHYTYKAIEKRDGRCRLIEIPKSRLRSLQRKILHGLLDRVPPHDCVHGFRKGRNTVTYAAPHAGKAVVVRFDLADFFASVHAPRVHAVMRTLGYPLEVARMLTALCTNRVPSARLLAADVRGKFDWLERQRYRTRHLPQGAPTSPALANLCAYRLDLRLEGLARAVGATYTRYADDLAFSGDEDLARVVERLKVRVAAIALEEGFSIQLRKTRVMRRGVRQHLAGVVVNQHPNLARSEFDALKAILMNCVRHGAASQNREGHADFRAHLQGRVAQAVMLNAARGAKLKGIFERIGWEDIANDSRLDSEA

SEQ ID NO: 5313 - protein, 451 aa, Paraburkholderia sp.
  source 1..451: note = Related to QVQV01000003.1
MRLSSLQHVTFAIADAMLAGPPEPDALVARMTAALGVRADWMTGIARTTSRRFAARWEHVKRDELLRMIAATESFQLAWHNEHQRPVVVRVLKRAPQQVAPPPRLAHVALPQLPTLGDLAAWLEVDDADLGWFADQWRVMPQASSTPLHHYSYKAIEKRDGRCRLIEMPKSRLRDLQRKILKGLLEHVPPHECAHGFRKGRNTASYATPHLGKDVVVRFDLADFFASVHAGRVHALMRTLGYPLEVARALTAICTNRVPSARLLADDVRERFDWQEKQRYRTRHLPQGAPTSPALANLCAYRLDLRLAGLARTMCTSYTRYADDLAFSGGRELARGVERLAVRVAAIAMEEGFSIQLRKTRVMRRAARQRLAGVVVNQRPNLARDEFDALKATLTNCVRYGVEGQNRDGHRDFRAHLEGKVAQVCFLNPGRGEKLRGILRQIQWDVSGAHE

SEQ ID NO: 5314 - protein, 455 aa, Paraburkholderia dipogonis
  source 1..455: note = Related to NZ_SNVI01000001.1
MPLSSLQHVTYAIADAMLAGSPEPASMVERMTLVLGESTRWMDGLARHVAKRFAARWDSVGRREVSAVVAGMPGFVSAWRSEQPPKVLRVLTRPPFQRPPPPWLHDVALPQLPTLGDLAAWLNIEPGDLDWFADRWRVPAHSAATPLHHYAYKAIEKRDGRCRIIEIPKPRLRALQRKVLSGLLDRIPAHESVHGFRHGRNIVTFAAPHVGRAVVMRFDLTDFFASVHAGRVYSAFYAFGYPLAVAMALTALCTNRIPSGRLLATDVRERLQWQERQRYRNRHLPQGAPTSPTLANLCAFRLDLRLAGLARSVGATYTRYADDLAFSGDEELARMADRLCIRVAAIALEEGFGVNLRKTRVMRRGVRQHLAGVVVNSHANVARPEFDALKAMLTNCVRHGPRSQNRDDHPEFRAHLAGRVAHVGMVNAARGAKLRALLESIEWDEESEAKAESNA

SEQ ID NO: 5315 - protein, 370 aa, Burkholderia sp.
  source 1..370: note = Related to FNTG01000001.1
MAALPSFRPPFQRPPPLWLREVALPQLPTLGDLAARLGIEPDELHWFAARWRVPAHSAATPLHHYSYKAIEKRDGRCRIIEIPKPRQRALQLKVLSGLLDRIPAHESAHGFRRGRNIVTFTVPHVGKAVVMRFDLTDFFASVHAGRVYSDFHSFGFSPAVAQVFTALCTKRVPSGRLLAADVRERLPWQERQRYRNRHLPQGAPTSPALANLCAFRFDRRLAGLARSVGATYTRYADDLAFSGDENVARMVERLSVRVAAIAIEEGFSVNLRKTRVMRRGARQHLAGVVVNWHANVGRTEFDALKAVLSNCVRHGLRSQNRDGHRDFRAHLAGRVAHVAMVNAARGAKLRALLERIEWDEESEAKAKSNV

SEQ ID NO: 5316 - protein, 453 aa, Paraburkholderia bryophila
  source 1..453: note = Related to NZ_QLTK01000012.1
MPSSYLQYVANAIADAMLAGPAQPASIVERMVLALGAPADWMSGLARRVSRRFGKRWDSVGRHELSRVIADHAAFVSAWQSDNRPRVVRLLTRPPVQRQVPPWLHGITLPQLPALADLADWLEVEPTELDWFADRWRAPAHAAATPLHHYSYKAIEKRDGRCRIIEIPKSRLRTVQRKVLHGLLDRIPVHDAAHGFRRGRNTLSFATPHAAKAVVVRFDLTDFFASVNAGRVYSTFRDFGYPLAVARSLTALCTNRVPSGRLLEADVRERIDWLERQRYRNRHLPQGAPTSPALANLCAYRLDLRLAGLARSVGATYTRYADDLAFSGDEDLARIAERLSIRVGAIAIEEGFALNFRKTRVMRRGARQHLAGVVVNRHPNLARPMFDTLKAILTNCVRHGPESQNREAHPDFRAHLAGRVAHLAMLNARRGAKLEAIFERIGWEGGEGSGTTV

SEQ ID NO: 5317 - protein, 449 aa, Paraburkholderia terricola
  source 1..449: note = Related to NZ_CP024941.1
MPQSSLQVVTYAIADAMLAGPADPATMVERMTRVLGESADWMTGLARRVERRFGARWDSVEAKHLSKIIAETAGFVAAWRSENRPRIVRVLTRPPVQRPAPRWLRDVTLPQLPTLGDLAAWLDVEPLELDWFADRWRVAAHDATTRLHHYSYKAIEKRDGRCRIIEIPKSRLRELQRKVLHGLLDRIPAHDAVHGFRRGRNTVTFAAPHAGKAVVFRFDLTDFFASVHAGRVYSAIHALGYPLEVARALTALCTNRVPSGRLLAPDVRDRIDWQERQRYRNRHLPQGAPTSPALANLCAFRLDLRLAGLARSVGASYTRYADDLAFSGGNDLSRMTERLSIRVAAIAIEEGFAVNMRKTRVMRHAVRQHLAGVVVNSHPNLERPAFDALKALLTNCVRHGPRSQNRDAHTDFRAHLAGRVAHVTMLNAARGEKLKGIFERIGWDERDQS

SEQ ID NO: 5318 - protein, 430 aa, Paraburkholderia fungorum
  source 1..430: note = Related to CP010026.1
MLAGPPEAAAMVERMTLVLGERADWMNGLARGIAKRFGARWDSVDGKELSKVVAENTGFVAAWRGESRPRVVRVLPRPPVQRPPPPWLHGVALPQLPTLGDLAMWLEVEPDELDWFADRWRVPAQSAATPLHHYSYKAIEKRDGRCRIIEVPKSRLRALQRKVLHGLLDRVPAHDAVHGFRRGRNTVTFAAPHAGKAVVIRFDLMDFFASVHAGRVYSVIRALGYPLNVARALTGLCTNRVPSGWLVAPDVRDRIDWQERQRYQNRHLPQGAPTSPALANLCAFRLDLRLAGLARSLGATYTRYADDLAFSGGEDLARMAQRVEIRVAAIAIEEGFAVNLRKTRVMRRGGRQQLAGVVVNSHPNLARAEFDALKAVLTNCVRHGPGSQNREGHEDFRAHLAGRVAHAGMLNAVRGAKLKAIFGRIVWDDG

SEQ ID NO: 5319 - protein, 447 aa, Paraburkholderia kirstenboschensis
  source 1..447: note = Related to NZ_CAJHCR010000004.1
MSLSTLQTVTNAIANAMLAGPPEPAAIVERMTCALGEPADWMKGLASRVAQRFAARWDSVDPSAISKVVAETTGFVSAWRSETPPRVVRTLIRPPSQRPAPPWLQDAVLPQLATLAELAAWLEVEPDELDWFADHWRVPAQQAATPLHHYSYMVADKRDGRCRIIEIPKSRLRGLQRKVLRGLLDKIPPHDAVHGFRRGRSTVSFAAPHVGKAVVIRFDLTDFFASIHAGRVYSVWRSLGFPKGVARSLTGLCTNRVPSGRLLAPDLREKTDWQERQRYRNRHLPQGAPTSPALANLCAYRMDMRLAGLARSVGASYTRYADDLAFSGGDDLARMATRLSIRVAAIAIEEGFAVNLRKTRVMQRGARQQLASVVVNQHVNVARSEFDALKAVLTNCAKLGVESQNRDGHPDFRSHLAGRLAHVEMVNAARGAKLRRIFGRIVWGRSG

SEQ ID NO: 5320 - protein, 434 aa, unidentified
  source 1..434: note = Related to nan
MNSAFVAENLAAALLLGEWTGRGLLDSALRVVRYREPWLHRFLRRLRRAFPEPPARQEFRALVDWISNDRGFLNRSLDGVFEFVSLTPAMSQSRWPVPQLATVGTLAQWLELTPRELDWFADGQGREAVQPRGPLRHYVYKAIPKRGGRLRLIESPKSRLKAIQRRILDQILSVIPAHDAAHGFCRGRSVVTYAAAHANKDVVLRLDLADFFPSVPASRVHAIFCTAGYPKDVARMLTGICTNVTPRDELPESFGADNRGWTLLQRLLSPHLPQGAPTSPALANLSAYRLDLRLSALAQASGIAFTRYADDLAFSGDEEFARGVLRFYEKACQIVIEEGFAVRPAKTRIMRRGVRQQLAGVVVNVRPNAPRGEYDRLKAILTNCSRHGVGSQNREKHPSFREHLLGRITWLTSLHPERGKKLRARFDRIDWNGG

SEQ ID NO: 5321 - protein, 509 aa, Gemmata sp.
  source 1..509: note = Related to NZ_JAGKQQ010000001.1
MVRENRVRHRSGVTPETFYHLGLQARDSPGASTPPMSRGTGLVDPLAALTFTDEMSTQQRFVRNLAAGMLAGEWTAAGLRESAYRATGHTFAWAPALAKRVLETHSTAPPFPTLLAVLTADAGFQRAFAALASDRNADDRFPVWHLFPVPTPPPLPRPEWAKELPDLPNEPALAEWLGVPLERLLWLADPKGRNTGHRPGSVRTYRARWVPKTHSRARLLEVPIPALMRAQRKVLVGLLNSVPSHPAVHGFRVGRSAITNAAPHCGRAVVIRFDLADFFPSIPAGRVFRMFLTLGYPETVARLLGSLCTTRLPTKDWNARPNPRTDSAEYQTRIRLATRHLPQGAPTSPALANLAAHRLDRRLAGLASACGATYSRYADDLTFSGGEDVRRSASRLARRVALIAAEEGFTLNRGKTRMQGRSERQTVTGAVVNVRPNIPRADFDLLKAILTNCVRHGPATQNRASHPDFRAHLAGRIAHLASVNPVRGRKLWATFDRIAWDADSTQSGQ

SEQ ID NO: 5322 - protein, 453 aa, Gemmata sp.
  source 1..453: note = Related to NZ_LR593886.1
MTTQQRFVQNLAAGMLAGEWTAAGIRESVYRATGRRFAWGPALAKRLLNAHATAPTFPTLLATLTADAGFQRGLTVLASARNADNRFPVWHLFSAPAPPPLPRPQWAAELPDLPNEPALAEWLGVSLERLLWLADTKSRNTGHRPGSVRTYRARWVPKTHGRARLLEVPIPALMRAQRKILAELLNLVPAHPAVHGFRPGHSAITNAAQHCGRACVIRFDLTDFFPSIPVGRIFRMFLTLGYSEPVARLFGCLCTTRLPAEDWNRRPNPRNDSSEYQTQTRLASRHVPQGAPTSPALANLTAYRLDCRLAGLASACGATYSRYADDLTFSGDDTLRRSAARLARRVALIVVEEGFALNRGKTRVQGRGERQLVTGVVVNVRPNIPREDFDQLKAILTNCVRHNPATQNRTNHPDFRAHLAGRIAHVASVNPTRGRKLWATFDRIVWDTNSAQS

SEQ ID NO: 5323 - protein, 452 aa, Gemmata obscuriglobus
  source 1..452: note = Related to CP025958.1
MTANRFVSNLAAALLAGEWSVAGLRTSVYRATGKRFGWTPRFAKRVHTAHATPPTFNELLAFLGRDPGFVRALAALATARYPADRFPVWHIFAPPEPPPRPRPDWASGLPVLPNEPALAEWLGVPVGHLLWLADPAGRNAISKGVRSYRVRWVPKPKGRARLLEIPVPPLKRVQRKLLADLLNHVPPHPAVHGFRPGRSIVTNATPHCGHAIVIRFDLTDFFASVPVGRVLALFLALGYRESVARLLSGLCTTRLASNDWNERPNPLNDGSEHATRARLTSRHLPQGAPTSPALANLVALRLDRRLAGLAAACGATYTRYADDLTFSGGELLRRNAARFVRRVTLIAAEEGFALNRGKTRVMGGGGRQTVTGVVVNQRPNVPRAEFDRLKAILTNCVRHGPADQNRSGHPDFRSHLAGRVAYVAGVNPVRGRKLWALFDRITWPGAHTYPAS

SEQ ID NO: 5324 - protein, 460 aa, unidentified
  source 1..460: note = Related to VGZJ01000033.1; note = Planctomycetes bacterium
MDPQQRFVRNIAAGMLAGEWSRAGLRDAIRRATGREYRWASPLVTRLLAAHIEPPSSIALLDVLVRDTTFAGVLARLAGARTAGDRYPRRTLFAVPGEAIPPAPTWNADLPRWDTEHDCADALGVALPQLLWLADPTGRNPYRRDETLRTYRARWVLKPRGGARLLEVPKPLLRRTQRRLVDLLLNRVAPHPAAHGFRAGRSAVTNAAEHCGRAAVLRFDLTDFFSSIVAGRTFGLFRNLGYPEPVVRLLGALCTTRLPRAVWDVRPHPTADGSDYPAWVRVNTRHLPQGAPTSPALANLIAYRLDRRLARLAAACGATYTRYADDLTFSGGPGLLRAARGLARRVALIAAEEGFRVNRGKSRAYGRGTRQTVTGIVTNVRPNVTRAEFDLLKAILTNCTRHGPAGQNRAQVPDFRAHLAGRVAHVAGVNSVRGRKLWELFDRIVWPVDESSSMIDLKDS

SEQ ID NO: 5325 - protein, 442 aa, Isosphaera sp.
  source 1..442: note = Related to PNKH01000003.1
MPTFDAERFLFSLAGGLRAGAWADADLRAALRGAASDRPVRAPGLVPRLLRRFHGTPGYGELLLFLVNDPGLARAVDRLTWSRPQPGPAKPAMGQPPPRLGTLAIPALATEAALGTWLGVGPDRLRWLADLTGRNRRHPPGPLRTYRHRWVPKADGRARLLEIPRPGLKLVQRKILADLLDAVPAHPAAHGFRPGRSAVTNAAEHCGRAVVVRLDLADFFPSVPAARVSRIFRTLGYPDPVARLLTGLCTTRVPADVWDTRPNPGPADHPARVRFAGRHLPQGAPTSPALANLAAHRLDRRLARLATAVGATYTRYADDLAFSGGNAVRRGAARLARLVAVVAREEGFAVNPGKTRVMTRAGRQTVTGVVVNARPNLPRAEFDRLKATLTNCVRHGPGGQNRGGHADFRAHLAGRVAHLAAVHPGRGRKVWALFDRIAWPAG

SEQ ID NO: 5326 - protein, 443 aa, unidentified
  source 1..443: note = Related to JAFKFQ010000274.1; note = unidentified bacterium
MLDRTRFLFALAGACLREPWTATGLRAALDRAAAGHRVHVPGLAARILGHFPEPPGYGALLAFLVADARLMRALNRPTGRAIPKRGRPAMDSPPPSLAAVQLPPLATEVALAAHLNLDPARLRWYADLTGRNRHHPPGPLRTYRHRWVAKPGGRARLLEVPTFSLKRIQRTILTDILNHVPPHPAAHGFRPGRSAVTNAIEHCGRSVVMKFDLADFFPSVAAARVVRLFRTLGYPEAVARLLAGLCTTRTPADVWKARPNPAADGSDHVSRLRLVARHLPQGAPTSPALANLAAHRLDRRLAGLATAIGATYTRYADDLTFSGDIDLARRSHRLAGLVAEVASEEGFALNARKTRVLRRGGRQTVTGVVVNAKPNLPRAAYDRLKATLTNCVRKGTASQNRENRADFRAHLAGRVAHAAAINPARGRKLWALFDAIAWAEPPP

SEQ ID NO: 5327 - protein, 461 aa, unidentified
  source 1..461: note = Related to JAIEQN010000341.1; note = Gemmataceae bacterium
MAQSARGRFVANLAAALVAGRWDRRVMRAAAAAAVGGKPGWLAPLVRRVHAAYPEKPQFDPVRAFLERDPTLGRVIDRDGPPAVVRVFVPPAEMLPPPTAAGLVELPQLPTEAALAEWLGITPARLLWLADASGRNRKHPPGPLRTYHHRWVPKPGGRARLLEVPVHLLKEVQRDLLERLLDRIPPHPAAHGFRPGRSVVTNARPHCGRSVVIRFDLQDFFPSVSAARVRAIFRTFGYPEAVARLLTGLCTTRLPADVWDARPNPAADGSDHPAWQRLAARHLPQGAPTSPALANLAAFKHDRRLSKLAAALGADYTRYADDLTFSGSVELARGAKRLATLVAVIAGQEGFAVNHRKTRVMRRAGRQEVAGVVVNARPNVRRAEYDEIKAILTNCVRHGPAGQNRANHPDFRAHLTGRVAHLAAVHPAHGRKLWALLVRIEWRAAKVAGGEQAETATDNNR

SEQ ID NO: 5328 - protein, 450 aa, unidentified
  source 1..450: note = Related to JAIEQO010001050.1; note = Gemmataceae bacterium
MAKTARGRFLDNLAAALVAGRWDRRVMRAAAVAAVGGKPRWLAPLIRRVHAAFIDKPHFGRVRAALEQDEQLIRAVAADGPPPVVRVFVPPAEMLPPPAAAGPVELPQLPTEAAVAEWFSTDPGKLLWYADPAGRNRQHPPGFLRTYRHKWAAKPGGRSRLIEMPTESLKRHQRWLLISILNRIPPHPAAHGFRTGRSVATNAGPHCGKAVVIRFDLADFFPSVSAARVRAIFRTFGYPEVVARLLTGLCTTRLPADVWNARPNPAPDGSDHATWQRLNARHLPQGAPTSPALANLVAFKLDCRLSKLAAALGADYTRYADDLTFSGGDELARGSKRLATLVAVIAAEEGFALNHRKTRVMRRAGRQEVAGVVVNTRPNVRRAEYDTIKAILTNCVRHGPAGQNRGNHPDFRAHLTGRVAHVAAVNPARGRKLWAILDRVTWEAHEPAAR

SEQ ID NO: 5329 - protein, 439 aa, Limnoglobus roseus
  source 1..439: note = Related to CP042425.1
MLDTTLANLLDAFLAGSWTEDRLVARAKAALGRSHRFIRPFVRRVLAAFPAPTHSDRLRVFALADEEFRKGWRRAEPHTAKRFFPVPVMAPHQAARGWLIPEITTAEKVCEVLRIDRHQLDWLADCAGRNHRESSPKLHHYRYRWIPKPSGRSRVLEIPKPILKQVQRNVLGQILDAIPPHAAAHGFRIGRSILTNAVPHSGRAVVLRFDLAIFFSSISADAVTAIFRTAGYPPDVARQLTGLCTTRLPKAVWDQRPRPAADGSDSLEERHLRNRHLPQGAPTSPALANLVAFRLDRRLDGLAKSLDVTYTRYADDLAFSGGIDLTRRSEKFRNAVARIVSEEGFRLNPLKTRVMPQSVRQTVAGVVVNIRTSIPRAEFDRLKAVLTNCLRHGPESQNREAHPNFRAYLAGKLAHVARLNPTRGRKLLALFDQIRWQSA

SEQ ID NO: 5330 - protein, 447 aa, unidentified
  source 1..447: note = Related to JAFATI010001257.1; note = Planctomycetes bacterium
MSTRHSIARNLAAAFLTGTWSLDGLVQQGARACGKRERWLRPLARCVLAAFPGPPAGIDPEALARWMEENPVFRTAWAKYGREGRFPLGQVFWVPPRMTPRTGAPATWRVPPLTTSGALAEWLGLKPKELDWFADCHGGEEKLPPGPLRHYTYRWLVGRSRKLRLLEMPKQRLKALQRRVLHDLLDHLPCHEAAHGYRRGRSVATYVGPHTGRRIVLHLDLRDFFPSIRSSRVQALFRTVGYPFPVARLLTGLCTNVVPGEVWHSSPVRGEPGEWNRSPHYQVPHLPQGAPTSPALANLCAYRLDCRLTGLARAVGAAYTRYADDLAFSGGRDLERSTRGFQVQVARIALEEGFEVHTRKTRFMRQGVRQQLAGVVLNEHANLRREEYDRLKAILFNCVRHGPGLQNREGRPDFRESLAGRIAYVQMLNPSRGRRLRELFDRIAWEK

SEQ ID NO: 5331 - protein, 422 aa, unidentified
  source 1..422: note = Related to JACPPF010000025.1; note = Planctomycetes bacterium
MATFHVDPDFVEQLAATLRAGNWVRLALKSRVWFTFPDDRALTAKVVGQVWEHFGGSRPSLKQLTKFLKKAISALPHEPEQRAVPVEPAPMTARWPVPVLATPVQLAHWLNVPLTRLEWLADIKEWTLRQADAKLRHYVNVWVPRRRGKPRLLEAPKPHLKAIQRRILHEILDHIPPHDTAHGFRTGRSIVSYARPHVGKQMVLHFDLRDFFASVSAARVRAIFRTAGYPADVASLLTGLCTTRTPDDVTVAGIHWRRRHLPQGAPTSPAFANLAARRMDVRLSALAEKLGATYTRYADDLAISGGHDLERAVRRVNVLVGIIAGEEGFELNFRKTRFMRQSVCQQVAGVVVNVKTNCRREDFDRLKAILHNCARHGPACQNRERHPDFRRHLLGRVAHLRHLNPARGARLQALFEHIDWTR

SEQ ID NO: 5332 - protein, 456 aa, Sandaracinus amylolyticus
  source 1..456: note = Related to NZ_CP011125.1
MTEWTFDADDLDEDEEDADPPPGPAELRLARALALAFLGTDGRRRAMIEAALATLHVPDEARARAWIGALVALVRRTFDPLRRASLDELTTTIAHGRALARRDRGVHVVRWVATPGEMRAPRWDVPRIDTVGDLARWLDVEIGELDWLADRRAMLVRARVGPLHHYVRTWVPKPSGGARLIEAPKARLAAIQRRVLREVLERVPMHDVAHGFRRGRSVATFVAPHVGRAVVVRVDLEDFFASVTRGRVIGIFRSAGYPEEIARTLAALCTTRTPASEMRGIEHAVRARLRVPHLPQGAPTSPALASLAAFRLDARIEGLARAVGARCTRYADDVALSFERDRSHGAIDRVIARIAEIAREEGFGVASHKTRVMRRGARQSLAGVVVNERPAVAREEYERLRAILHRAATRGPSPDELGAHRDLRAHLAGRIAWIAQWSERRGAKLAAMLARIDWSA

SEQ ID NO: 5333 - protein, 455 aa, Sandaracinus amylolyticus
  source 1..455: note = Related to NZ_CP070225.1
MTDSTFDDWEDDDDDPEDLPPGRRAWRLSRALALAFLGTDGSRRAMIDAALAALRVPHEARARAWLGGLVALVRRTFDPLPRASLDELTTTIAHSRALARYDRDAEIVRWVVTPGAPLETRWDVPRIDTVGDLARWLEVEIGELDWLADRRAMLVRAPLGPLHHYLRTWVPKPSGGARLIEAPKSRLASIQRRVLREIVERIPMHDVAHGFRRGRSVATFVAPHVGRAVVVRVDLEDFFASVTRGRVIGIFRSAGYPEEVARTLAASCTTRTPSREMRGIEHAVRARLRVPHLPQGAPTSPALASLAAFRLDARVEGLARAIDARCTRYADDIALSFERPQSHVAIDRVIARIAEIAREEGFRVAPHKTRVMRHGARQSLAGVVVNEKPAVPREEYERLRAILHRAAIEGPRAEDLAAHRDLRAHLEGRIAWIGQWSEHRRAKLAAMLARIEWTP

SEQ ID NO: 5334 - protein, 430 aa, unidentified
  source 1..430: note = Related to JACPFM010000079.1; note = Deltaproteobacteria bacterium
MTRADLAARAIADALLDGEWALEPMVQRLGTTFGARRAWMTKLARRALSLFPRAPADARDLLARTARTLPGFPAACRARVRHWAIPEPRMGRVRWPVPTIETAADLSAWLGVDAAALAVLADRRGLARDADPKMRHYTYEWIAKRTGGRRLLEAPKQRLKAVQRRILHGVLDAIPAHDAAHGFRAGRSVVSFARVHVGAALVLRVDLEAFFHSVFAGRVYGIFRGAGYPEDVARTLTALCTHRSPRDVLAGAPRDLVGDRPRSLQRLRTPHLPQGAPTSPALANLAAFALDVRLDALARSWGARYSRYADDLVFSGRVAQPQRLVAAIDHIVRDEGFLIARHKTRLLRASTRQEIAGVVVNQKTSVRRDEVDRLRAILHNCARTGPAAQNRDGHPDFRAHLLGRVAWVEQVSPDKARRLRALFDHLRWDT

SEQ ID NO: 5335 - protein, 440 aa, unidentified
  source 1..440: note = Related to JABFXX010000467.1; note = Kofleriaceae bacterium
MTWLVREFAGALLAGPWERRPMIARLAYVTNLPEAGWIVKLVAAVLRKHGEPPDHEALTDWLYSHRPLQRVLVDPEIRIRRWLEPPLEMADSPWDVPPLGSRKELATWLGLDVQRLEALADERGRVREAREQRMRHYRYTWIAKRAGGHRLLEAPKPRLRAVQRLVLDDIVAKVPPHDAAHGFRAGHSVVGFAAVHVGREVVIRVDLHAFFASVSRPRVAAIFRSAGYPREIAGVLAALCTHRTPRDVLAAAPSREWSELAKLRGAHLPQGAPTSGALANLAAYRLDVRVAALAAAIGASYTRYADDLVLSGPRALARAASSIVGRIGAIAHDEGFALNFRKTRVMTASDRQRITGLVVNEKLAVTRDEVDRLRAILFNCARTGPAAQNREGHADFRAHLLGRISWVSAVDRGKGDRLRALFDRIRWDEAPADATDEDVR

SEQ ID NO: 5336 - protein, 410 aa, unidentified
  source 1..410: note = Related to JADJMO010000033.1; note = Myxococcales bacterium
MKWLEPALARTVAEALADALPGSREDREARCLDVLGACDEEALASLLERVPPALGWRALVAWILGDDAFGRLLAGGVAVEPPRAMAPSRFEVPSLDTEGDLAAWLAVTPRALEAFTDPTDATRRAPRGPMRHYTHRWVGARLIEAPKPRLRAIQRRILQGVLDAVPPHDAAHGFRRGRSIFTSAAPHVGKPAVLRVDLRRFFQTIHLARVVAVFSALGYPRAVSRAFARVCTHAVPDDELVGQPFLTRQRLRTRHLPQGAPTSPTLANLAAHGLDVRLSALARAAGLAYTRYADDLVFSGDVAPGFPSRVASICAEEGFPVATEKTRLRRASDQQRVVGLVVNDHLGVARVERDRLRAILHNCARSGVNAENRAGHADFRAHLEGRVSFVEQADPRQGARLRRLFCTIPW

SEQ ID NO: 5337 - protein, 425 aa, unidentified
  source 1..425: note = Related to JAGQJB010000072.1; note = Myxococcales bacterium
MKRRDPSRDIALAALGETWSPAAIEGALADLFASEQRWMRAMARRMTRRFGEAPPLDVLEAFVRADRDLRQARRLLVRHPSLAMPPMPPSRFGAPPIASMGDLATLLEVPVEDLDWLADRRGTTRDAEAPVRHYRARWIPKRSVGWRLVEAPKARLRRAQRCLLDRVLASVPPHEAAHGFVPGRSVLDHARAHVRQAVVVRLDLEDFFASVPAAQVRAVFRTAGYGEDVAVALTALSTTRTPPALLRSPWVSRFETRQRLAHRHLPQGAPTSPWIANLAAYRLDLRVSALARSLGATYTRYADDLVLSGDEGFARGVERLLPRLGAIAIEEGFALQHRKTRVTRAGASQRVCGLVVNEGARVSRRERERLEAILFNCVKHGPASQNRGDHPRFRDHLLGRIAWVEQAHEPHAARLHALFARIEWP

SEQ ID NO: 5338 - protein, 532 aa, unidentified
  source 1..532: note = Related to JADJOY010000023.1; note = Deltaproteobacteria bacterium
MAAAPEHVARAIADAFLCGPWTALGLRASGAELFARRARWLDPLIRATLRAFPDPPRASRDALARFLGPHVERLTARLEPPRWPPVRRRLVPAPAMAERRRWPVRELATTAELARWLGLTPGELDWFADRHGTAARAVDPRLVHYRETWIPKRSGVGERLLEIPRPRLRAIQRAILDEILVAIPPHAAALGFRRGRSALDHASRHAGRAVLIRLDLEDFFAATPAGRVYGTFRAAGYPAEVALTLTRLTTRRASPDARRRARRWTPAHGDGSGGTLQSEGGRTSGRLAAAHLPQGSPSSPALANLAAFHLDVRLAALAEAIGARYSRYADDLAFSGEDTLERAAERLLPRIAAIVIEEGFRPRFRKTRIERATGRQTLMGLTVNVRPAVPRAERERLRAILTNCVRHGPASQNRERHADFRAHPRRARDVGRARERRSRAAAAHAARRDRLDALSQTEATQQEPAPACGDPSRGDGAPRATKTIGATGVPSPVAGSSDRDRSDRRCDTETCRWRGTRRPYPAGGRAGTCPTE

SEQ ID NO: 5339 - protein, 442 aa, Labilithrix sp.
  source 1..442: note = Related to JAHBWB010000013.1
MSPTIVADALAAAFLDGAWSAPALARRGARALGQSTRWLPALARRVVAAFPDGAPRDRFEALATLLARDAAVRKAGRPDAPWRLVITAPTLAMRDAHPEWRLPRLHTAGDLATWLGLEIGDLLWFADTRGLSRRRRAVALDHYHRRWLPKRSGGARLVEAPKRWLKEVQRRILRELVERIPPHEAAHGFRRRRGVLSHAALHAGRDVVLRMDLEDFFVSIPASRVFAVFHAAGYPLEVARLLTGLCTTRAPSDPGAPMPATPTRAELEARHRARERYAERHLPQGAPTSPALANLCAWRLDVRLSAAARTAGAVYTRYADDLVFSGDDRFARWPAARFAYVVGGIAIEEGFNVQHRKTKLMRAGTRQQVTGLVVNRSAAIPRRDFERYKAILHNCVLTGPDRQNRDGRPDFRAHLEGVVAWVTHVQPARGAKLAKLLDAIRW

SEQ ID NO: 5340 - protein, 442 aa, unidentified
  source 1..442: note = Related to MKVQ01000030.1; note = Myxococcales bacterium 68-20
MDRRIVGEALAAAFLDGTWSPQPMARRGARAIGRPGRWLPALARRTVEAFPEGPPVDRFEDLARSLAEDKAVVRACATPAPWHLAFVAPALAMRDAHPSWGLPRLDTAGDVAAWLGLDVGDLLWFADTHGLARHRRDPRLEHYVRRWLPKRSGGARLVEAPKKWLKDLQRRILHELVERIPPHDAAHGFRRAHSILTHAASHAGREVVLRMDLEDFFVSIPAARIFAIFRAAGYPAEVARLLTGLCTTSSPPDAGAPVSAAPTVAELQARHRARARYASRHLPQGAPTSPALANLCAYGLDVRLGAVARSAHAVYTRYADDLVFSGDERFVRWPAKRFGILVAGIALEQGFTVQHRKTKLMRAATRQAVTGLVVNRAPSIPRRDFERYKATLHNCVRFGPESQNREGHADFRAHLEGVVAWVRHVQPERGARLAQLLDAVSW

SEQ ID NO: 5341 - protein, 443 aa, unidentified
  source 1..443: note = Related to JABFRG010000265.1; note = Polyangiaceae bacterium
MRHETLVVQAVASAMLADGAWSSADLVTRGAMVFDKRPRWMVAAVSAVMATHPTREGVTVAELVALLSSRPGVMRAIRRAHAVVRRWAIPLVTLVPPRWPVPAFASANALASWLELSPAELAWFADVKGLGRDPELDEPLRHYRVHWVPKRRGGVRLLEAPKPRLRDMQRRMLREILDAIPPHDAAHGFRRGRDARSHAALHEGQAVVLRVDLEDFFLSISLARTVATFRSAGYTDDVAHLLGRLCTHRTNASCPLPVLGAYPTEADLRARRNAERLARALHLPQGAPTSPAVANLCAYRLDVRLEAAAASVGATYSRYADDLVFSGGEDFAARAHRFAALVGGVVLDEGFRVNHRKTRIMGRGARQLVGGLVVNAHAQVPRASFDTVKAIVRNCIQYGPASQNRDSHPDFRAHLRGLVGWAGGAADSPRRAKLDALFRQIVW

SEQ ID NO: 5342 - protein, 444 aa, Labilithrix sp.
  source 1..444: note = Related to JAHBWD010000001.1
MKTKVPERVAEALASAFLAHGAWTRDALAERGRVTLAEDARWMRGVVDRVLATFPEPPRARFSALARFIASVSIAAPRERRAPRWRPKVARWLEPEIAMGVRRWDVPAIATPGDLARWLGLSPAECDWFADGRGLERLRRPEALDHYRRRWVAKRRGGFRLLEAPKARTKAVQQRILREILDRVPAHDAAHGFVRGRSVRTHAALHVGRAVVVRLDLEDFFLSISAARVAGVFRAAGYPDDVAWSLTLLCTNVAPPSGLVLGRDATHDDVARLRRAEMRARTRHLPQGAPTSPALANLCARGLDVRLTALATKLGAVYTRYADDMTFSGDRRLARSSSRLEAWASAIASDEGFTVNHRKSRVMRAGVRQLVTGVVVNTRLNVARDAYDRLEATLHNCRRLGPGSQNRDGHPDFRAHLVGRVAHVKSLHPARGEKLAALLEQIAW

SEQ ID NO: 5343 - protein, 444 aa, unidentified
  source 1..444: note = Related to JAGQIZ010000167.1; note = Myxococcales bacterium
MASYLEHVSRALGSAFMMGPWTRLALMGLGERVLGERPPWLGGLVSRTLSALPEPPPTVEAVAAVLREHRAFRNAFADQASRPRVRRWLHAPPSAPAEAPWPVPPLRTFDDLARHLELPDEQLSWLADPRGVLRRAPSERLHHYHRDFLPKRAGGHRLVETPKPRLKAVQRRLLRTIFDHIPPHPSAHGFVKGRSPITHAGQHAGRAVVLRLDLEDFFTSVTYARVYRVCRFAAYPDEVARLLAGLCTTSLPPPIWRRAPRPDHPADLPAYQRQRERALRRHLPQGAPTSPSLANHCASRLDRRLHAAAERAGAHYSRYADDLVFSGDDGFARSVTRFIPFAAAIAMDEGFVVNFRKTRVMPRNRRQQVAGLVVNAHPNVSRQTYDRLKAILTNCARHGPASQNRDGHPDFRSHLRGLIAWIDSVAPKRGAELRALFEAIEWKG

SEQ ID NO: 5344 - protein, 442 aa, unidentified
  source 1..442: note = Related to JACQYO010000099.1; note = Deltaproteobacteria bacterium
MTLDDVVRAFAGALLAGEWTESTVRERAVEALGAKPRWLWPLVRRVVRLGSPPRRRQVELAIRASSAFVGAWKRGLVQPTRALEVRAVLSSPRMGPVRWAVPSLGTEGELARWLGLGVSDLFWLADPLAGERRARVERIRNYVYTWVPKRSGGVRLIESPKPLLKTLQRRILREIISLVPVSDSAHGFVLGRSTLTHASSHISQRVVLRLDLRDFFSTVSAWRVAAVFRTAGYPENVARLLAGLCTNSAPEAVLQLAGPSLSRFQKQRLRSAHVPQGAPTSPAVANLCAYRLDRRLAGLARVSGTIYTRYADDLVFSGDFTRSKDFDRPRPSIDRFVARAHAIVLEEGFTPHFEKTRVMGCGRRQEVTGIVVNRQPNVSRADLEVFEATLYNCRRSGPSTQNRTGHPDFRAQLAGRLGYVEMVLGERARWLRTLFEQIDWSR

SEQ ID NO: 5345 - protein, 393 aa, unidentified
  source 1..393: note = Related to BJHF01000062.1; note = Deltaproteobacteria bacterium
MARTLSRRPPPMEADRDFTERLARFPGAKEAVLKRLPIRRWFVVTPVQRPGRWPVPLLPTPSDLATALRLDVDALDWFADNRGLEAHTRSRALRHYHYRWLAKPTGGARLVEAPKGRTVDIQRWILRNLLDSVPPHPAAVGFRRGFSTLDAAAPHVGREVVLSLDLEDFFASVSAARVAATFAALGYPRPVAYCLSGLCTTRVPAAILAEQPRGGDLPAAWRQRRRLRDAHLPTGAPTSPALANLAAFALDTRLAAAAAAVGATYTRYADDLSFSGDAEFSRRARRFSVLVGAIAIEEGYRVNLRKTRLAGKGARQEVVGVVVNVRPALARDRWDRLRAILHNCQVHGPSTQNRDGHEDFRAWITGTVAAARAIDAKRGGRLLEMLAGVDWGR

SEQ ID NO: 5346 - protein, 441 aa, unidentified
  source 1..441: note = Related to JADZFZ010000151.1; note = Deltaproteobacteria bacterium
MNRSDRTSLARDLAATFLAGPWERREMARRAAASFGLPRSPRWLSTLAREVVRVFGPDPPHGRDGRIAALIAPRLRPLRRAGIARRPALVHPCLVPARMGTAAAPVLRERGLPEVATPGELAAWLGLDRDRLAWLADVRGLSRRTHDGPLVHYRYRWVPKRSGGARLLEIPKPDLAAAQRKILRELLDRVPPHASAVGFRKGRNVLDHASAHAGAAVVLRMDLGDFFASVAATRVHAIFVALGYPAAVSSLLTGLCTHRTSMFVRHASTDHAAWSRLRERHLPQGAPTSPALANLAAFGLDVRLAALASKAGAAYTRYADDLAFSGGTGFARSAAAFHVLACAIVIEESFAPNPRKTRIMRASSRQQITGLVVNAKPSLPRDELDRLKATLHNCVAHGPASQNRDGRADFRAWLAGKVAWVASVHPARGARLRAMLERIRW

SEQ ID NO: 5347 - protein, 442 aa, Corallococcus interemptor
  source 1..442: note = Related to NZ_RAWM01000011.1
MSERNVVAKALASAFLAAPWTRAGLIANGAEVVGGRFPWLASLARSTLRFFPRPPHDRLELLAEILATRPALKQACANPTAPVRLLRWLTAEPQMGRAPWPVPALPTQADLAAWLGVTDAQLDWLADGKGLEHRTSPGRWRRYGYTWIPKRSGGQRLLEQPGEELARLQRKVLHCILDRIPPHEAAHGFVKGRGIRGFVEPHTRQAVVVRLDLEDFFLSVRPPRLWGVFRAAGYPDGVAGALVGLCTNRTPGAVVAQARKPTHAQEVESRWLLGRRLESRHLPQGAPTSPALANLAAYRLDVRLSALAGVLGMRYTRYADDLAFSADAARPGSIRRLLRSVRRIVRDEGFTVREDKTRVMSKGHQQWLAGVVVNEHPNLRREDYDRLKAVLHLCRTRGPASQNTGGHPDFRAHLLGRIAWVTYLHPARGARLRALFDRIAWD

SEQ ID NO: 5348 - protein, 442 aa, Corallococcus sp.
  source 1..442: note = Related to NZ_CP079946.1
MSGRTVVARALASAFLAAPWTVSGLVAKGSEVVGGRFSWLRSLARSVLRFFPRPPHGRLELLAEVLATRAALKQACANPEAPVRVVRWLTSEPEMGRQPWPIPALSTQADLADWLKVTSAQLDWLADGMGREHTSSPGRWRRYRYTWIPKRSGGERLLEQPGEELARLQRQVLHGILDRIPPHEAAYGFVKGRGIRGFVEPHTGQAVVMRLDLEDFFLSVRPPRVWGVFRAAGYPDGVAGALAGLCTNRTPGAVVAKARRADDARKVDARWLLARRLESRHLPQGAPTSPALANLAAYKLDVRLSALAAALGMHYTRYADDLAFSGSDARAGSAHRLLRCVRSIVRDEGFTVREDKTRVMHQGHQQWLAGVVVNQHPSLRRADYDRLKALLHLSRTRGPNSQNTGGHPDFRAHLLGRIAWVTHLHPARGARLRAIFEQIVWD

SEQ ID NO: 5349 - protein, 442 aa, Myxococcus sp.
  source 1..442: note = Related to NZ_VIFM01000112.1
MSKRIAVANALASAFLSGPWTTAGLVERGAEVIGGRTPWLLSVVRSTRRFFPRPPHARFELLAEILATRPALQRACGNPHAPVKILHWVATEPEMGRQPWPVPSLPTQAELTDWLGMTDAQLGWLADARGLERMTPPGQWRRYRYTWIPKRSGGERLLEQPGLDLSRLQRKVLHGILDVIPPHEAAYGFVAGRGVRGFAEPHVGQAVVVRVDLEDFFLSVKPARVWGMFRAAGYPDDVATTLAGLCTTRTPSGVLEQARRAADGEALTARWRLARRLESRHLAQGAPTSPALANLAAYRLDVRLSALASALGARYTRYADDLAFSGGDALARSTGRLLRCVARIVREEGFTVRTEKTRVMRRGRQQRLAGVVVNEHPSVPRADYDRLKAILHLCRTRGPASQNTGSHPEFRAHLLGRVAWVSQLNPTRGARLRAIFEQIAWE

SEQ ID NO: 5350 - protein, 449 aa, Myxococcus sp.
  source 1..449: note = Related to NZ_CP071091.1
MALGDSAVSNRQSVASALASAFLAGPWTYEGMVERGAHVVGGRAPWLLAVVRGIRRFFPHPPVARMELLTELLATRPALIKACRNPAVPVHLHRWLIPEPSMGQRPWPVPELSTQAEVARWLGVTDAQLGWLADGSGFERTSRPGQWRRYRYVWIPKRAGGKRLLEQPGVDLGRLQRQVLHGLLDLIPPHDAARGFVRGRGVRDFAEPHVGQAVVVHMDLEDFFHSVRPSKVWGVFRAAGYPDSVTEVLAGLCTNRTPGTVVEEAPRATHLGEQKARWRMTRRLTARHLPQGAPTSPALANLAAYRLDVRLSALAAALGARYTRYADDLAFSGGASLLQRPLRLVRCVAAIVREEGFAIRADKTRVMHQGQQQRLAGVVVNAHPTVPREDYERLKAVLHLCRTRGPTSQNTEGHHDFRAHLLGRIAWVSHLHPSRGARLRATFDRITWD

SEQ ID NO: 5351 - protein, 444 aa, Myxococcus fulvus
  source 1..444: note = Related to NZ_FOIB01000009.1
MSTRHPVAAALASAFLAGPWTRAGLRERGAHVVGGRPRWLVPVVRGILRYFPRPPHARFELLTELLATRPALIKACGNSAEPIRIRHWLDVEPQMSRRPWPVPELTTQAALAQWLGVTDAQLGWLADGSGFERTSRPGQWRRYRYVWIPKRTGGKRLLEQPGLDLARLQRKVLHDILDVIPPHAAARGFVRGLGVKDFAEPHVGRAVVVRVDLEDFFHAVRPAQVWGVFRTAGYPDGVVNALAGLCTNRTPGAVVEQARRAESAQELDACWRLSRRLSARHLPQGAPTSPALANLAAYRLDVRLSALAATLGARYTRYADDLAFSGDEVLARRVRRLLTCVTRIIRDEGFTVRQGKTRVMHQGQQQRLAGVVVNAHPTVPREDYERLKAVLHLCRTRGPESQNTEQHPDFRAHLLGRIAWVEHLHPARGARLRATFERIPWAPE

SEQ ID NO: 5352 - protein, 443 aa, Corallococcus macrosporus
  source 1..443: note = Related to NZ_CP022203.1
MSERRVVAQGLASAFLAGPWTLKGLVERGTEAVGGRAPWVRSMARSAMIFFPRPPHARLELLAEVLASRPVFPKGFADSSGRARIVRWLTSEPRMDRQPWPVPSLPTQADLADWLGVTGAQLDWLADAPGIERTSKPGRWRRYRYTWIPKRSGGERLLEQPGLDLMQVQRKVLHGILDRVPPHDAAHGFVAGRSVRSFVEPHAGQAVVVRVDLEDFFFSVRPARIWAVFRTAGYPDGVTNALAGLCTNRTPQAVLAQARQPESVSEVDARWRLARRLESRHLPQGAPTSPALANLAAYRLDVRLSALATAMGARYTRYADDLAFSGGDALSRRTHKLLRYVSQILREEGFMTRAGKTRVMRQGAQQRLAGVVVNAHPSVSRADYERLKAILHLCRTRGPASQNTEGHPDFRAYLLGRIAWVAHLHPARGAKLRATFEQVVWAG

SEQ ID NO: 5353 - protein, 442 aa, Myxococcus xanthus
  source 1..442: note = Related to NZ_CP068048.1
MSEQRVVAQALASAFLAGPWTLKGLVERGTEVVGGRAPWVSSLARSAMIFFPRPPHARMELLGDLLASRPAFMRGCTDPSARARIVRWITSEPRMARQPWPVPSLSTQAELAAWLGVTGAQLDWLADVPGIERTSSPGRWRRYRYTWIPKRSGGERLLERPGLDLLLVQRKLLHGILDHIPPHDAAHGFVAGRSVLGFAEPHARQAVVVRVDIEDFFFAVRPARIWAVFRTAGYPDGVVSALAGLCTNRTPSAVVSQARRPDSLADASARWRLARRLESRHLPQGAPTSPALANLAAYRLDVRLSALAEAMGARYTRYADDMAFSGGDALARRTHKLLRYVSQIVREEGFTPRTGKTRVMHRSTQQRLAGVVVNDHPSIRRVDYERLKAILHLCRTRGPASQNTEGHPDFRAHLLGRIAWVAHLHPARGAKLRATFDQIAWD

SEQ ID NO: 5354 - protein, 449 aa, Myxococcus sp.
  source 1..449: note = Related to CP012109.1
MACESAMSERRVVATALASAFLAGPWTIQGLTERGLEVVGAPSPWVASLARSAVRFFPRAPRARMELLADLLATRAAFQRGFEDPEARARIVRWRVSEPRMARQPWPVPSLPAQADLADWLGVTSAQLDWLADVPGIERTSPPGRWRRYRYTWIPKRSGGQRLLERPGLDLACVQRKVLHGILDRIPAHDAAHGFVSGRGVRSFTAPHVGQAVVVRLDLEDFFLAVRPARIWGVFRAAGYPDGVVRALAGLCTNRTPGAVMARAPTPTSLATVAARWRWTRRLESRHLPQGAPTSPALANLAAYRLDVRLSALAAAMGARYTRYADDLAFSGDASLARRTRRLLHLVGLIVREEGFTPRAGKTRVMSQGTQQRLAGVVVNARPSIPRADYDRLKALLHLCRTRGPDSQNNTGHPDFRAHLLGRIAWVSHLHPTRGARLRALFEQIAWTA

SEQ ID NO: 5355 - protein, 419 aa, Pyxidicoccus sp.
  source 1..419: note = Related to NZ_JAAIYA010000009.1
MHERAVTALGQHFQWLTGVVRNVRRGFHRPPVDAPDTLARYIAHLPSFRQAMAHPDTRPRIRHWLVAPTDMGRMRWPVPALPTTGELAAWLGLSDEDLDWLADRKGYSHSARDTRLLHYQWRWVPKRTGGVRLLESPKARLKALQRQVLHAILDAIPPHESAHAFQQGRSVLTFAAPHVGQHVLLRMDLEDFFTSISAGRVFGVFRTAGYPEAVSSTLASLCTHALPLLVLRDMPRPASVEDIDAHWRARARLSSPHLPQGAPTSPALANLCAWGLDVRLSTLAASMGVRYSRYADDLVFSGGEDLSHALERFRHLVETVIRDEGFVPNVRKTRVLRQSVRQQVAGVVVNARPNVPRADFDTLKATLTNCIRQGPSTQNHTGHPDFRAHLVGRVAWVASVHPQRGARLHALLDAIDWSR

SEQ ID NO: 5356 - protein, 447 aa, unidentified
  source 1..447: note = Related to JADYYK010000281.1; note = Deltaproteobacteria bacterium
MIEPQAARAILAEAFLGGDWSADGLLQRALEVVAEPAPRQSLRALIKLVLGRFPATPPLRRRDLEEVIASSRSFSKATRAQRLRVWRPWLRSPVMTPLAGAPTSWPVPALPTTTELAAWLGLDVDALEWFAGTHGRARRAPPGPLGHYTYSWAGKASGGYRLIEAPKARLKALQRRVLDGILAEVPVHPAAHGFCRGRGVLSHAAPHAGQRLVMALDLRDFFASVRASRVLAIFRTLGYPEATARLLTGLATHTVSALVWASAPPPRDAAEASARFHAGRFFQSPHLPQGAPTSPALANLAAFRLDLRLTALARAADATYTRYADDLAFSGGERFARGAERLFSLAAQIIFEEGFRLNAGKTRLLGQGMRQRLAGVVVNAHPNLARRDFDQLKATLHNCRRDGAQAHDRDGLGAGFRAHLLGRVAWAEQVNPARGGKLRTIFDGIRW

SEQ ID NO: 5357 - protein, 639 aa, unidentified
  source 1..639: note = Related to DOEP01000754.1; note = Planctomycetes bacterium
MAGEVSPGLGKLSGGDYEGLELVRARVEFASGVRWFHPGELDRVHPHVEAALVRHAITRDLIAAGNATRLEQSLEAFWEGRQEFYRTPGLLDELWLLHRGPAPTELGELFDAPRAELLAIVPQLAPPLPQLPRETRLLEAEELHAEAWKQVTPIGELEEDEDWSSEWERAAPLGALVPPRTRADYLADDQDDDDPDDDEEWELRRRRKQLAEAASALCQAFLSAEWSADDLLDRGQRTLGTSEPWLEELVDRVLAAFPARPHPEDEDLVLFLAEDEALHEQLLEGSLVVWTRFFVPPQMRADRRFPVMPLEGAPDVERWLRIGTGDLQWLADQERWLYRHPSGPLQHYHYHWLPKRSGGRRLVEAPKELLKSVQRQILRDVLGPVPPHEAAHGFCRGRSVRSYAEPHAGQELVLGFDLREFFPTIRAPRVSALFRALGYPSGVAQLLSDLRTTVTPSDVLEEGPLSGGARGRLEQRHLPQGSPTSPALANLCAYGLPVRLSAAAAAVSARYTRYADDLAFSGGADFLRQASRFRYLVMRIAAEEGFEINPTKNRWMRPQRQQRLTGLVVNVRPRPSRAEFDRLKATLHNCGRHGPASQNRAGLPDFRAHLAGRVSWFEQTDPVRGERLRELFHQITWET

SEQ ID NO: 5358 - protein, 440 aa, unidentified
  source 1..440: note = Related to JAHBXY010000029.1; note = Planctomycetes bacterium
MNVDEVARGLAAAFLAGDWLQEGMVARGREALGGRFGWLPGLARRAREAFLDPPLHDPEALEDLLAADARLQAALRRRARQGHPPLVVRRLFLHHTAMRSERRFAVPSFDTEADLARWLGLALTDLDWFADRKAWLIHAPQGPLQHYHRTWIRKRGGGLRLLEAPKATLKAMQRRVLHGLLAHVPPHDAAHGFRPGRSVVTHAAPHAGKALVLRLDLRDFFPSVPAGRVAALFRSLGYPRSVAGLLTGLVTTRTPLATLEGVDLDREAEDALRRSHLPQGAPTSPWLANLCALGLDVRLSAAAAKVGADYTRYADDLAFSGDEAFRRVAARFRTLVHAIVLGEGFDLRPEKTRWMTPSVRQRLTGLVVNQRPRPSRAEFDRLKATLFNCARRGPTAENREGHPDLRAHLRGRVAWFEHTDPARGARLRALFERIAWAPAR

SEQ ID NO: 5359 - protein, 433 aa, Pseudoduganella sp.
  source 1..433: note = Related to JAJTCO010000005.1
MMLATVASPASLIAACQRVFGTTPAWVPRVCFALIDRTGDNFHCFSRQELADILLQLLFHGPQTERIALPPVRRYCTEPARQAPRPAWLAALALPDLPSVGALAGWLGEPVGALAWLADQWRSEDGNRSRLQHYHYRWVPKRSGGVRLIEIPKARLRRIQHKILRQILDRVPPHPAAHGFLRGHSCLTHAALHAGQEVVIRMDLKDFFPSIQYARIHALFEKLGYTTNVAGTLARVCVNRTPPSAIRDQAAGSLSWPERHALKSPHLPQGSPCSPALANLCAYRLDLRLASLARPLGASYSRYADDLVFSGGPDFARSAERFRVRAAAIALEEGFQVNTRKSRVMRKGARQQVTGIVVNAHPNLARSEYDRLKATLTNCVRHGPDSQNRQNHPDYQAYLAGRVSYVKMVNASRSAKLQRLFDAVAWPQDAPSA

SEQ ID NO: 5360 - protein, 395 aa, unidentified
  source 1..395: note = Related to JAIENA010000076.1; note = Burkholderiaceae bacterium
LLWQCLGRGDGNEDDNDGDGDGDGDGDAWVVGADLPPLRRYCVDPPVRPVPPAWLAALALPALASVGALAAWFDEPVGALGWLADQWRLGGEGQERLQHYHYRWVPKRSGGVRLIEIPKARLRRLQQKILREILDRVPPHPAAHGFRRGHSCVTHAALHAGQTVVIRMDLKDFFPSIQLSRIHALFAKLGYCASVAGTLARLCVNRTPPSAFNDRQLGAALNWTERQALKSPHLPQGSPCSPALANLCAYRLDLRLSSLAQSQGATYSRYADDLAFSGGAAFARRAERFHLQVAAIALEEGFQVHHRKTRLMRAATRQQVTGVVVNRHPNIARSDYDALKATLTNCVRHGPATQNRDRHTDFRAYLAGRIAHVKMVNADRATKLQRLFEAIAWPA

SEQ ID NO: 5361 - protein, 456 aa, Massilia sp.
  source 1..456: note = Related to NZ_LMDJ01000008.1
MNTKQFTVLALADMVLATDGSLASLIGACNRVFDAEPPWVPAACAALIERTGDYFHYYSRRELAALLLECIGHGSAGARDEDAEPGHERGLECLVMPDVRRLCVEPALRPPKPAWLAALALPDLPTAGALAAWLNEPVGALDWFADQWRLARDAQSPLQHYHYRWVPKRSGGQRLIEIPKARLRRIQQKILREILDMVPPHPAAHGFRRGHSCVTHAALHAGRHAVIRMDLKDFFPSIQLSRVHALFEKLGYPHRTAGTLARICVNRTPQGALRDKLAGGALPWLERQALKSPHLPQGSPCSPALANLCAYRLDIRLSALAQSLGGSYSRYADDLAFSGGPAFARAADRFHVRVAAIALEEGFRVNTRKTRLMREGTRQQVTGIVVNAHTNVARDEYDKLKATLTNCVRHGPASQNRDRHPDFKAYLAGRVSYVRMVNAGRASRLQGLLDAIAWAA

SEQ ID NO: 5362 - protein, 459 aa, Massilia sp.
  source 1..459: note = Related to NZ_CP086370.1
MNIKQHTVLALADMALATDGSLASLTAACHRVFDAEPPWVPAVCEALIARTGEHFHYYSRHELAGLLLECIGHGRGGPGADGQDGDDAEDFALPEPIALPAVRRYCVDPPVRPPKPEWLAALALPELANAAALAAWLNEPVGALDWFADQWRLARDGQSPLQHYHYRWVPKRSGGVRLIEIPKARLRRIQQKILREILDLVPPHPAAHGFRRGHSCVTHAAQHAGQHAVVRMDLKDFFPSIQLSRVHALFEKLGYPYKTAGTLARICVNRTPLGAFRSTPDGDSLSWSERQALKSPHLPQGSPCSPALANLCAYRLDIRLAALAESLGGAYSRYADDLAFSGGPAFARAADRFHIQVAAIALEEGFRVNTRKTRLMRAGARQQVTGVVVNAHPNIARDEYDKLKATLTNCVRHGPASQNRDRRPDFHAYLAGRISYVKMVNAARASRLQSLMDAIAWAA

SEQ ID NO: 5363 - protein, 460 aa, Pseudoduganella violaceinigra
  source 1..460: note = Related to NZ_AUDI01000016.1
MTTDKLTALALADTMLATDGSMESLIAACNRVFGSRQPWATGICVALIERTGESFHYFSRHELADILLQLLGHQFDDDEYGEYNDDEFGEEDSSPPYIELPQVRRYCLDQPIRPPKPEWLAALALPELPTIGDLAHWLNEPVGALEWFADQWRLAGDAQSRLQNYHYRWVAKRSGGLRLIEIPKARLRRVQQKILRQILDLAPPHPSVHGFRRGRSSVTHAALHAGKRVVIRMDLKDFFPSIQVSRIHALFEKLGYSQSVAGTLARICVNRAPYGLFRDKQTGGSLPWVERQALKTPHLPQGSPCSPALANLCAYRLDIRLETLAQSLGASYSRYADDLAFSGGADFARAAHRFHIQVAAIALEEGFRVNTRKTRVMREGTRQQVTGVVVNTHPNLARSEYDTLKAMLTNCVRHGPTSQNRHNRPDFRAHLAGRISYVKMLNVNRAVKLQRLFESIAWTP

SEQ ID NO: 5364 - protein, 452 aa, Massilia eburnea
  source 1..452: note = Related to NZ_WNKX01000014.1
MNTEKLTALALADMMLATDGSMASLVAACHRVFDSPQPWSATICAALIERTGDNFHYFSRHELAHILLLLTGRRFDDFEDGDDEPSPPLIELPAVRRYCLNQPIRPPKPAWLASLALPELKTVGDLAGWLNEPVGALAWLADQWRLAGDEQSRLQHYHYRWVPKRGGGLRLIEIPKARLRRIQHKILRQILDLAPPHPCAHGFRHGHSSVTHAALHAGKNVIIRMDLKDFFPSIQASRIHALFEKLGYPPSVAGTLARMCVNRAPRGIFRDKQTGGSLPWSERQALQSPHLPQGSPCSPALANLSAYRLDIRLASLAQSLGASYSRYADDLAFSGGPDLARAADRFHIQVAAIALEEGFRINTRKTRVMRKGTRQEVAGVVVNSHPNLARGEYDLLKAILTNCVRHGPASQNRHRHPSFRAHLAGRISYVKMLNANRAVKLQRLFETIEWAD

SEQ ID NO: 5365 - protein, 458 aa, Duganella sp.
  source 1..458: note = Related to LMDB01000012.1
MDNEKLTALALADTMLATDGSPENLIAACDRVFDATQPWAPGVCMALVMRTGENFHYFSRHELADILLQLLGRGHVDYDDEDEDEEEGGADAPPFIKLQDVRRYCLEQPIRPPKPAWLAELALPDLPTVGDLAVWLNEPVGALRWFADQWRIARDEQSRLQHYHYRWVPKRSGGLRLIEIPKERLRRIQQKILRQILDLVPPHASAHGFRRGHSCVTHAARHAGQHAVVRMDLKDFFPSIQHARVQALFEKLGYPESVAGTLARICVNRAPHDLFRDKQSGGSLAWSERQALKSPHLPQGSPCSPALANLCAYRLDIRLESLARSLGASYSRYADDLAFSGGDEFARCAERFHIQVAAIALEEGFRVNTRKTRLMREGTRQQVTGIVVNAHPNIARDEYDKLKATLTNCVRHGPESQNRESHPNFQAYLAGRISYVAMVNSDRAAKLQRLLDDIVWPT

SEQ ID NO: 5366 - protein, 308 aa, Duganella sp.
  source 1..308: note = Related to CP051684.1
MAGAARRADSASALPLPLGAQAQRRPAPDRNSQGAAAAHPANNPAPDPRPGAAACGRPRIPARPVERHARRLACRPPNRRPHGPEGFFPSIQYARIVALFEKLGYPDKVASLLARLCVNRTPNGAWRDRKVAEAVTWSERQALKSPHLPQGSPCSPALANLCAYRLDIRLTALAQSLGASYSRYADDLVFSGDHDFARAAERFHIQVAAIALEEGFRVNTRKTRLMREGTRQQVTGVVINRHPNIARDEYDKLKATLTNCVRHGPASQNREGRTDFRAYLAGRISYVNMVNANRATRLQRLADAIVWS

SEQ ID NO: 5367 - protein, 459 aa, Duganella alba
  source 1..459: note = Related to NZ_WKJN01000036.1
MAIEKLTLLALADTLLATEAHLASQIAACTRVFDAPQPWAPPVCAALLARTGDNFHYFSRYEIADLLRQLLARAQEEREGAAAEDADTAAADSAPLVTELPPVRRYCIDPPLRPPQADWLVALGLPQLHSVGALAAWLDEPVGALGWLADQWRLPHNAPARLQHYHYRWVPKRSGGLRLIEIPKARLRRIQQQILRQLLDLTPPHAAAHGFRRGRSSVTHAALHAGRHTVIRMDLKDFFPSIQYARIVALFEKLGYPEKVAGLLARLCVNRTPNGALHGRQVADAVTWSERQALKSPHLPQGSPCSPALANLCAYRLDIRLDALAQSLGAVYSRYADDLVFSGDRDFARAADRFHIQVAAIALEEGFRVNTRKTRLMREGTRQQVTGVVINRHPNIARDEYDQLKATLTNCVRHGPASQNRDGRADFRAYLAGRISYVRMVNAQRAARLQRLADAIVWR

SEQ ID NO: 5368 - protein, 477 aa, Rugamonas rivuli
  source 1..477: note = Related to WHUF01000005.1
MSRVAFPRKTAHASRDSLKALRSFSLRMTIKKLTVLALADTMLASERNLDSLIAACGRVFGAPPPWASEVCAALIERTGENFYYFSRHEIAGILLQLLSHDNADDDDGDDEAPEPMELPPVRRYCIDPPIRPPRDAWLAALALPELRTVGDLAAWLDEPVGALEWFADQWRLAGDKESRLQHYHYRWVPKRSGGLRLIEIPKERLRSIQQKILRQILDPLPPHPAAHGFRRGHSCLTHATLHAGRHVVIRMDLKDFFPSVQLSRIHALFEKLGYPDKVAGALARVCVNRAPHGVFRDTHDGASVTWAERQALKSPHLPQGSPCSPALANLCAYRLDVRLEALAQAMGASYSRYADDLAFSGDRDFARAAERFHIQVAAIALEEGFRINTRKTRLMREGTRQQVTGVVVNAHPNIARDEYDRLKATLTNCVRHGPATQNRDSHPDFRAYLAGRISYVKMVNASRAVKLQRLLATVAWA

SEQ ID NO: 5369 - protein, 446 aa, Duganella sp.
  source 1..446: note = Related to QVIN01000001.1
MTIAKLTALALADTMLASDGSVEKLIAACGRVFGAPQPWAPKLCAALSERTGDNFHYFSRHEIADILLHLLGHDYNDDEERPVIALPAVRRYCIDPPIRPPQDEWFAALALPELPTVGALAAWLDEPVDALDWFADLWRVESGQQSRLQHYRYRWVPKRSGGLRLIEIPKARLRRIQQKILRQLLDRLPPHPAAHGFRRGRSCVTHAALHAGRRIVIRMDLKDFFPSIQYSRIHALFEKLGYSPTVAGTLARICVNRAPCGVFSDPMEGGSLPWAERQALKSHHLPQGSPCSPALANLCAYRLDMRLQALAQSLGASYSRYADDLAFSGDQDFARTAERFHIQVAAIALEEGFRIHHRKTRLMREGTRQQVTGVVVNTHPNIARDEYDRLKATLTNCARHGQATQNRDSHPNFRAYLAGRISYVGMVNANRALKLRRLFDAIAWPA

SEQ ID NO: 5370 - protein, 456 aa, Duganella sp.
  source 1..456: note = Related to QVIO01000002.1
MNIEKLTVLALADTMLASDRSLGSLISACGSVFGMSPLWAPSICAALIERTGENFYHFSRHELADILLHLLGRGSDDVHDDEDEDNPEEYTEVAERLELPEVRRYCIEPPIRPPQTAWVAALALPQLPSVGALAAWLDEPVGALAWFADQWRLASDAQSRLQHYHYRWVPKRNGGQRLIEIPKARLRVLQQKILRHLLDRLPPHPAAHGFRRGHSCVTHAALHAGRPVVVRMDLKDFFPSIQLARIHALFEKLDYPPAVAGTLARICVNRAPQGVFKEAGSLPWAERQVLRSPHLPQGSPCSPALANLCAYRLDMRLEALAQSLGATYSRYADDLAFSGDRDFARAAERFNIQVAAIALEEGFRINTRKTRLMREGTRQRLTGVVVNAHPNIARDEYDRLKATLTNCVRHGPASQNRDRHPDFHAHLAGRISHVKMVNANRAVKLQRLLEAIAWTV

SEQ ID NO: 5371 - protein, 457 aa, Massilia guangdongensis
  source 1..457: note = Related to NZ_WWCJ01000021.1
MDIDKLAVLALADTMLASDGSMAALVAACHRVFAAPQPWAPRICAALIEHTGENFHYFSRHELADRLWQLLGRATSDADVDVDDFVALAAPPFIALPPVRRYCIDLPQRPPAPGWLAALALPELATVGDLAAWLGEPVAALDWFADQWRLDGPAQTPLQHYHYRWVPKRSGGWRLIEIPKERLRRLQQRILRQLLDRVPPHPAAHGFRRGHSCLTHATLHAGQRAVIRMDLKDFFTSVQPARIHALFAKLGYPPSVAGTLARLCVNRAPHGVLRDRQGDVALPWSERQALKTPHLPQGAPSSPALANLCAYRLDLRLAALARTLGASYSRYADDLAFSGGEEFARAAARLHIQVAAIALEEGFRVNTRKTRLMRAGARQQVTGVVVNAHPNLARDEYDRLKAMLTNCVRHGPATQNRAGHADFRAHLAGKISHVRMLNPQRAGRLQAVFDAIRWDLH

SEQ ID NO: 5372 - protein, 458 aa, unidentified
  source 1..458: note = Related to JACMNR010000433.1; note = Bdellovibrionales bacterium
MIPAPSVALALADTLLAGEASPDGLAASAASALGTAYAWGPAMCGFILQRTGDKFRYFSRHELAAIILDSDAFHAAFEPGKEAPQIKRYCLQLPVRPEPDAWLSALSLPAIPTLGELALLLNVELQDLGWFADQWRRGSAEAAPLQHYHYRWVAKRSGGWRLIEIPKQRLRRMQQTILRKILEDVPVHGAAHGFRRGHSCVTHAALHAGQRVVIRMDLKDFFPSIQASRIHALFSKLGYSDSVAGTLARLCTSRAPASAFADPHTGGSLPWAARRALRSPHLPQGSPCSPALANLCAWRLDLRLDALCGSIGATYSRYADDLVFSGGREFERSVERFHVQVAAIAIEEAFGVNTRKTRVMRAGVRQQVTGVVINQHPNLRRDEFDRLKAVLTNCARHGPVAQNREGRENYWHYLAGKVAWVKMLNPARGAKLEKVFAGIDWPEAGSGSVAAPASESSS

SEQ ID NO: 5373 - protein, 492 aa, Massilia mucilaginosa
  source 1..492: note = Related to WHJH01000043.1
MPLRGYPVGTILLCNSPHEPPCAAAHLSSSFTRLVEGSPPPQSYPSMIPKDAVALALADTMLARDATLAGLIASATWAFDHPWPWIPALCEEIHARTAAHFYYFSRDELARIIFELDVFHAAWDGEGPAPQLQRYCLDLPVVPPAPDWLAALALPALPSVGELARWLGLRPDELGWFAGQWRKDPMPAAQLEHYHYRWVPKRSGGVRLIEIPKPRLRAMQAIILRELLDRVPAHPAAHGFRRGHSCVTHAALHTGQRVVIRMDLKDFFPSIPASRIHALFAKLGYSQTVAGVLARLCVNRVPAGVLREPAGGNALTWTQRQALRAPHLPQGSPCSPALANACAWRLDVRLETLAQLLGARYSRYADDLVLSGGRELERAMDRVHAQVGAIALEEGFAINTRKTRVMRAGVRQQVTGIVVNRHPNIARDEFDVLKATLTNCVRHGPQGQDRENRPDFRAWLAGKVAYVTMVNPQRGGRLQRLFDAIAWPHPPL

SEQ ID NO: 5374 - protein, 459 aa, Massilia antarctica
  source 1..459: note = Related to NZ_CP065053.1
MIPKDAVAQALADTMLARDATLAGLIASATWAFGHPWPWIPDLCEQIHSRTAEHFYHFSRHELAQIIFELDVFHDAWDGDGPAPELERYCLDLPLVPPPPDWLAALALPALPSVGGLARWLRLRVDDIAWFADQWRVDAAPAAQMEHYHYRWVPKRSGGVRLIEIPKQRLRAMQATILRELLDRVPAHPAAHGFRRGHSCVTHAALHTGQRVVIRMDLKDFFPSIPASRIHALFAKLGYSQSVAGVLARLCVNRVPAGVLRAPVDDNALTWMQRQALRTPHLPQGSPCSPALANACAWRLDVRLDTLAQSLGARYSRYADDLVFSGGRALERAMDRFHAQVGAIAIEEGFAVNARKTRMMRAGVRQQVTGIVVNRHPNIARDEFDLLKATLTNCARHGPQAQNRDHHPDFRAYLAGKVAYVTMVNPQRGQRLQGLFETIAWLSAPGQPDNNSGKQYNFP

SEQ ID NO: 5375 - protein, 438 aa, Massilia sp.
  source 1..438: note = Related to FQWU01000004.1
MIPAHSVALALADTMLAGAAGVAALIGSAARAFEVEHKWVPPLCEAIHVRTGEHFHSFSRMELAAIILDDEHFLGAWENGKAPPQIRRYCISLPVVPEQPAWLVALALPAIPTVGDLARWLTVRPDELGWFADQFRLTHDATSRLQHYHYRWLPKRSGGWRLIEIPKQRLRAMQQKILREILDLVPAHSAAHGFRRGHSCVTHAALHVNQRVVIRMDLKDFFPSIPASRVHAMFVKLGYSQSVAGALARLCVNRTPAGAAAAVDISWAERQALRSPHLPQGSPCSPALANACAFRLDIRLQALAASMGAVYSRYADDLVFSGDAQLARALDRFHVRVAAIALGEGFRVNTRKTRMMGAGVRQQVTGIVVNCRPNIARDEYDALKATLTNCVRHGPASQNRIGHDNFRAYLEGRVAHVHMVNPARAERLRNLCAAIVWP

SEQ ID NO: 5376 - protein, 441 aa, Collimonas fungivorans
  source 1..441: note = Related to NZ_CP013232.1
MNPKTFVALALADTFLAREASLDAMLQGARWALGKKWRWIPSLCRAIHKQTGEQLHSHGRTELAALILAHEGFADAWLDSEPPQVRHFCLDPPVAAEPPAWLSALALPVLATAADLAQWLKVTPSELDWFADQWRNSQATTTALQHYHHRWIAKRSGGLRLIEIPKPHLRTMQTQVLRGLLDRIPLHQAAHGFRRGHSCVTHAALHAGKRVVIRMDLKDFFPSIPAARVHALFIKLGYPPKVAGLLSRLCTYRTPGNVLNQPGQKIPWQERQALRTRHLPQGSPCSPALANLCAYRLDMRLQALATALDARYSRYADDLVFSGESGLERAMDRFHVQVAAIALEEGFAVNARKTRMMRSGVRQQVTGIVVNRHPNIPRQEFDKLKAALTNCIRHGPASQNREGRDNYRQFLAGRVSYAQMVNPQRGKRLHRLFEQISWPGS

SEQ ID NO: 5377 - protein, 445 aa, Collimonas sp.
  source 1..445: note = Related to FOLC01000015.1
MTPQTFVALALADTFLAREASVEAMQQGARRALGKKWRWIPSLCRAVYKQFGDRLHRHGRTELAALILAHQGFADAWLDSEPPQIRHFCLDLPLPAGKPAWVSALPLPALATTADLAQWLKAGPSELDWFADKWRTSPPPAAALQHYHHRWIAKRSGGLRLLEIPKPRLRTMQGQILRGLLDLLPLHPAAQGFRRGHSCVTHAARHAGKRVVIRMDLKNFFTSIPAARIHALFTGLGYPSRVAGILSRLCTHRTPGSVLNHQDPASAGALSWQERQVFRQRHLPQGSPCSPALANLCAYRLDLRLQALAASLNAGYSRYADDLAFSGDGELERAMDRFHVQVAAIALEEGFSVNTRKTRMMRSGARQQVTGIVVNRHPNIPRQEFDNLKAALTNCIRHGPASQNRDGRDNHRQFLAGRIAYVRMVNPQRGKRLQQLFDKIAWPKG

SEQ ID NO: 5378 - protein, 447 aa, Collimonas sp.
  source 1..447: note = Related to PDBX01000001.1
MTPKTFVALALADTFLAHDASTNALIAGARRALGKKWRWIPSLFRTILKQHGEQLHCLGRSELAALILAHDGFSDAWQESSPPQIRHYCLDAPLAVEQPGWLAALGLPRLASVAELAQWLQVAPLELDWFADKWRNNMPAPSALQHYHYRWLQKRSGGLRLLEIPKLRLRAMQSQILRHLLDLVPPHPAAHGFRRAHSCATHAALHAGKRVVMRMDLSNFFPSIPAARIHGLFVKLGYPANVAGVFSRLCTHRTPASVLANPDKGLRSAHVMSWQERLALRTRHLPQGSPCSPALANLCAYRLDMRLQALAVSLNASYSRYADDLVFSGDQELERAMHRFHVQVAAIALEEGFSVNTRKTRMMRSAVRQQITGIVVNSHPNIARPDFDNLKAALTNCIRHGPASQNREGRDNYRQFLAGKVAYLHMVNPQRGKRLQQLFEQIVWSAD

SEQ ID NO: 5379 - protein, 440 aa, unidentified
  source 1..440: note = Related to JACOUL010000024.1; note = Burkholderiales bacterium
MTSKTLVALALADTFLSREAGLASMVHSAAWALGKKWKWIPSLCRAIVEQAGEHFYDYSRDELAALILAHAGFSDAWQDNAPPRIKHYCLDLPIAPEKPAWLSSLALPELATIADLTQWLKLSAAELDWFADKWREQSPTARALQHYRYRWLVKKSGGLRLIEIPKQRLRSIQTHILRKLLDLVPPHSAAHGFRRAHSCVTHASLHAGKRVVVRMDLKNFFTSISYARIHAMFGKLGYSSSVAAALARLCTHRTPLGVFSEREITKTIPWQERHALRTPHLPQGSPSSPALANLCAHRLDIRLDALANSLNARYSRYADDLTFSGEYELEQAMERFSIQVAAIALEEGFSVNTRKTRLMRAGVRQQVTGLLVNRHPNTPREEFDILKATLTNCIRHDPASQNREGRENYRQYLAGRIAFVHMVNAKRGVRLKQLFEKIKW

SEQ ID NO: 5380 - protein, 446 aa, Undibacterium pigrum
  source 1..446: note = Related to NZ_QJKB01000006.1
MDIPKQVALAIADALLAGECSHIALMKNMSWVLGKKWPWIPSLCPKIYLHAGPHFYHYSRHEIAAIILDDHGYYDAWRGKDKPQIKQYCLLPAIAPEKPAWLQALALPEFNNSADLARHLNLTVNELAWFADQWRQDAQAAPQLRHYHYRWLEKATGGWRLLEIPKSRLRNIQRKILQRILNQVPPHAAAQAFQQGRSSISHAAQHTGKLVVVRLDLKDFFTSIPGSRLHALFAKLGYPEKVAGTLARLCSNRTPTVIAKEKTRYLAPLSSAHLLRSPHLPQGAPTSPALANLCAYRLDMRLQALADSMQASYSRYADDLTFSGDEQFDQSLRRVIPQVAAIVLEEGFVLNYKKTRIMRASTRQQVTGIVVNRHCNIKRADYDTLKAILTNCLRSNPASQNREGHANFRAHLAGKLAYMRMINPARTAKLQALFEQIKWPDSAVMI

SEQ ID NO: 5381 - protein, 446 aa, Undibacterium sp.
  source 1..446: note = Related to JAKZHX010000011.1
MDKPEQVALALADALLAGPCDPVIMMKNMRWVMGRKWPWIPALCKKIHRHTGDHFYHYSRHEVADMILADNGFDNAWFRSESPPVIRHYCLLPPVAPDRPVWLEMLNLPSLANSDELANYLNLPHGELAWFADQWRDSAPESTGLRHYRYRWLDKPTGGVRLLEMPKQRLRNIQRKILRQILDRVPPHAAAQAFRKRHSCLSHASLHTGKQVVLRLDLKDFFSSIPGSRIHSLFAKLGYPQSVAAILARLCTHRTPNTVLDEIMARQGAPWQVRHMLRSRHLPQGAPTSPALANLCAFRLDMRLHTLAASMQATYSRYADDLTFSGDEELARALQRFIIQAGAIAIEEGFSLNHKKTRIMRATGRQQVTGIVINRHCNIRRSEFDRMKAILTNCVRNGPATQNRDHHADFRVHLAGKLAHLHMINAARATKLQTIFEQINWPAKPE

SEQ ID NO: 5382 - protein, 452 aa, unidentified
  source 1..452: note = Related to JAGOHT010000005.1; note = Alphaproteobacteria bacterium
MDAKDFVALALADAWLAEPAGQDFTGRATVLFGQPHPWIPRLARRIKRQFGTTEHYDRRTALAQFIRADDGYTTAWSSYAKPRLRQYVFATPQMRLQSAWLSTAKLPPLATCGALAEWLGLTTEELAWFADTRGMNRTATGKLNHYQYQWRKKRSGQYRLIESPKERLRAIQRKILTGILNQVPPHDAAHGFRRQRSCLSFVAPHIGKDCVLRMDLCNFFGTITAARIHALFRALGYPMAPARLLTGLCTHSLPQQFIDQLHTAGIELSWAERRAYQAPHLPQGAPTSPALANLCAYGLDVRLSALVAKHGADYTRYADDIAFSGGGAFKSQAADISTFVAVVAQEEGFAVNFRKTRRMPTSQRQQLTGIILNKKPNVRRTDYDALKAILHNCQQGDPASQNRSRHPDFRAHLLGKINYVKQINPQRGTKLLTLYSEITWPENPSQTAPEQP

SEQ ID NO: 5383 - protein, 448 aa, Nevskia soli
  source 1..448: note = Related to NZ_JONR01000045.1
MTPRDQVAEGLADALLAGPSSVDDLAARAAEALGRKHRWIRPFARRVFKRFGAALAHAQRGELIGFIQTDPGYCKAWKAAGKLRIRRYFFGVPSMGPRPGALARCVLPELPTSADLAAWLGITIPELEWYADLRGMIGSSDGALCHYHYKWIPKRHGDYRLIESPKPRLSAIQTRILREILDLIPTHEAAHGFRRGRSCLTYVAPHVGKLVVLRMDLHNFFGSIPFARINALFKTLGYPEETAKYLAGLCTNRLPARVALKIPGADPGFVLPWPECKKLNERHLPQGAPTSPALANLCALHLDFRLAALASKVNADYTRYADDLAFSGNEGVRRKIGDLSTTIAAIALAEGFEVNFRKTRAMHKSDRQILTGIVVNERVNMQRNEYDRLKATLYNCLRFDPDSQNREGHRDFQAHLLGRVNHLKNLNQRRGAKLQALLERVEWQAGAG

SEQ ID NO: 5384 - protein, 445 aa, unidentified
  source 1..445: note = Related to JAEUMY010000023.1; note = Betaproteobacteria bacterium
MTSKSRKHFVACGLADALLAGPPGITEFEARAKQALGRKPRWVLPLCKRIFARFGSGLGTQQRAKLIEFIETDQGYLDAWLADTKPRIRHYFLATNSMAPRVGALALCPLPNIPTSVDLAAWLDISIEDLEWFADVRHMVKAPGPLCHYHFRWLPKRSGGWRLVEIPKQRLRDLQRKILREVLDPVMPHDAAHGFRRGRSCLTNAAPHCGKDVVLRMDLLNFFTSIPASRIHALFTTLGYPDPVAKRLTGLCTCEVTTRMLPALPAGAEPLPWAMRKRYAERHLPQGAPTSPALANLCALHLDFRLAGLAESLGGAYTRYADDLAISGGEPLRRRVGAITSLLSAIAREQKFDINHRKTRVMHRSDRQRLTGVVVNEKPNVSRAEFDQLKAVLHNCVVHGPQSQNRMGHPNFREHLRGRVSYVAGLNGARGERLRLAFEEIDWAR

SEQ ID NO: 5385 - protein, 443 aa, unidentified
  source 1..443: note = Related to NATR01000129.1; note = gamma proteobacterium symbiont of Ctena orbiculata
MGNGLSSLATNLRLLALSVLAGAWDKPGLIERLEQALEYSPTDAAQLASRLLFHYEAGQPPSRQRLMAFLANEVSLQQRFASPDAKPPRLVLDPPRMGRPPERLITLPLPPLETRKDLAEWLGLFDHELAWFADLERRQCKVKESKLHHYRYQWIEKRSGKLRLIEIPKPRIKAIQRRILREILNRVPPHPAAHGFCRGRSCRSFVASHLGKPVLLRMDLKDFFHSVPIARIGALFRRVGYPAHVAWLLQGLTTHSTSPALAGEAFERLPWQRRKHLIDKHLPQGAPSFPALANLCAWRFDCRLQGVAERFGLDYTRYADDLAFSGDRNLLRLAPFLKGLIGAIAIEEGFEINHRKTRLRTQAQSQRLAGMVINQQPNLPREEFDRLKAILYNCTRWGPESQNREGVEDFRAHLEGRVAYALWLNPEKGRRLKDLWRYIQWSE

SEQ ID NO: 5386 - protein, 347 aa, unidentified
  source 1..347: note = Related to NZ_MARB01000009.1; note = Candidatus Thiodiazotropha endolucinida
MGRPPDKLLTFPLPSLSTVKDLQQWLGLFDHELAWFADRERRQCKVTESRLHHYRYQWIEKRSGPPRLIEIPKTRLKMLQRQILREILNRVPPHPCAKGFVRGRSIKHFVEPHLGKEVVLRMDLKDFFHTVPVYRIGAMFHRLGYPWSVAYLLQGLCTHTSSALLAGDTFNALPWAMQKRLRDKHLPQGAPTSPTLANLAAFRFDCRLQGVANRFSLDYTRYADDLAFSGARELLRLAPFLQGLIGAITIEEGFEINHRKTRVQTQAQSQRLGGMVINQRPNLPREEFDRLKAILHNCVRWGPESQNREGVDDFKAHLGGRVAYAVWLNPEKGKRLRQLWKRIQWLD

SEQ ID NO: 5387 - protein, 433 aa, unidentified
  source 1..433: note = Related to JAGRGZ010000050.1; note = Gammaproteobacteria bacterium
MRRLMLSIQFGRWDRESLGDRLRRALDGGPPDPDRLAARLLFQFPPGHPPSRSQLAGLLAADRELAAASQSGGKGFEARIVLDTSVMQAPTGHFSTLPLPTLDHARDLGLWLGLNQRELAWFADCESRQTSVRNPKLHHYRYRWLARRSAPPRLLEIPKARLKLMQRQVLHHLLDCVPPHPAAHGFRRHRSCLSFATPHLQKPAVLHMDLEDFFPSIPAPRVGALFRRLGYPPGVARVLQGLCTHAVAPALVGAEFDALPWETRRRLQAPHLAQGAPSSPAIANLCAWRLDCRLQGLADRFELDYTRYADDLAFSGPASLLRRGPFVQALIGAIAAEEGFRINHRKTRLNTQAQSQRLAGVVVNQRPNLQRRDYDRLKATLHNCARFGPEGQNHEGRQDFRAHLAGRIAHVAWLNPDRGARLKALWARISWPD

SEQ ID NO: 5388 - protein, 451 aa, unidentified
  source 1..451: note = Related to JAGRGX010000033.1; note = Gammaproteobacteria bacterium
MPTHRTKIRRLTQALSTGLWQKDTIADRASRALHGGPPDPRRLTARLLLQFGDAQHPPPAELEAFLRHDHEVASALRSITDNNTPALLLDPSTMQPQRHRISLPLPVLDTVRDLQQWLGVSAGELAWFADCDGRQAKSTTQRLHHYRYRWAEKRRGGWRLIEQPKSRLKAIQRQVLREILDRVPPHPAAHGFRRGRSCLSFVAPHCGRPLLLRLDLRDYFTRVPVARIGATFRRLGYPAAVAHTLQGLCTHAMSASLADPPAGAVDWQQRQYLRSKHLPQGAPTSPALANLCSWHLDARLSGLAHRYGLAYTRYADDLAFSGTDALRHDAPFLRDLIAAIALEEGFRINHRKTRLVTAAQRQRLTGIVINAHPNPPRSEFDRLRATLFNCVRYGPQSQNRDARTDFAAYLAGKLAYVTQLNPNKAVRLHRLWRQIDWQEYDGTSTMHDDGS

SEQ ID NO: 5389 - protein, 382 aa, unidentified
  source 1..382: note = Related to JAGRGY010000021.1; note = Gammaproteobacteria bacterium
MEAMLAGDAEVRAALDRSDDPDLPAILLDPPVMHPPADRRISLPLPRIETWRDLRQWLGVFDGELAWFADREGRQADVVEPRLHHYRYRWLAKPAGGWRLIEQPKTRLKAIQRQILRGVLDRVPPHPAAHGFRRGHSCRSHAAVHTGRAVVLRMDLQHFFTSVPVARIGAMFRRLGYPAGVAHLLQSLCTHCLSPPLAAAPDGALNWEQRQRLRAKHLPQGAPTSPALANLCAWRLDCRLDGLARRFGLDYSRYADDLAFSGPHGLVANVDFIEGMVGAIALEEGFRVNHRKTHLATRSQCQRLTGIVVNARPNLDRRAFDRLRATLHNCARYGPAGQNRDGVADFRAHLAGRLAYARWLNPDKARRLERLWRQIDWPSDGD

SEQ ID NO: 5390 - protein, 435 aa, unidentified
  source 1..435: note = Related to SCTB01000034.1; note = Alphaproteobacteria bacterium
MPRKFKQAEWLASSVCTGAWERAAVAERLARALPADGPDPVALAASIRNRFYEDGPPNLKALTLFLIDHPLLQPVFQKGGIRGLLLDPPVMGRRQDNLAPLQLPELPTLRDVGLWLCLSDAEISWFADTRLRQGRVTEEKLHHYRYLWIPKRSGGIRLIETPKVRLKEIQRMIVSRILRHVPPHDSAHGFTRGRSIKTFAAPHLRQQVVLRLDLKDFFHSVPVARIAALFRRLGYPPNAARVLQGFCTNSVSPSLAGKPFTRLSWHDRKRLQGRHLPQGAPTSAQLANLCAWGLDCRLKGLADHYGYQYTRYADDLAFSGPSSLAGRARFIEALTGAIAQEEGFSLNHRKTRLRLASQRQRLAGVVVNERVNCSRADWDRLKATLHNCVKHGPESQNHDKHPDFKAHLKGRVTHAAWLNPSRGGKLQFLFNQIVW

SEQ ID NO: 5391 - protein, 421 aa, unidentified
  source 1..421: note = Related to WGNE01000059.1; note = Alphaproteobacteria bacterium
MHAGAWDRAALAERLAKVLPAGAPDPARLAARIYRRFGEGPPPSVTALAAFMREEKLLEPLFEGKGIRGPSLEPYAMGRRPDLLAAVPLPDLPTLRDVGRWLGLSDEEVSWFADVRFRQDKLTEPKLHHYHYSWIPKRSGGLRLIEMPKFRLKEIQRRIVREILGRIPPHDCAHGFTRGRSIRTFAEPHTGQYAVLRLDLKDFFHSVPIARIAALFRSLGYPPKIARVLQGLCTNAISPPLAGKPFEKLPWHERKALQDKHLPQGAPSSAPLANLCAWRLDCRLEGLAIRYGYRYTRYADDLALSGPSSLARRAEFIEALVGAIATEEGFCLNYRKTRLRLSSQRQRLAGVVVNEKANCGRAEWDRLKATLHNCAKHGPEGQNRGNHPAFKSHLEGRVAHFAWLNPARGEKLKSLLGRIVW

SEQ ID NO: 5392 - protein, 438 aa, unidentified
  source 1..438: note = Related to PBDO01000002.1; note = Pseudomonadales bacterium
MTNSVRARRLALSIIDGEWTQPAVTDRLRRVLELHPQDIKQLAARLCFLYEQPPASFKRLATLLLNEPLLEYFWQHAAQQDIPGILLDTPQMQPPPANLRCFPLPRLDTLKDVALWLAVQPRELDWLADINGRQAQVVEPRLHHYRYRWVNKRSGGQRLIEIPKSQLKRIQRLILHDILDRILPHDAAHGFVRNRSCASYVAAHVGQPVILHLDLKDFFHSVPITKVLAFFRTLGYPAAVARTLMGLCSHGVSPSLAGKPFADQSWQRRRQLRHPHLPQGAPTSGALANFSAYRLDCRLAGLARRYGLRYSRYADDLVFSGPETLRPQAAWIESVTGAIALEEGFCLNHRKTRVRSQSQSQRITGLVINEKINISRTDYDQLKATLHNCVRHGSESQNRCAHPDFRAHLAGRIAHVTHINPQRGKKLQQLFNAVHWED

SEQ ID NO: 5393 - protein, 456 aa, Imhoffiella purpurea
  source 1..456: note = Related to NZ_AONC01000057.1
MNTLRRDIQTLAASLLAGRWALPDLTDRLQRALHWPHPPASLLAARLLRDLGEHHAPEARTLASWLLQDALLLAHLERGSDARPHIEWLLDAHVMEAQPPAMAADVPQLPTTGDLADWLRISPGELGWFSDLWCSQARASREPLRHYRYQWRHREDRPRLIEIPKPRLKRLQRRVLHEILDPPQPHPAAHGFRAGRSCLTYARPHTGQPVVARMDLRDFFQSVPIRRVTAFFRCLGYPAPVARVLRGLCTHGVSRDVLTRAGLDLPWERRQRLASPHLPQGAPTSPALANLCCYRLDCRLTGLADKLGLRYTRYADDLAFSGAESLRHGFERFHILVARIALEEGFELNTRKTRLMTAAQRQSLTGILVNAHPNLPRREYDSLKAILHNCIRTGPAAQNRAGLPDFRGHLRGRIAYLAQINPDRGARLLRLWEAIEWPDRRATDSADAETAGRRAR

SEQ ID NO: 5394 - protein, 447 aa, Thiorhodococcus minor
  source 1..447: note = Related to JAAIJQ010000073.1
MSRLRRDLRTLSASLLAGRWARPDLSDRIQRALEWTHAPASQLAARLTRDLGDHHPPQAQRLEDWLRQDSTLVARLERGSDHHPQVRWLLDAPVMEAQPAALAARVPQLPTIGDLAAWLRLSPGELEWLSDRWCQQSRETREPLRHYRYQWRPRAGRAPRLIEMPKPRLKRIQRRILRHILDPLQPHPAAEGFRRGRSCLTHAEAHTGQAVVVRMDLEDFFQSVPVRRVTALFRCLGYPAPVARVLRGLCTHCVSGDAWTRSGLDIPWERRQRLSSPHLPQGAPTSPALANLCCYRLDCRLTGLAARLGLRYTSYADDLAFSGAETLRHGFQRFHVLVARIALEEGFALNTRKTRLMTSAQRQILTGILVNARPNLPRPEYDLLKATLHNCIRYGPKEQNREGLPDFRGHLLGRIAHLSQVNPERGARLRRLWEEIDWSNEASEDRL

SEQ ID NO: 5395 - protein, 436 aa, unidentified
  source 1..436: note = Related to JAGRGW010000386.1; note = Gammaproteobacteria bacterium
MSQLTRNARLVALCIVDTAWNLPALTERLTIVLAGGPPDPQRLVARLLFHCEAGRSPSFQRIVDVLEADVDFVRHHADAAYHLQPGAATMQPLPDSLVTFPLPTIPTLRHLATWLGLSDRELAWFCGGHRRYTTDPNPVFHHYRYHWQDRCSGIPRLIEQPKPKLKALQREVLRNILDRVPPHDAAHGFRRHRSCLTGATPHTGQATLLRMDLQDFFTSINRARVAGVFRILGYPAAVATALAGLCTNRSVLKLSDNPIANIPWQTRKKLEAWHLPQGAPTSPALANLCAWRLDSRLTGLAAHWDANFTRYADDLALSGGRQLRKHKSHKEALIAAIVLEEGFRINHRKTRWSTSAQRQRYCGVVVNRHANVERAEYDRLKAILNNCVRHGPVEQNRAEHPDFRRHLQGRISHVAQLNPARGNKLSKLFDRIHWPQ

SEQ ID NO: 5396 - protein, 518 aa, Acidovorax sp.
  source 1..518: note = Related to LUKZ01000009.1
MSAPIRALARALALALLADADSPERRSLRALAARAGHCLGHAAPEPGNPPLPEVLFEQLRRLSTVSTAEWVRLEPEDLATWLCRGFWWRKAGVRNGTAPWPLQDDGELITEDDDGDGDDPSATPWHLRTDAQLAQSFRTWAASPRTRGPLHWLLRPGTAGPAPAWMGRAPQCSAPVLATAQDLVQLLGVPLEDLLWLAPDHAHWREPQGGCALPASHYRYRLLPKPSGGLRLLEAPRPRLATAQRRILDRLLADIPVHEAAHGFVRGRSVGSHAQAHTRQAVVVRFDLADFFTHINATRVRTLWRALGHGRPAAELLTRLTTTRTPAPVRERLWEGSAPTSAQTIVQRRTTHARLAQLHLPQGAPTSPALANLCAFGLDLRLHALAQRFGARYTRYADDLVFSGPQNLQGQFGALRAWVGAIAQDEGFALRGDKTRLMPAHRRQSVTGLVVNQRPNYSREQFDILKARLHRLARLPGVDVAERARLEGEIHWAGQWLAPTRKEKLQRLFGAIRFTDAP

SEQ ID NO: 5397 - protein, 532 aa, Acidovorax kalamii
  source 1..532: note = Related to NZ_NOIG01000002.1
MTLSAPIRALARALALALLADADSPDRRSLRALVARAGHCLGHAAPEPGPSPLPEVLLEQLRRLSTVSAAEWARLEPEDLANWLCRGFWWRKAGVRNGTAPWQLQDGGDLVTEGDDIGFWDPEDNDGDAPSATPWHLRTDAQLAQSFRTWAASPRTGRPLHWLLRPGTAGPPPAWMGSAPQCSVPMLATAQDLFQLLGVPLEDLLWLAPDHGHWREPQGGYALPASHYRYRLLPKTSGGLRLLEAPRPRLATAQRRILDRLLAGIPVHEAAHGFVRGRSVGSHVQVHTRQAVVVRFDLADFFTHINATRVRALWRALGHGRPAAELLTRLTTTRTPAPVRERLWEDNAPTSAQTIAQRRSTHARLAQLHLPQGAPTSPALANLCAFGLDLRLHALAQRFGARYTRYADDLVFSGPQDLQGQFGALRAWVGAIVQDEGFALRGDKTRLMPAHQRQSVTGLVVNQRPNYSREQFDILKARLHRLARLPGVDVGERARLEGEIHWAGQWLAPTRREKLLRLFGAIRFTDAAQDKG

SEQ ID NO: 5398 - protein, 529 aa, Acidovorax sp.
  source 1..529: note = Related to NZ_CP035951.1
MTKTPARTRALAKALAMAVLADAREPERRTLQALAARAGACLGNNTTLADSPVPLPPPLLEQLRRLSHASGAEWARLEPEDVATWLCWGVWWRKAGLRNGSTLQSLTTTFSQQEEKDQDAWDELVGDDDENAEPALPLHQWPDPQLARAFRTWAASPRTGEPLHWLLRSATAGAHPAWMGRERTTPVLLTATDVTETLAISLDDLLWLAPEHAHWRERQDGGHALPLSHYRYRLLPKPSGGLRLLEAPRPRLASTQRRILDSLLAGVPVHEAAHGFVRGHGVGTHAQVHTQQAVVIRFDLADFFMCITATRVRALWRALGHGRPAAELLTRLTTTRTPQAIRERLLEAAPLPREAIAHRRAINTRLKQPHLPQGAPTSPALANLCAFGLDLRLNALAERFGARYTRYADDLVFSGSKALHQQWVDLRAWVTAIAQDEGFTLRADKTRVMPAHQRQYVTGLVVNERANYSRTQFDILKARLHRLGQQPQVDISERARLTGEIQWASQWLAPTRRAKLQRLLHAIRFSNEL

SEQ ID NO: 5399 - protein, 529 aa, Acidovorax radicis
  source 1..529: note = Related to NZ_AFBG01000026.1
MKKISARTRALAKALAMAVLADAREPERHTLQALSARAGACLGGRTTPADSPDPLPEPLSEQLRRLSNMSDPEWARLEPEDVATWLCWGIWWRKAGVRNGSALQALTANRGQDAEEQDAWDHLADEGDEDAEPALPVHQWPDPQLARAFRTWAANVRAGETLHWLLRPAAAGPQPAWMGRDSTTPVLLTATDVTEALAISLDDLLWLAPEHAHWRERQNGGHALPLSHYRYRLLPKPSGGLRLLEAPRPCLASTQRRILDSLLAGVPVHEAAHGFVRGRSVGSHAQVHTHQAVVIRFDLADFFTSITATRVRALWRALGHGHPAAELLTRLTTTRTPQAVLDRLLEATSIPPEAIAQRHTIGARPKQPHLPQGAPTSPALANLCAFGLDLRLHALAEHFGARYTRYADDLVFSGPKALLHRQWVDFRAWVTAIAQDEGFTLRADKTRVMPAHQRQYVTGLVVNQRTNYSRTQFDTLKARLHRLAQQPPVNISERARLAGEIQWASQWLAPTRSAKLQRLPHAIRFSNEA

SEQ ID NO: 5400 - protein, 506 aa, Acidovorax sp.
  source 1..506: note = Related to JAHUWH010000023.1
MAVLTDAQGGPERRTPHALAARAMACLGTPAAQDAILPDSLTEQIRRLSLVSALEWARLELDDVATWLCWGRWWRKAGVRNPHAVHSEPEIDDDATFLFDMSEDEEAHEQGSADVPLALWAPQDLARAFREWAASPRSGAHLRWLLRPATTGPQPAWMDHAPGFALLATAADVTQALTLSREDLQWLAPEHAHWREHHNSGLALPPSHYRYRLLAKPSGGLRLLEAPRPRLAQAQRRILDKLLASVPVHEAAHGFVRGRGVGSHAVAHAHQAVVIRFDLADFFTSINATRVQALWKALGHGRSAAQLLTRLTTARTPSAVRERLLEALGSSSAHLAQRRALNQRLSRAHLPQGAPTSPALANLCAFRLDVRLQALAQRFGANYTRYADDMVFSGPRALRGQFAALQSWVSAIAQDEGFTLRADKTRVMPAHQRQYVTGLVVNERVNYSRAQFDKLKAQLHRLSQQPRVAASERSRVAGEIQWASQWLATTRAAKLKRLFDTIRFSP

SEQ ID NO: 5401 - protein, 534 aa, Acidovorax sp.
  source 1..534: note = Related to AKJX01000004.1
MKTPVRSRVLAKAISMAVLADAQTPEHRTPQALVARVQASLGLEPAAGSPLPAFLLEQLQRLSAMSSPEWARWEPEDVAAWLCWGRWWRSAGLRWGTEHSGAGVEDGASAWDGDDEDIAEPDGDGEGDDILPGLPPTDWTAPRLGQAFRIWTATARSAVPRRWLLRPAGAGPLPAWMDRGTTVPVLATATDVAQVLAVSVEDLLWLAPQGAFWRERHSEGHSLPASHYRYRLLPKPSGGLRLLESPRPRLVHAQRRILYTLLANIPTHEAAHGFVRGRSVGSHARIHTGQAVVIRFDLADFFTQIHATRVRALWRALGHGRAAAELLTQLTTARTPAGVRDRLLESMPELPTSIAQRRATAQRLARPHLPQGAPTSPALANLCAFGLDVRLQALAQRFGANYTRYADDLVFSGPDMLRRQFIALRAWVAAIAQDEGFALRADKTRVMPAHQRQFVTGLVVNQRANYSRVQFDTLKARLHRLAQQAQVDAGERARLEGEIRWASQWLAPARTAKLQRLLAAIRFGSMDSGLAAKG

SEQ ID NO: 5402 - protein, 533 aa, Acidovorax soli
  source 1..533: note = Related to JACHLK010000020.1
MKTPVRSRVLAKAIAMAVLADAQTPGHRTPQALVARVQACLGLEATAGPTLPACVLEQLRRLSAMPSLEWSRWEPEDVATWLCWGHWWRSAGLRQGGLPWAAGHGDAPTWEGDGDDFAEPEGEGDGGGTLPGLPPTDWTAPRLAQAFRIWAATARTAVPRRWLLRPAEAGPPPAWMERSTAPPLLATAADVAQMLAVSLDDLSWLASQGAFWRERHATGHALPPSHYRYRLLPKPSGGLRLLESPRPRLMHAQRRILDTLLAAIPLHEAAHGFVRGRSVGSHAQVHTGQAVVIRFDLADFFTQIHATRVRALWRALGHGRAAAELLTRLSTTPTPAGVRERLLECMPEVPAFVAQRRAMAQRLARPHLPQGAPTSPALANLCAFGLDVRLQALAQRFGANYTRYADDLVFSGPETLRRQFIALRAWVAAIAQDEGFALRADKTRVMPAHQRQTVTGLVVNQRANYSRTQFDTLKARLHRLAQQAWVEAGDRAQLEGEIRWASQWLAPARAARLQRLFDAIRFAPVDGEAAAKD

SEQ ID NO: 5403 - protein, 524 aa, unidentified
  source 1..524: note = Related to JAFKGX010000054.1; note = Comamonadaceae bacterium
MHVHVHARVLAKAIALAVLADAQAPQRRTVEALRARVQACLGHAPGEEQRPLPAPLQEQLRRLATLPTREWARLGAEDIGTWLREGFWRRMAGVRTGAPSARGARVPDDSFDEEDNDTDDDGMPAAPPSQWTARALAEAFRQWASHVTPKRWLLRSATTGPLPAWRDSDGARAGPLLATAADLAGALAVSLEDLLWLAPEHVHWRERQPDGGHAMAPSHYRYRLLPKPSGGLRLLEAPRPRLAQAQRRILDLLLAPIPVHEAAHGFVRGCGVGSHAQVHAGQAVVIRFDLADFFTHIHATRVRALWQALGHGHAASDLLTRLTTARTPAAVRERLRDACTPLGHPSSEHWHATGRHLASAHLPQGAPTSPALANLCAFGLDLRLEALARRFGARYTRYADDLVFSGPQTLLHAFVRLRAWVSAIAQDEGFALRASKTRVMPAHQRQYVTGLVVNHRVNWSRAQFDTLKARLHRLARQACVDPGERARLAGEIQWARQWLAPTRSAKLQRLFEAIRFADSGSRDG

SEQ ID NO: 5404 - protein, 527 aa, Ottowia sp.
  source 1..527: note = Related to JAGOEM010000124.1
MATPSRILSKAVAMALLADAQTGAAARRPSALAARASHCLASNAGAPSGAQPLPATFLEQLRRLSQLPAREWQRLEVEDLATWLRHGRWWRQAGLVASSGPGEELDEPVGDFADEDLFFDDDDESIPDPPAPALQSNAQLAQAFRVWAAQPSVQVRRWLLRPAQPGPQPPWLDERTHGSRAAPRWATATGLAQALNLELDELLWLAPAHAHWRERAGLAMPPSHYRHRLLPKRSGGLRLLEAPLPRLAQVQRSLLDQALNPIPTHEAAHGFVRGRGVASHVAMHAGQAVVARFDLRDFFTQVHTTRVRALWRALGHSRAMAELLTGLTTTRTPSAVRERLLDAVPTVPSAAVAGALAQRRARAQALARGHLPQGAPTSPAIANLCAFGLDVRLAALAQRFGARYSRYADDLVISGNEDLRRQWPNLRAWVSAIVRDEGFALNADKTRLMTASQRQHVTGLVLNTRPNLPRAQFDVLKAQLHRLAKQAGVPLQERPRLLGQLQWARQWLVPTRAAKLQALFDAIRFAD

SEQ ID NO: 5405 - protein, 510 aa, Diaphorobacter sp.
  source 1..510: note = Related to NZ_JADKYZ010000005.1
MKAANHVRHAALAVAHAWLADSDAEGGRLGHALMARAQSSLGLAPQDQPDWLRAWSLRLQNLPDPMWARLDVWRLASTLCGETSLGAACYPERRMAGLTDENATLPDPAASWNWGEEGEEDVVDWLDDEHPARAETDFEIWVERSHRRVRRWLLRPARMQVATMALHDLELPTWPDSALLAEALAISVDDLAWLARPAWQLAPRDQPHKALSASHYRHRLIPKARGGLRLLEVPKQRLAAAQQQIRVQLLERIPVHEAAHGFARGRSVLTHAATHAGQPFVCAFDLQDFFHSITAAQIRALWRTLGYPAGIATELTALTTTVTPAPVRERLLEDASVTRTQARRLALPHLAQGASSSPALANLCAFQLDLRLSALAERFGARYSRYADDLVFSGPASLQRHFAALHGWVRGIAEDEGFALHPEKTRRMPRHARQRITGVVVNDQPNLARHDYDLLRAELHQLSLQKEAVSDEVLASLRGRVAWACQLVTPARQEKLKALLIRCSAGSQTP

SEQ ID NO: 5406 - protein, 511 aa, Diaphorobacter aerolatus
  source 1..511: note = Related to NZ_CP060783.1
MALAVAHAWLADSDADGGRHQRSLIARAQNCLGLASSDQPDWLVTWSLRLHHMPDPMWARLDVQRLASALVEQQSLGAACYPQWRVITQAAAEKGIPDDEEPDPHGLGIGWAEGYGEEDDDTESTNAAPNFSQWVQQERPAVRRWLLRPARMQIAAMALHDLGLPNWADSQQLAQALGIGVSDLDWLARPAWQFAPRDQHGKSLAASHYRHRLTPKARGGLRLLEVPKQQLAAVQKKIHVQLLSRIPVHEAAHGFVTGRSVLTHAALHAGQPVVCTFDLRDFFHSITAAQIRALWRSLGYPAGIAAQLTALTTTVTPAGVRERLLEDASATRSQIKRLATPHLTQGAASSPALANLCAFHLDMRLSALAERFDARYSRYADDLVFSGPDSLRRHFASLRGWVRGIAQDEGFALHPDKTRRMPDHTRQRITGVVVNEKPNLSRADYDLLRAQLYRLAAQQDPASDELLATLRGRVAWACQLVSPSRQEKLKTLLSRIPRDDAPHKMVKPIFQ

SEQ ID NO: 5407 - protein, 443 aa, unidentified
  source 1..443: note = Related to RDZW01000120.1; note = Burkholderiales bacterium
MNDRHWIARGIARALLARFRENGDFSAEGLLAQASMALNGNPPWLKRLIRPLAKLSLPTWQNFTVDTLSERLMKDARFDEAFRQVESPRIRQLFMHRATMGLRPFALQDCELPAITDDVMLAEFLKVSTEQLHWLAPELPLERLPGAGHYRYRLIPKASGGLRLLEMPKARMKAAQRQLLDKLLNRIPLHEAAHGFCAGRSVISHALMHSGQDVVIRFDLKDFFTSITAARVHAIFRTLGYPEGVSKALTTICTNRTSRMIVERLLDERGVHAGAAQRLRIPHLAQGAPSSPTLANLAAFSLDLRLSGLADKFGARYSRYADDLVFSGEKHLRADFRVFAVWVKAIIESEGFILHPDKTRCMPAHQQQRITGVVVNTKTNLSREEFDHLKARLHQCVVNGVASQNSMGHPDFKAYLQGRIAWARQLNASKAQRLQRLFDQITW

SEQ ID NO: 5408 - protein, 470 aa, Hydrogenophaga taeniospiralis
  source 1..470: note = Related to NZ_BCWR01000006.1
MPPAHHRRWLATGLAHAFLADHEQPGARTPEALLARAKVCLGCEGAAPGWLASLAQAVAIRWARQGLIDTVDSLAQMLLQRPEWALDKQAFDEGDEEPSDDSANRPEPVPVGQWAVRHWLLRPARMAAPPWGLQHIDTPDLPTAADWVQWLGIEPDRLLWLTHPSQHWREGSERPHATVAHHYHHRLLPKRSGGLRLIEAPKSELKQVQRLLLDRLLAQLPTHEAAHGFVRGRGVHTHAQVHAAQPCVISFDLRDFFPSIGAARIRAFWRSWGYPEAAARMLTQLCTTRTPVAVRERLREAQALDFNAAKRLATPHLPQGAPTSPALANLCAFGLDLRLEGLAHRFGARYSRYADDLVFSGPAPLAQRFRQLHAWVGAIAADEGFALHPGKLRRALSHQQQRITGLVVNAQPNIARADYDLLRAELHHAVRSASVDAQQRAHLQGRVAWACQALAPSRVAKLQALLARIA

SEQ ID NO: 5409 - protein, 470 aa, unidentified
  source 1..470: note = Related to PHCR01000005.1; note = Betaproteobacteria bacterium HGW-Betaproteobacteria-15
MTTTQHRRWLATGLAHAFLADHEQPGARTPDALLARARACLGCEGAAPEWLVSMAQAVATRWARQGLIDTVDSLAQTLVQRPEWSAGENALDDDDETVDDTATHPEPVSVGEWTVRHWLLRPARMAALPWGLQHIDRPDLPTTEDWAQWLGITTDRLLWLTHPSQHWREGNERPHATVAHHYHHRLLPKRSGGLRLLEAPKTELKQVQRLLLHRVLAHQPAHEAAHGFVRGRSVHTHAQVHAAQPCVISFDLRDFFPSIGAARIRAFWRSCGYPEGVSQMLTQLCTTRTPAAVRERLREAKALDFQAAKRLASPHLPQGAPTSPALANLCAFGLDLRLEGLAHRFGARYSRYADDLVFSGPASLASRFRQLHAWVDAIAADEGFVLHPGKLSRRLSHQQQRITGLVVNAQPNIARQDYDQLRAELHCAARMGPVGAQQKAYLQGRVAWASQALAPARVTKLRSLLAQVQS

SEQ ID NO: 5410 - protein, 472 aa, Hydrogenophaga sp.
  source 1..472: note = Related to NZ_CP063400.1
MTTSHRHGLAIGLAHALLADHERPGGLTASALLGRASACLGCEGAAPSWLRRLTQSIATRWQRHGAIDTLDTLAQALLDLPDWGALFHDDDDAEGDDTPAVNPDEDKLPLSAWRVRRWLLRPARTVPPVWGLPAIDRPDWPSASDWADGLSLTPERLAWLTHPSLHWRESSERPHQRVASHYRHALLPKRSGGLRLLEAPKPELKQAQRRLLDTCLTQLPCHEAAHGFVRGRDVHSHAAVHAGQPCVIAFDLRDFFPSIGAARIRALWRSLGYPEPTADLLTRLCTTRTPAAVRERLREDGGLHFLAAKRLARPHLPQGAPTSPSLANLCAFGLDLRLDGLAHRFGARYSRYADDLVFSGPVSLQQQFRSLQAWVKAIAADEGFVLHPGKQRQMRAHQQQRITGLVVNQHANLPREDYDRLRAELHQAARSGPVDASKQARLQGRVAWASQHLAPTRITKLKALLARVEARA

SEQ ID NO: 5411 - protein, 511 aa, Hydrogenophaga flava
  source 1..511: note = Related to NZ_BCTF01000032.1
MATSDGWHTRRAIRAAPLAQDRSHPTGWLAHQVHYPHHTPRMTALHRRLGLSIGLAHAMLADHRRPGGSAAPALLARACVCLGCEDAPPPWLASLAQAVALRWQRHGPIDTLDSLAQFLAGQLECDDTEPDEDDDLAAPAINDLWSDRPPSTWRVRHWLLRPAQTAQPAAGLPAVERPDLPTEDAWAAWLGLDPQRLRWLSHPSVDWREDHHRPHRRIAAHYRHVLLPKRSGGLRLLEVPRPDLRQAQRRLLDGWLSLVPAHEAAHGFVRGRNVHSFAQVHAGQACVIRFDLQDFFPSLGAARIQAFWSAWGYPEPVARMLTRLCTTTTPAMVRERLQEAPSMDAMSLKRLARPHLPQGAPTSPALANLCAFGLDLRLDGLARRFGAVYARYADDLVFSGPQSLYREARALQAWVQAIAEDEGFALNAAKQRQMRAHQQQRVTGLVINERPNLPREDYDRLRATLHRAALSGPADPAARARLQGQVAWACQSLAPSRVAKLQALLARIAPT

SEQ ID NO: 5412 - protein, 453 aa, Ottowia testudinis
  source 1..453: note = Related to NZ_CP071796.1
MAADRTPRSNAIALAHALLADAEVPGARSLTALHDRVAACLGLTAPLPPGLFQICTELAAWPEPMWRQHGLDSLADVLLQRPEWPAPPHAWQARHWLLRPARMQLAPMALAGVALPELPTHAALAAWLGTTPDDLQWLAHPSQRWRESQPTDRPHRSVAPHYRYQLLTKPGGGLRLLEMPLPRLKTLQRRLLHGLLARVPVHEAARGFVAGRGVRGHANLHAGQPCVLCFDLRDFFGSVGGGRIHALWRSLGYPEGVARTLIQLCTTRTPPAVRERMADAGSLDRPAARRLASAHLPQGAPTSPALANLSAFGLDLRLDGLAWRFGARYSRYADDLVFSGPAALRRDFRVLHAWVEAIALDEGFALNPAKTRCLPAHRQQRVTGVVVNERPNLPRADYDRLRAELHALGHQTRVPAALKPRLQGRIAWARQWLAPERAAKLQRLLERIAFDGA

SEQ ID NO: 5413 - protein, 463 aa, Mitsuaria sp.
  source 1..463: note = Related to NZ_CP011514.1
MTVAAPLTYPRWIALALARALQADDESPRAREADALQARAEQCLGVESRPWLKPLCVALARWTTPVWRAHSIRSFADALLEMDAFHEGFDLERFSRPTVRRLLLRPSRMRPLPFALEHLVLPDLATEADLAAWLGLTLDELDHFAGPARRYREAVATPERPHVAPTPHYRCLLVPKRRGGLRLVEAPLPRLKAVQRRLLDGLLNTLPCHEAAHGFVPGRNVATNAAVHTGQDFVIRFDLRDFFPSIGRARIAATFRTLGFSDAVVERLTTLCTARTPAPVRERLREDGSIDFDGAKRLASPHLPQGAPTSPALANLCAFPLDMRLDGLAHRFGARYTRYADDLVFSGPATLRRDQREFRAWVQAIVEDEGFRLRRDKTRAMPAGGRQQVTGVVVNEKPNLAREDFDRLKAELHRLVGSTDVDPAQRSVLLGRLAWARQFLAPMRVEKLQRMFDAIAFGAAKNL

SEQ ID NO: 5414 - protein, 463 aa, Mitsuaria sp.
  source 1..463: note = Related to FOZE01000001.1
MSLAAPLTYPRWIALALARALQTDDDAPRGREAHALQARAEQCLGAEARPWLTPLCAELARWARPVWLAHSMASLADALQALEAFHAGFDPERPRPTVRRLLLRPSRLRPPPLALASLVLPDWSTEADLAAWLGLTLDELDHFAGPARQYRERTATPRRPHAHPTPHYRGLLVPKRRGGLRLIEAPMPRLKAVQRRLLDDFLQPLPCHEAAHGFVRGRNVATHAAGHAGQDFVIRFDLRDFFPSIGRARVSATLRTLGLPDAVVERLVLLCLTRTPAPLRERLREDGSIDADGARRLASFHLPQGAPTSPALANLCAFPMDLRLDGLAQRFGARYTRYADDLVFSGPASLRRDQRALRAWVTAIVEDEGFRLRRDKTRAMPAGGRQSVTGVVVNTRPNLARERYDGLKAELHQLGLRSRSAPVDPALRGPLLGRLAWARQFLAPSRVEKLTRMLAAIQFNADR

SEQ ID NO: 5415 - protein, 460 aa, Mitsuaria chitosanitabida
  source 1..460: note = Related to NZ_BCYP01000018.1
MSHATPLTYTRWIALALARALQTDDETPGGRGARALQARAEQCLGVEARLWLRPLCVVLARWPDPVWRAHSVRSLADELQDTSAFLDGFDAALHPRPRVHRVLLRPSRRRPLPFALEHLSLPDWQTEAELAAWLGLSGEELDHFAGPSQRYRETVATPRRPHIAATRHYRCLLIPKRRGGLRLIEAPMPRLRALQRRLLDGLLHALPCHEAAHGFVPGRDVASHTACHAGQDFVIRFDLQDFFASVGRARVAAIFRTLGYSDGVVERLATLCTTRTPAMVRERLREDGALDLDGARRLAAPHLSQGAPTSPELANLSLFGLDLRLAGLAERFGASYSRYADDLVISGPATLRRDQGRLRAWVRAVIEDEGFRLRPDKTRAMPAGGRQQVTGVVVNQRPNLAREDYDRLRAELHRLAGMPRVDAALRDPLRGRLAWARQFLAATRVAKLDRMFDAIVFGEA

SEQ ID NO: 5416 - protein, 458 aa, Roseateles depolymerans
  source 1..458: note = Related to CP013729.1
MTSSASLTYPRWIALALARAFQTDDDAPGGRSPQALLGRGMACVGEEHRRWLLPLCQHLASLSAPVWLGMTPRTLAEHLDQRPEFFDAWDPAGPRLQVRRLLLRPARMTPPPFALEDLPLPAWHTVADLAAGLGIDLSMLDVLAGPAQRYREAEARPHRPHVQAIRHYRAVLVPKRRGGLRLIEAPMPALKAVQRRLLRSLLDLVPVHEAAHGFVAGRNVASHAGLHAGQDWVFRFDLQDFFPGIGAARIRALFRTLGMEEAVAEYLTTLCTVRTPRAVRERLQDDGGLTWIDTRRLAAPHLPQGAPTSPQLANLCAFRLDLRLDGLAARFGAQYSRYADDLVFSGAGTPALDAVTLHAWVKAIVEEEGFRLRPDKTRLMRAGGRQTVTGLVVNETPHIARADYDRLRAEMHRLGREPAVDLSLRAPLLGRLAWARQFVAPTRAAKLQRLFDAISFVQ

SEQ ID NO: 5417 - protein, 458 aa, Roseateles terrae
  source 1..458: note = Related to JACHXO010000004.1
MTPPAPLTYSRWIALSLARACQTDDDAPGGRTASALLGRATACLGAEHRAWLLPLCEQLARLSLPVWQQMTPRLLADHLELMPAFVAGFDPERPPVHVRRLLLRPSRMRPPPFALEHLPLPPWHTLADLAAGLGLELSMLEVLAGPAQRFREADPTPHRPRVQATAHYRSLLVDKRSGGLRLIEAPLPALKAVQRRLLRTLLDRVPVHEAAQGFVAGRNVAGHARMHAGQAWVFRFDLKDFFPSIGAARIRALFRTLGFTEAVADTLTTLCTVRTPRAVRERLRDEGGLSWLEARRLASAHLPQGAPTSPVLANLCAFALDLRLDGLAVRFNAQYSRYADDLVFSGPTTEGLDAVSLHAWVRAIVEDEGFVLRADKTRLMRAGGRQTVTGLVVNETPHLSRPDYDRLRAQLHRLGHEAQVPMSLRAPLLGRLAWARQFVAPSRAEKLQRLFNAIAFVQ

SEQ ID NO: 5418 - protein, 475 aa, Roseateles sp.
  source 1..475: note = Related to FOAV01000002.1
MTLAAPLTYHRWIALALARAIQADDDQPQGREAHALLGRTSECLGKEHVPWLRALCQALARMTKPQWDRFTTHTLADHLESMHEFFGWAHVRGDGDPDDESEEDPDGEPFPTPRVRRLLLRPARMTARPYALEALELPVWHTLPDLANGLGIDLDMLEVLAGRAHHYRDAVATPLRPHVRATHHYRSLLVPKRREGMRLIEAPMPALKAVQRRLLDVLLARVPVHEAAHGFVTGRNVASHAAAHTGQHWVLRLDLQDFFPSIGRARIAALFRTLGYAEGVADRLTTLCTVRTPVNVRERLRDAGAIDFHGAKRLASPHLPQGAPTSPHLANLCTFSLDLRLEGLAYRFGAHYSRYADDLVFSGSRDTRLAPTALHAWVRTIVEEEGFRLRRDKTRLMRAGGRQTVTGVVVNLKPNLSRPDYDRLRAELHRLSHQAAVDGALRSPLLGRLAWAQQFVAASRAAKLRRLFGAIRFVP

SEQ ID NO: 5419 - protein, 449 aa, Ramlibacter sp.
  source 1..449: note = Related to JACORT010000001.1
MTRSSSYRNWIATALAHAFLADAAQAGGRSAEALHARAVQCMGEDAPWLRALAASIATEFSRRRDAHTVPTLSAWLCELPQLDDAFDPEREHPRVRRLLLRPARMVRAPCALEGLRLPRWDTPADLAAWLGVPLERLEWLVGRAQDFRETQAGRTRSAHYHPLLKAKRSGGLRLIEIPKPALKQVQQKLLSGLLDAIPTHESVHGFVRGRSAISHAREHAGRAVVIAFDLRDFFNSIGVARVRALWRTLGYAEGVAEALARLTTTRTPLAVRERLVEAGGIDFMAAKRLASRHLPQGAPTSPALANLCAFGLDLRLDGLAWRFGAHYSRYADDIVFSGPRELAARSRNLQAWVEAIVRAEGFTLHPGKTRRMRAHHRQQVTGVVVNERPNVARDAYDRLRARLHSCAASGCDAETWMQLQGQVGWACQLVAASRAEKLQRMLAAVPVRR

SEQ ID NO: 5420 - protein, 450 aa, Ramlibacter sp.
  source 1..450: note = Related to RKMB01000020.1
MTHSYRHWIATGLAHALMADADQPGGQSAQALQARAQQCMGTRGTWLKPLAEAVAREFARNPRHHTVATLADHIFELPQFDAAFAPGQPRPRVRRLLLRTARMAAPPFELAGLELPSLPTLTDLAAWLDVSLERLQWLIAPSQNFRETEPAPGRANVPPGLHYHALLKPKRSDGLRLIEIPKPDLKRVQRRLLSGLLDRIPVHECVHGFSKGRSVLTHAAEHTGQAVVICHDLRDFFNSIGIARIRALWRTLGYPEGVSAALAALCTARTPRAVRERLLECGSIDRRGAARLASPHLPQGAPTSPALANLCGFALDLRLDGLAWRFGARYSRYADDLAFSGPADLMPRRRNLQAWVQAIAHAEGFALHPDKTRAMPSHRRQRLTGVVVNERPNLERCAYDRLRAQLHALAALGCDEATRMRLQGQVSWASQLVCGSRARKLDRLLAAISS

SEQ ID NO: 5421 - protein, 466 aa, Ramlibacter sp.
  source 1..466: note = Related to JAHBZO010000019.1
MPKPNHSYRRWVATGLAHALLADAHKPGGATSQALHARAIQCLGADHPWLLPLIAAMGPHSVGQWRRHSVASLAEYIDQLPAFDAAFLGQDSHPHIRRLLLRPDRMLAPPFELAQLGLPRLASHADLAQWLGISPERLQWLIEPAQNFRESEAAPGQPHCHPGRHYRQLLKQKNSGGLRLVEAPKSELKRVQKRLLSGLLNKIPVHEKVHGFVRGRGVLTHASEHAGRHTVLAFDLSDFFSSIGVARIKALWQTLGYPEAVARALAALCTTRTPLAVRQRLMDAGGINFFQQRRLASAHLPQGAPTSPALANLCAFMLDLRLDGLAWRFGANYSRYADDLVFSGSELLARDQRKLTGWVAAIVEAEGFRVHPRKTRVLLKYGRQRVTGVVVNTRPNLGRDDYDRLRAELHRLAGADRLDKGVKQRMWGRISWACQTVCASRAAKLYRLFEALPNDHQGAGYDASTS

SEQ ID NO: 5422 - protein, 455 aa, Aquabacterium terrae
  source 1..455: note = Related to NZ_JABRWJ010000001.1
MPASSTYRQWLARALAHALLADALLPGGCLRDALLARAASTLGKRPAWLAGLVDALLPFDPLREDVQALGRRIAVLPAFDPAFDAEHPPRIRHLILRPATMLRRPLGLHELELPALATHADLASWLGLDSEQLAWLAAPARAWRPPGAGGRAAATHYRCLLMPKRSGGLRLIEAPMATLKAVQRHLLDGLLDHVPAHEAAMGYVSGRSVIDHAAAHAGRAVVLRFDLRDFFNSIPASRVHALWHTLGYPDGAARTLTALTTARTPVALRERLQDDGGLDVLGAKRLASAHLPQGAPTSPALANLCCFRLDLRLNGLAKRFDASYTRYADDLVISGPAACAKRRRELQAWVEAIVRDEGFALQPRKTLTMPAHQRQQVAGIVVNAHPNLDRASFDRLKARLHRCTRDGPSPADDPQQLRGQLAWVTQLNPARGAKLQKLFEGIRWLNVAPSSTPVR

SEQ ID NO: 5423 - protein, 474 aa, Variovorax paradoxus
  source 1..474: note = Related to NZ_CP045644.1
MPPPPSSIGLITFMTRELSYREWLSRSLARALLADARQPGGTAPDALHARAAATLGTDAAWLKPLAEVLGKRSQATWQRTDLPALAKAIHDMPELDLAFAQDELPHVRRIILRPAQMLPRPLGLDHFALPEVPTLADLARWLELEPDRLAWLTSATQVFREPDASSPCPASHYRYQLQPKRLGGLRLLEIPKADLKRAQRRILDDLLQHVPVHEAAHGFVQGRSVASHAAAHAGKDVVIGFDLRDFFPSVRASRVHAMWRTLGYPEGVARALTALCTHRTDSAVIERLRDDGGLDWLGAKRLAAPHLPQGSPCSPALANLCAFRLDLRLEGLAWVFGATYTRYADDLVFSGPATLRAQFTALRAWVSGIAADEGFALHPRKVRCMPQHRQQRVTGVVVNDKANAPREDFDRLKAVLHRCVMHGPAAQNHAKLDDFRGHLLGHIAWIGQFSPTRKVRLMRLFDRIDWPDAAQPPS

SEQ ID NO: 5424 - protein, 462 aa, Variovorax sp.
  source 1..462: note = Related to NZ_CP046508.1
MTTREPSYREWIARGLAHALLADARQPGGTTPDALRARAEAALGANPPWLTLLAEDLGKRSLATWERTDLPGLTQAILETPALELAFEQDEPPRIRRLILRPADMFPRPMGLDHFALPRLPTFANLAQWLEIEPDRLAWLTAASQAFRAPDASSPRPASHYRYQLQPKRLGGLRLLEIPKADLKRLQRRILDDLLQRVPAHEAAHGFVQERSVASHAAAHVGQEVVIGFDLRDFFPSVRASRVHALWRTLGYPDGVARALTALCTHRTSAAVIERLRDDGGLDWMGAKRLAEPHLPQGSPCSPALANLCAFRLDLRLEGLAWAFGATYTRYADDLVFSGPATLREQFNALRAWVDGIAADEGFALHPRKVRCMPRHHQQRVTGVIVNEKANTPRVDFDRLKAVLHQCVLHGPASQNRAKVTDFRGHLLGHIAWIGQFNPARKARLMRLFERIEWPAVSQPPG

SEQ ID NO: 5425 - protein, 502 aa, Variovorax guangxiensis
  source 1..502: note = Related to NZ_RXFT01000006.1
MASHSGAQAALRIRADQLAHHRLVEGPGATTFIGFAASGFMTRELSYREWIARSLARALLADAKQPGGTDPGALRARAAATLGADAPWLKPLAQALGNRSQATWRRTDLPALARAIHDMPEFDAAFEQNEPPRVRRIILRPAQMLPRPMGLDHFALPHIPTLAELAQWLELDADRLAWLTSAAQAFRAPTDPDTRQPASHYRYQLQPKRLGGMRLLEIPKADLKRAQRRILDDLLRHVPAHEAVHGFVLGRSVASHAAAHAGKEVVIGFDLRDFFPGIRASRVHATWRTLGYPEGVARALTALCTHRTDDAVIERLRDDGGLDWIGARRLAAPHLPQGSPCSPALANLCAFRLDLRLEGLAWVFGASYTRYADDLVFSGPASLRAQFNALRAWVSGIAADEGFELHPRKIRCMPRHRQQRVTGVVVNDKANTPREDFDRLKAVLHRCATQGPASQNRAKVDDFRGHLLGSIAWIGQFSATRKTRLMRLFDRIDWTDATQTPS

SEQ ID NO: 5426 - protein, 454 aa, Variovorax sp.
  source 1..454: note = Related to FOLP01000001.1
MSRSLARALLADARQPGGTAPGALRARAAATLGADAPWLKAFAEALGQRSQATWQRTDLPALARAIDDMPAFDAAFAQDEAPRVRRIILRSAEMFPRPLGLDHFALPRIPTLAELAQWLELDAERLAWLTSPAQALRTSHEHDAPGTAPASHYRYQLQPKRLGGLRLLEIPKADLKRARRRILDDLLQHVPVHEAAHGFVQGRSVASHAAAHAAKEVVIGFDLRDFFPAVRASRVHATWRTLGYPDGVARALTALCTHRTGAAVIERLRDDGGLDWMGAKRLAAPHLPQGSPCSPALANLCAFRLDLRLEGLAWVFGATYTRYADDLVFSGPASLRARFTALRTWVGGIAADEGFELHPRKVRCMPQHRQQRVTGVVVNDKANAPREEFDRLKATLHRCALHGPAGQNRAQVPDFRAHLLGRMAWVGQFNPARHARLLRIFERIAWPSASPTPS

SEQ ID NO: 5427 - protein, 460 aa, Variovorax sp.
  source 1..460: note = Related to FOWG01000009.1
MTREPNYREWIARSLARALLADARQPGGTAPGALRARAAATLGSDAPWLAPLIEALARRSPATWRRTDLPALAQAIHDLPEFDAAFEQDEPPRVRRIILRPAQMFPRPLGLDHLALPALPTQAELARWLDLDPQRLEWLASPAQAFRTPQGTSPAPARHYRYQLQPKRLGGLRLLEIPRPELKRAQRGILDALLARVPVHEAAHGFVPGRSVASHAAAHAGKAVVIGFDLRDFFAGVRASRVHATWRTLGYPDGVARTLTALCTHRTDAAVIERLRDDGGLDLMGGKRLAEAHLPQGSPCSPALANLCAFRLDLRLEGLAWVFGATYTRYADDLVFSGDESLRLRFDALRAWVGGIAADEGFELHPRKLRCMPRHRQQRVTGVVVNDRPNAPRADFDRLRALLHQCTLHGPASQNAAGLADFRGHLLGRIAWFGQFSPTRQARLRRLFDRIEWPAGAAPA

SEQ ID NO: 5428 - protein, 474 aa, Polaromonas sp.
  source 1..474: note = Related to FPBM01000001.1
MRETRFRHLIARGLARALLADAGKPGGTALPALQARAAAALGQRPAWLRELLQPLTLLSPITWQKFDITSLARRLEDSPAFGLAFGDEDDDEDEDGEADSSEPQASQAIDDRDDPEPERPPRIRRLILRPPAMRPRPLGLQACTLPDITTDADLARWLQLSREQLRWLAPATRPVVEHYRYSLQAKQAGGLRLLETPKVELKRVQRHILHALLSEVPVHEAAHGFTAGRSVKTHAAAHVGQAVVIRFDLRDFFGSIGAAQVNAVWRTLGYPEGVARSLTALCTHHTAGMVIERLRDDGGLDWMGAKRLASAHLPQGAPTSPALANLCAFNLDLRLEGLAWVFGASYTRYADDLVFSGPASLRLQFRALHAWVAEIVRDEGFALHPDKTRCLPRHQRQRVTGVVVNVRPNVPRDDFDRLKACLHQSALHGQASQNKERLADFRSHLLGRIGWVGQFSMTRQARLMRLFDKIDWAN

SEQ ID NO: 5429 - protein, 462 aa, Rhodoferax sp.
  source 1..462: note = Related to FNJA01000002.1
MRDISYRTWIARSLARAMLADSDQPGGTSAAALQARAAATLGDNPAWLHTVVAPLAQLPAVSWQKMDLDSLTQRILAPAPRQPTVVDDENDDEEIQAESPFDAAFANGARPHIRRLILRPASMQPRPLGLEGCELPDLPTVHDLAEWLKMPLDRLAWLGPETPLGAEHYRYKLLPKRTGGLRLLEIPKVDLKQVQRAVYSGLLQHVPVHEAAHGFVPGRSVATHAAMHAGQAVVIRFDLRDFFGGIGAARVMALWRTLGYPIGVARCLTALCTHRTARMVVDRLRDDGGLDWLGAKRLRSAHLPQGAPTSPTLANLCAFGLDLRLDGLAWAFGARYTRYADDLVFSGPAALRPQFRALQAWVAAIAEDEGFALHPAKNRCLPQHRQQRITGVVVNAQPNTPRQDFDRLKACLHQCVHQGPASQNHANLVDFRGHLQGRIGWVGQFNAARAAKLMGLFEQIRW

SEQ ID NO: 5430 - protein, 452 aa, unidentified
  source 1..452: note = Related to JACRAZ010000105.1; note = Burkholderiales bacterium
MPPSTHRLWIARGLAHALQADCQQPGGTEAHALLARATRALGHRPPWLPPVIEALGAAAVRRLDLQGLSERIAGLPAFDAAFAPGQPAPRIRRLMLRPPHMAGAPLGLHEAPLPALTTHEALGDWLGLAPERLAWLVSEAQHYREPPGGRPGAARHYHALLRPKRLGGLRLIEAPKAELKLAQRRLLDGLLNAVPVHEAAQGFVPGRSVRAHAQAHAGAPVVLRFDLQDFFPSVPASRVHAIWRTLGYPAGVARALTALCTTRTPAAVRARLREAGAIDGGGAQRLAAAHLPQGAPTSPALANLCCFRLDLRLAGLAAHWGARYTRYADDLVFSGPAVLRERRLALTSWVGGICADEGFTLHARKTRCMPQHRQQCITGVVVNQHPNLPRDEFDRLKACLHRRLLHGATDAAEREALRGRIAWAAQLNPARGEKLLALFAQIRWPQPGSVPG

SEQ ID NO: 5431 - protein, 446 aa, Aquabacterium sp.
  source 1..446: note = Related to SCTQ01000267.1
MRSWTYREWIARGIARALLAGDDRSMPALRSRAAQALGGSPPWLGHFLGRLKSMDAGIWARTDLDALTWRLLRGETLSRAVGAEDRPRIRRLMLASPVMLPPPMGLDVLGLPALPTTGDLADWLGLTVDRLDWLAGEQLDWREDARRARHYVLHASPKSAGGLRLIESPKPELKRAQRRLLAGLLDRVPVHEGCHGFVRGRGVRSHAQVHAGQALVLRLDLQDFFPCVRAAQVRAVWRTLGYPREVAEVLTRLCTTRACAADLRPLRAAGRLEWTAAKRYAARHLPQGAPTSPMLANLCAFDLDLRLDGLAQAFGGEYSRYADDLAFSFAQPLGGRQAAFHAWVAAIAKDEGWSLHPQKSRAMPAGAQQRVTGLVVNEKPRPARVDYDRLKAVLHQCTLHGPASQNHAQVEDFRAHLLGRIAWIAQGSEARARKLQALFERIAWTG

SEQ ID NO: 5432 - protein, 401 aa, Rhizobacter sp.
  source 1..401: note = Related to NZ_LMDI01000005.1
MAQRCADMPGERWRRLTVRSLATWIEQDGHYDDGWRAHEKPHARRYILREAAVMQPLPVGLEQCQVPYWPHVGALADWLGVPAAGLWRLTRAPQWQRQAPLGEQHYHAQLLAKRTGGWRLLEVPAPHLMPLQRRVLDDLLDRIPPHEAAHGYTRERSARSHAAAHTGQAVVLKFDLQDFFTTVRPSRVSALFAKLGYSEEVARALTALCTTATPEPVLRRMHEAGQLTWEQLQRLRESHLPQGAPTSPALANLCAFRLDLRLDGLAFALGARYTRYADDLVFSGPTHLATARERITARITRIVVEEGFSLNTRKTRCQKAGGRQSVCHIVVNERPNLPRDEFDRLKAILHLCVRDGASRQNRDAHPDWQAHLRGRVAWATQLNPAKGLRLKRVFDRIDWGV

SEQ ID NO: 5433 - protein, 444 aa, Rhizobacter gummiphilus
  source 1..444: note = Related to CP015118.1
MASLVRLTALALARALQVGQRTPDGMAARIRACLGAEASWCGPLVERCAAMAGERWRRLSVRSLADLIERDQGFHFAWIAHEPPCVRRYLLREADRMNPLPLGLDRCQVPFWPHAGALAAWLGIGTGGLWRLTRPSDWQRRTPMVEQHYRSHLRPKRTGGWRLLEVPEPYLMPLQRRVLDDLLDRIPPHEAAHGYTRERSVIDHARRHCGQAVVLRFDLKDFFTAVKASRVHALFTTLGYPEEVARALTALCTVATPEPALRRLRAEGGMDWEQVQRLRDPHLPQGAPTSPALANLCAFGLDVRLAHLATSLGARYSRYADDLVLSGPARLRTAFARIERHVSRIVIEEGFALNPRKTRCTGAGRRQTVCHVVVNDRPNLPRDEFDRLKAILHQCVRDGPATQNRENRPDWRAHLRGRVAWATQLNAAKGARLARLFERIDWAA

SEQ ID NO: 5434 - protein, 434 aa, Ideonella sp.
  source 1..434: note = Related to PTEU01000001.1
MARAMQAGPRTPQGLAARMRACLGCAEHPWITALSARCARMAAERWQRLSARALAGLIERDAGFEHAWQQDPRPFVRRYILRPGGHLRTAPLGLDTVERPAWTDEAALAQGLGLSDAALWRLTLPTPWQRAAPLSQQHYAWRWQLKRHGGWRPLEVPAAYLRAAQRKLLKHLLDGIPPHEKVYGFVRGRSVIDHAQVHTGQPVVIKFDLQDFFTSIKASRVHALWTTLGYPETVATLLTRLCTVATPEPVLQRWRQEGGATWHQVLRAREPHLPQGAPTSPALANLSAFRLDLRLDGLAQAYGARYSRYADDVVISGPRALLAARGRLEAAVQGIVEAEGFALNQRKTRCETQASRQTVCHIVVNQRPNVARSEFDRLKAILHGCLREGPSAHNRAGLADWRAHLHGRVAWVAQLNPAKAKRLQAMLQHIDWAL

SEQ ID NO: 5435 - protein, 416 aa, unidentified
  source 1..416: note = Related to DXIO01000116.1; note = Candidatus Aquabacterium excrementipullorum
MHACLDNKPSWCKPLAERCAQMPRERWRRLSVRTLASLIEEDIGFAHAWLAHQKPGVRRYILRVRQGMGSLPLGLHRCQLPYWPNTGILGPWLGVSAGSMWRLTRPSAWQRRMPLGEQHYRCLLLPKRTGGWRLLEVPHPYLMRLQRQLLDHLLDRIPAHEAAHGYVRERSVVHHAQAHAGQAVILKFDLQDFFTSVRASRVHALFHTLGYPDSVARELTALCTTATPEPVLRRLHQEGQLPWHRLQQLREPHLPQGAPSSPALANLCAFRLDLRLDGLAHALDARYTRYADDIVISGGTGLRASYQRIAQWVARIASEEGFALNFRKSRCQTIGSRQTVCNIVVNQHPNLLREEFDRLKAILHNCVRHGPASQNRDAHPQWQMHLKGRLDWASQLNPGKAERLQRLYARIDWKQP

SEQ ID NO: 5436 - protein, 447 aa, Ideonella azotifigens
  source 1..447: note = Related to NZ_JAJNKD010000019.1
MTSVRRFTALAMARAMMAGPPRVDGLAARLQACLGRKAAWYRSLAERVAQLPGEHWRAATPQALNRLADLVEADDSFEAAWLAHERPQVRHYFLELPGGMQPRPLGLDELELPDWPDVPALSRWLGIPAAGLWRLTLARERQRKQPLGQQHYRSQLLPKRSGGFRLLEVPEPYLMALQRKLLDAVLNRVPPHEAACGYTPGRSVLDHARAHAGQAVVLKFDLQDFFASVRHSRVHALFATLGYPAAVARALAALCTVATPEPVLHRRHQAGSLSWPQLQRLRDAHLPQGAPTSAALANLCAFRLDLRLDGLAFALGARYTRYADDLVISGGAELGGLAERVERWVGRIALEEGLALNHRKTRCQTAGRRQSVCSIVVNQRPNLPRDEFDRLKAVLHQCVTAGPAAQNREGHADWRGHLQGRVAWAAQLNPAKAAKLQGLLAQIDWAR

SEQ ID NO: 5437 - protein, 445 aa, unidentified
  source 1..445: note = Related to nan
MPSIQRVTALAIARALLAGPQEPGGLAARVRLCLGTGACDWHGELAARIAKLSALHWQYLTPRALARLVEIDPGYQHAWISDERPTAHRWILREAQGPRPAPLGLERIQRPAWPHAGALAAFLGMPIEGLWRLTLPADRQRRRPLAEQHYRCRLLAKRSGGMRLLEVPEPHLMAVQRRLLDALLDFVPPHEAAFGHARGRSVVDHAAAHAGQAVVLKFDLRDFYSSVRASRVHALFATLGYSDEVARALTALTTVATPEAVLRRLREAGSLTWEQLQRLRDPHLPQGAPTSAALANLCAFGLDLRLDGLAYALGARYTRYADDLVLSGGPELARWRDRIERWVGRIAREEGFALNHRKTRCQRSGARQTVCSIVVNAKPNLPRAEFDRLKAILHRCVVDGPAAQNRDGIERWREHLAGRIAWAAQLNAAKAARLQSLFARIDWER

SEQ ID NO: 5438 - protein, 437 aa, unidentified
  source 1..437: note = Related to JAEKKG010000289.1; note = Burkholderiales bacterium
MSHRTTAIAIARAVLATPVSRSQILERMARCTGFSEATDRALVDGLLEAGLASHWTIAQVADALGADPFFQATCQETRHRPLIRGWFMTRASTLAAPPVPLRAVERPAWPGVGHLADDLGVSAEGLWRLTRSASWQRQAPLALQHYRYELLPKRTGGWRLLEVPEPYLRTLQRRVLDRLLAHVPPHEAACAYVRGRSVADHARAHVGQAVLLKFDLQDFFATVRASRVQATFATLGYSQPVARALARLCTTATPEPVLERLRIEGGLAWTQAMRLRDAHLPQGAPTSAALANLCAFRLDVRIAALARTLGARYTRYADDIVLSGDAGLLRAADHVEARLGAFALDEGFALNHRKTRRVTRARRQQVCNIVVNARPNLPRDEFDRLKAQLHLCATRGAAAQNRAGLPDWEQHLRGRVAWAETVRAACREFWTADAGTP

SEQ ID NO: 5439 - protein, 436 aa, Pelomonas sp.
  source 1..436: note = Related to JAJTWU010000010.1
MGHARMMTARALAHAMLAGAPREEALAARMAACLDARPPWLADLARAMARVPGEVWQRLDVAALGERVEAHAGFADAWVSDARPDARRWLLRSPEDLPPAPAGLARPHWPTVGTLARGLGLTPAGLWRLTLPADWQRRRPLAHQHYRQQLVPKRSEGWRLLEVPAPHLRAIQRRLLAQLLSGLPPHDAAFGYTPGRSVVEHAMRHAGQARVLRLDLSDFFSTVRAARVHALFRTLGYSAAVARALTALCTTATPEAWLRAEPRLAFLQRQRLRDPHLPQGAPTSPAVANLCAFALDARLTGLAEAFGARYSRYADDLVFSGPASLPVRTLVAWVTAIAEDEGFAVNPNKTRAQGVAQRQSVCGIVVNERPNLPRDAFDRLKATLHRCVVDGPAGQNREGHADFRAHLQGRVAWAAQLNPAKARKLQALFDRIDWRA

SEQ ID NO: 5440 - protein, 438 aa, Pelomonas sp.
  source 1..438: note = Related to NZ_LMFP01000011.1
MDAARTTTARALARAMLAGPHEAGGLAARMAACLDARPPWLAALAEAMARVPGEVWRRLDVATLARRVDAHDGFAEAWFSAARPEARRWLLRAPDAPAPAPAGLERPDWPTVGALARGLGMTPAGLWRLTLPTDWQRCRPLAQQHYRQALIPKRGEGAGWRLLEVPEPHLRAVQRRLLAQLLNGLPPHDAAFGYARGRSVVQHAARHVGQGRVLRFDLGDFFSTVRAARVHALFKTLGYSTAVARALTALCTTATPEAWLRAEPRLGWLQRQRLRDPHLPQGAPTSPAVANLCAFALDARLTGLAERFGARYSRYADDLVISGPAALPVRSVGAWVAAIAEDEGFVVNPRKTRSLGIAQRQSVCGIVVNDRPNLPRDEFDRLKAVLHRCVVDGPAGQNRDGHADFRRHLQGRVAWATQLNPGKAEKLKALLDRITWPG

SEQ ID NO: 5441 - protein, 438 aa, Pelomonas sp.
  source 1..438: note = Related to JAJTWT010000006.1
MDHARRMTARALARAMLAGARREDALAARMAACLDESPPWLAGLAAAMARMPGEVWRRLDVDALAARVEAHEGFLEAWCGDGRPEARRWLLRPPQEPGAAPAGLERPHWPTVGALARGLGMTPAGLWRLTLPADWQRRRPLARQHYTQRLCPKRGDGAGWRLLEVPAPHLRAVQRRLLTQLLDGLPPHEAAFGFTRGRSVVQHAARHVGQGRVLRFDLADFFSTVRAARVHALFATLGFSTAVARALSALCTTSAPEAWLRQEARLPWLQRQRLRDPHLPQGAPTSPALANLCAFALDARLSGLAAAFGARYSRYADDLVISGPAALPVRAVSAWVAAIAEDEGFVVNRRKTRSLGAAGRQSVCGIVVNEHPNLPRDAFDRLKAILHRCVVDGPAGQNREGRADWRAHLQGRVAWAAQLNPARGARLKALFDRIDWHR

SEQ ID NO: 5442 - protein, 432 aa, unidentified
  source 1..432: note = Related to JAACZV010000015.1; note = Comamonadaceae bacterium
MTARALARAMLAGPRDAAGLAARMAVCLGERPPWLAALAQAMARVPAEVWRRLEVATLAERVEAHEGFAAAWAGEARPRARHWLLRPPDELAPAPAGLERPHWPTVGALARGLGLTPAGLWRLTLPVDWQRRRPLVQQHYRQALVAKRGDGAGWRLLEVPAPHLRAVQRRLLAQLLDGLPPHEAAFGYAAGRSVVQHAAQHAGQARVLRLDLSDFFSTVRAARVHALFKTLGYSTATARALTALCTTAVPEAWLRGEPRLSWPQRQRLRDPHLPQGAPTSPALANLCAFGLDARLAGLAARLGARYSRYADDLVFSGPASLPVRQIAAWVSAIAADEGFTVNPRKTRSLGVAQRQAVCGIVVNAHPNLPRAEFDRLKATLHRCVVNGPAGENRDGHADWRAHLQGRVAWAAQLNPAKAGKLSRLLARIDWSR

SEQ ID NO: 5443 - protein, 430 aa, unidentified
  source 1..430: note = Related to JAEKLF010000057.1; note = Burkholderiales bacterium
MTARALAHAMLAGPRFEAALAARMAVCLDEQPPWLAGLARAMARVPGEVWRRLDVQTLGERVEAHEGFAEAWFGEHRPEARHWLLRSPDELPPAPAGLERPHWPTVGALARGLGMTPAGLWRLTLPPDWQRRRPLAQQHYRQQLIPKRSAGWRLLEVPAPHLLAVQRRLLGQLLNGLPPHAGAFGYARGRSVVQHAALHAGQGRVLRFDLSDFFSTVRASRVHALFKTLGYSAAVARALTALCTTSTPEAWLRAQGRLDWQQCQRLRDAHLPQGAPTSPALANLCAFALDARLAGLAEQFGARYSRYADDLVISGPAALPVQAISAWVAAIAADEGFVVNPRKTRSLGVAQRQSVCGIVVNTHPNLPRDEFDRLKATLHRCVVDGPASQNRDGHADWRAHLQGRVAWAAQLNPAKAERLRKLLGRIDWAR

SEQ ID NO: 5444 - protein, 447 aa, Paucibacter sp.
  source 1..447: note = Related to QAJN01000008.1
MARLSRLTALALARALLAGPHQAQGLAARMTNCLGLGLEPRPWLETLALRLARMPGERWARLEPRSLATLIEKEQAFRDACASAAPPRPQRYLLRPREHKAGAPLGLEACDLPDLPHVGALADWLGLPLGGLWRLSKPRDWQRREPLSAQHYRFQLMAKRSGGWRLLEVPEPHLMGVQRKILRGLLQQLPLHEAAMAYAPGRGVREHAALHAGQAVLLRYDLCDFFAAVQAARLRALFLTLGYPHEVAVSLAALCSVATPEPVLRRMHEAGQLTWTQLQKLRGAHLPQGAPSSATLANLCAFRLDLRLDGLAQALGARYSRYADDLVFSGPQHLRQAQARISAWVGRIALEEGFALNHRKSRCLSAGGRQMVCGVVVNALPNLPRAEFDRLKALLHQCVLHGPASQNRQQHADWPAHLRGRVAWAAQLNPAKAQRLQALLARVDWTR

SEQ ID NO: 5445 - protein, 446 aa, Rhizobacter sp.
  source 1..446: note = Related to LMHL01000001.1
MYASRLRHLDALALARALWAGPQTPASLKARAEQALGASPHWLADFIDELPTVSGATWQRQEVDDLAARIEQTRAFVNAPRVPGLPFVRRWILRASRMRPAPLGLDDLDLPPLPHSAAIADWLGITLDDLDWFTHDRRPALPLHAQHYAFTLQPKRSGGGRLIESPRSRLKALQGRALHELLDKVPVHEACHGFVAGRSVLTHARLHVGQPVVLHFDLKNFFGHILSSQVAAVFHTLGYPPGVARQLAALCTVSTPEPVIERLRDDGWVDWQDARALRRAHLPQGAPSSPMLANLSAFQLDLRLDGLAHVLGATYSRYADDLVLSGPPSLRNSFDRIAAWVGRIALEEGYALNHRKTRMATQASAQRVCGVVVNAHPNLPRREFDRLRAVLHRCALHGPASQNRDGHADFRAHLWGRVQWATQLNAAKAPRLHALWSRIEWIASPA

SEQ ID NO: 5446 - protein, 443 aa, Rhizobacter sp.
  source 1..443: note = Related to FRCQ01000002.1
MHAHRHRHLNALALARALWAGPQARTSLRARATHALGHEPAWLTLLLDELQPVSEATWQRQSVEDLADRLERTDTFADAVRTTPRPFVRRWILRASRMHPAPLGLEGLGLPPLPHSAAIAAWLGITLDDLDWFTHDRRHLLPLQSQHYGFTLQPKRSGGGRVIESPRSRLKALQGRVLHDLLDKVPVHEACHGFVTGRSVLTHARLHTGQPVVMHFDLKNFFGRILSSQVAAVFHTLGYPRGVARQLAALCTVSTPEPVIERLRDDGWVDWQDARALRRAHVPQGAPSSPMLANLCAFQLDLRLDGLAHVLGATYSRYADDLVLSGPASLRSAFERIATWVGRIALEEGYALNHRKTRLATQASAQRVCGVVVNEHLNLPRAEFDRLRAVLHQCALHGPASQNRDGHADFRAHLWGRVQWATQLNPAKAERLQARWQRIDWAP

SEQ ID NO: 5447 - protein, 354 aa, unidentified
  source 1..354: note = Related to VBCX01000083.1; note = Betaproteobacteria bacterium
PLGLHDLLLPELDHTEALAQWLGVSLETLRWFTACPPRRRHADLQRQHYAFRLLPKRSGGGRLIEAPRSRLKALQRRILDGLLDAVPVHEACHGFTRDRSVLTHARVHVGQPVVIRFDLMNFFASITAAQVRATFQTLGYPAGVAQDLTALCTLLTPEPVIARLQDDGWLDWHQARCLRSPHLAQGAPSSPILANLCAFQLDLRLAGLADTMGARYSRYADDLVFSGPASVGSSFDRLAAWVGRIALEEGYTVNHRKTWLASQATQQRVCGVVVNQHPNLPREAFDRLRALLHQCATHGPASQSDRALDEFRLHVLGRMTWAEQINPSKARRLRKLFDRIVWDAAPAQELPQSG

SEQ ID NO: 5448 - protein, 438 aa, unidentified
  source 1..438: note = Related to JACKEI010000001.1; note = Sandaracinaceae bacterium
MTRDRRTGSRLELLALACLELWQDVVSAGWPPSDTLLTALERVFDDVPAPLRTAARAVTPADLGLPPTAGVADAEAVAARLGALLDPEAQELLARLPVRRVPLPPLSNDARVLAPADVAQRLGLRWDELMWLADPQERLRRGAPEQGHYRYVRVPKRRGGERLLECPRPRLLSVQRAVLRRFLEPLVPHDAAMGFRPGVGFVDHAALHAGQAVVLRLDLASFFQTVRRALVVRALMHGGLARPTAQLLGAIATHVTHPSALRGVSESERARLRSPHLPQGAPTSPALANLVCRRLDARLTGLAASVGARYSRYADDLVLSGGGHLARDAERLVTTVGAIAIECGFTLNMRKTRVMRASQRQQLGGVVINAGPSLPRHELERLEATLTNCVRHGVAGQNRAGVPDFRAHLQGRVAWARALRPSRGDALARIFEQIDWST

SEQ ID NO: 5449 - protein, 429 aa, unidentified
  source 1..429: note = Related to JACKEJ010000006.1; note = Sandaracinaceae bacterium
MALRLEALALSAVEQHASREDGSTLADALDHIATDASPRLRRACRRVPLSALSAELAHPPVDLDRLMRAIGARLSTRARSELATLRVRRFPLVSLGDPAQPFPSFGPSGLDTRLGLSSTELHWLADPQCRRDRLTVTESHYRYVVVPKRRHGVRLLECPLPRLRRAQRALLDEVLAPLPVHPCAAGFRRGMGFVEHAARHAGQDVVLRVDLRDFFPSIHRGMVVRALVDGGTPLATAHLAAALATHTTHRDVARRFDGSTRARLRSAHLPQGAPSSPALANLVCRRLDARLHGLAESLGATYSRYADDLVFSGPRHLLDDAARIVSLVGRIASSCGFALRPEKTRVMSAAQRQSLGGVVVNTRPTLARPELERLEAILTNCVRHGPAGQNRADVADFASHLRGRVAWVEQLHPARGAKLRNLYAQIAWG

SEQ ID NO: 5450 - protein, 445 aa, unidentified
  source 1..445: note = Related to JACRCU010000218.1; note = Deltaproteobacteria bacterium
MNASRPLWRHRLARALAAAFLCGPWRHAELVARGAACLGEKPPWLPIAARWTRHAFPSPPASIEPVVERLLRLPSFQLATTGRPPTPKWRKAFLYVPPDPVARFAVPPLPSDGALARWLAIPEPLLAWLADVRGLNRRTAEARLHNYHPRWLPKAHGGVRLLEEPKPLLKQAQRRILAGLLAHLPPHAAAQAFCSGRSVHSHAALHAGQAVVIRIDLADFFGSIGRARVRALFEAAGYPRPVARSLAGLCTTATPPLVVARLPRPVDAAEVPYAASQRRHLLAPHLPQGAPTSPAIANLCAWELDVRLTALATTFGARYSRYADDLTFSGGPEVARRAGHLVELAMFAAYACGFAVRHGKTRVVRSGARQVVTGLVVNERPHVARAERDQLKAILHNCVRHGPAGQNRENHPDFRAHLLGRLGWVAAGDPRHGAKLRALFDRIAW

SEQ ID NO: 5451 - protein, 334 aa, unidentified
  source 1..334: note = Related to JACKDN010000045.1; note = Myxococcales bacterium
DAGVPPLPTPGDLAAWLGLTTDRVDWLADRLRPEERPAAGAVHYHHRWKGRRLIEAPKRTLRSVQRRILDGILADVPPHPAAVAFRPGVSVVDGAARHVGQPMVVRFDLRDFFASVRRARVRAIFARLGYPDPVADLLANLTTHATPAAVFDAVAPRDAEAHRAHVERRRRFAERHLPQGAPSSPALANLSVYGLDCRLAALARTLGATYTRYADDLVLSGDFAPNPVVRLVDRIVRSEGFALNAAKTRVMAASQRQRVTGVVVNARPNVARADFDRLKAVLTNCARHGAASQNRDAHPAWQAHLEGRVAWVASVHPERGARLRALLAQIDWSA

SEQ ID NO: 5452 - protein, 417 aa, unidentified
  source 1..417: note = Related to JACKIB010000005.1; note = Planctomycetes bacterium
MDADTLADAWLSGDWTLAGMRSRTQRLIHPDRLSKSLASMILGFWLELRDRPHERRRATLAAAITAHRAFFRIARTNTYGTVLDAPKMVPPPRAWDVLPLDTPATAGAWLGLTATDATWLTDPRGIARHYDRYWSGTRLIEAPRRRLKAAQRRIAAELLAAIPPHEAAHGFRRGRSVLSAVHPHAGREVLVVADLTAFFPSVRVSRVHAMFQRVGYPEEVARFLTRMCTTRCRTLPKAEHEVTPGQAQLYRARHLPQGAPTSPALANLCAFHLDARLAGFASSLGGTYTRYADDLIFSGPAVLGRGGFLATVSTIAVEQGFRLNTAKSRVMRRSQCQLVLGMVVNEAPTLPRAQLELLEAELFRCARRGPPVHHQHGVAWLRDHLAGRVAWAKHVNPRRAQRLVELLAAIDWSGAHS

SEQ ID NO: 5453 - protein, 430 aa, unidentified
  source 1..430: note = Related to MDLA01000158.1; note = Chromatiales bacterium (ex Bugula neritina AB1)
MPPVNKLNFFSKHLAMWLSQADWHFVTLLSTAIECVDELPDDCDSLINELLLRYPEKPSEPALAGHLQSSYRLSSWFKRGQSAPKIMRFNLDSPTFIERDNREYPRIDTPGDLADWLKITPSQLEWFSNCWRFDSNTPRYLQHYQYQLMEKRDGRMRLIEKPKTTLKRLQRKIYQEILSTLETHPAVHGFRKDRNCISHASVHTGKKYLLMFDITDCFQSIHWPMVKVVFKRMGYPDAVSILLTALCTHSVRLKPAQLKLFDTAQRNRLRQRHLPQGAPTSPALTNAALHRLDIRLTGLAHHFGLDYSRYADDLAMSGNTHRDWRFLEPLIGGICLDEGVTLNYKKTRIKKSHQKQRVVGIVVNSKTNIDRNYFDTLKAILTNCTKYGLDSQNRYRHPHFRAHLLGRIQYVKSLNERRGAKLEKLYQAIN

SEQ ID NO: 5454 - protein, 427 aa, Granulosicoccus sp.
  source 1..427: note = Related to JAHQWB010000596.1
MNTKGFFCRHLAIWFYEETWHFTTLLAIFIDVVENLPSDADLLVHETLLEFPDKTSAENIAAFLSRSQRVLHWFSDGADKPAIIRINLQQSPVVKLVNSKLPELNSIGDLAGWLGISIGQLDWLADLKRYDSSRPERFNHYHYRTTEKRDGRLRLIESPKRLLKSIQRQISDDILIYAPVHNAAHGFCKGRNCQSHASNHIGKNYLFLFDLAHCFQSVHWLQVFRVFTQLGYTRTIARYLTSLATHRAYSNHVLLDRLDVDQRIRLRQRHLPQGAPSSPALSNAVLSRLDKRLNGLAKSLRLDYSRYADDLAFSGNEHRDWRFLESLVGAICNEEGFALNYRKTRLVRPGQRQKITGVVVNQKTNIDRRYYDSLKAVLTNCLRNDLDSQNRFNHSDFRAHLRGRIQHVKSLNESKGTKLEKIFEQFP

SEQ ID NO: 5455 - protein, 430 aa, unidentified
  source 1..430: note = Related to MABD01000012.1; note = Gammaproteobacteria bacterium 45_16_T64
MNKKIRFCRQLAEWFLVSDWHYSTLLAVFIDVADELPGDADDLVSELLAEFDTKPELNPIVDYLMQSLRLGCWFYDDHGPRVVPVCLINSQLSRLSNDALPVLNTESDVANWLNVSIQELTWLAELYRLDPTSPSYFKHYHYSIAKKRNGSPRLIESPKSRLRAIQRKVYSEILDHAVIHDSAHGFLKGKGCKTHASQHSGKDILFTFDLSHYFHSIRWPNVYAIFSGLGYTNSVSKILTALTTHRCYMKDRCLGELDTDHRSLLRERHLPQGAPTSPSLSNAVLYFLDCRLSGLAASLNMKYSRYADDLAFSGDTGRDWRFLEPLVGSICLEQGFRLNHRKTRIMKSHQKQRLTGVVVNTKPNVDRKHYDRLKATLTNCLRHGLESQNRDNHPDFFAYLEGSIAHVGHLNSARGKTLKAMYDRVIATQG

SEQ ID NO: 5456 - protein, 424 aa, Exilibacterium tricleocarpae
  source 1..424: note = Related to NZ_ML660090.1
MIQTFTRELAQCLYHSEWHFTTLLAACIQRIDNLPDDIDGFISQLLNVYNEKPALELLAGFLEQSRWVRSWFVVPARAPRFRIYNLEPVSGTTRAELPPLDSPAGLSLWLGLSPGHLDWIAGLKRVDASRPRRLDNYHYSLLRKRHTGSRLIESPKTILKAVQRRILNRILCHAPVHRAAMGFRKGCSSLDHARLHCRKRYVFCFDLENYFQSIQWLPVWRVFRTLGYPKKTANYLSALCTHACPPGALARFGLGDHYNRLLRERHLPQGAPTSPALSNAIMLGLDRRLSGLARRLELDYSRYADDLVLSGNGKRNWDFLAPLVGSICLDEGFSLNHRKTRRLTRSQSQKVVGVVVNEKINIDRRYYDDLKATLFNCVRFGPDSQNRGQHKDFCAHLLGKIHYVASVNTSKGQKLLQLFDRIAF

SEQ ID NO: 5457 - protein, 444 aa, Hahella sp.
  source 1..444: note = Related to NZ_CP035490.1
MRYDRWLAARLADAYQSGAPIAREMQQRAAMALGEQPAWLAPLTRRMWRRFQQVWETTSAHTLTEAILADRGFQRGLALSSRPIQVRRIFLPPPQELAPDSLAARYRLPALRCAGDLMHWLRLTPEDLDWLTQARGAPSGASSALGHYIYRWLDKPRGGARLLEAPKPWLKTIQRRIHQEILAPLPLHEAVHGFRAQRSSLTHARIHIGQTLLLKFDLKDFFPSVSYAQIYRAFRRLGYGHQVARLLSKLCSHVTPDEILRQPLAGYLERGNELFRRAHLPQGAPTSPALANLAAAHLDRRLSALADSMGRRYSRYADDVVLSGPRMSPGAIARLQALVGAIALEEGFVLNTRKSAVIGQGARQQVGGLVVNAKANIPRKDYDELKAVLHNCLRFGPDGQNRQGHGDWAAHLRGKIAYMAGINPEKGRKLLALYQRIVWPQESV

SEQ ID NO: 5458 - protein, 444 aa, Hahella chejuensis
  source 1..444: note = Related to NC_007645.1
MRYDRWLAARLADAYQSGAPTVREMQQRAVVTLGEQPTWLASLTRRMWRRFQQGWEGASAYALSEAILADRGFQQGLAVSARPVQVRHIFLPPPRALPPDSLASQYGLPALRCAGDLMHWLRLTPEDLDWLTQARGAPRKAASALGHYTYRWLDKPRGGARLLEAPKVWLKGIQRRIYQEILAPLPLHEAVHGFRAQRSSLTHARVHVGQALLLKFDLKDFFPSVGYPQVYRVLRRLGYGHEVTRLLSRLCTQVTPNEILRSPAARHLERGEELFRRAHLPQGAPTSPALANLVAAHLDRRLSALADSMGRRYSRYADDFVLSGALMSPGAIERLQALVGAIALEEGFVLNTRKSAVIGQGARQQVGGVVVNAKANISRKDYDELKAVLHNCLRFGPDGQNRQGHGDWAAHLRGKIAYVAGINPQKGRKLLALYQRIIWPQESA

SEQ ID NO: 5459 - protein, 445 aa, Hahella ganghwensis
  source 1..445: note = Related to NZ_AQXX01000078.1
MNYQRWVATSLAETLLSGPRDVASQRQRLTKVLGEEPEWLSPLVALGRSPDFVKGEDSETLKRQLTEAILDCEDFLLAFVEEDTTPRIRHIKCQTLPPTFPSNCPVEVCNLPKLATEGDLLAWLHLSHHDLLWLINEYREEFGQDSRLQHYHYRWLEKPRGGARLLESPKPLLKSLQRRIHREILSPLPLHSGVQGYRQGHSCLTHARLHQGQSLLLKFDLKDFFLSIGYQQVYRIFRRLGYNHRVTQILSRLSTNKTPRAKLRPPPGIMTERDIQLFRRPHLPQGAPTSPILSNLAAAMLDNRLSGLAKKMGYRYSRYADDFVLSGPGMSQHAAEKLQHLVGAIAEEEGFSLNTRKSAVVGQGQRQQVAGIVVNEKTNLSRKQFDSLKAMLNNCARHGPISQNHQQLPNFQAHLKGKIAYLRSLNPQKGDKLMTLYQKIQWPDQ

SEQ ID NO: 5460 - protein, 440 aa, Hahella sp.
  source 1..440: note = Related to MRYI01000026.1
MNYKRWVASCLADAFIIGPRDSSAILLRWSKVLGEQPEWLRRLSKEILSPETAHHENLNFSMVLERIQASEDFDEAFSESDQPPRVRYVYLPEAEYSFSAEQHELPKLAGISDVLNWLNLTVNDLEWLCGNYRNAPGASSKLAHYHYRWLEKRRGGSRLLESPKPLLKSIQQKILHDILSAVPQHPAVHGFRAGHSCVSHARQHLEQPLLLKFDLKDFFASIHYPMVFQVYRKLGYPPTVCRILTKLSTNVSPVKILKSRPDTCIDKDDNYFRRPHLPQGAPTSPALSNLAASKLDKRLTGLADTMGFRYSRYADDLVFSGPRLKRGSIDKLQSLVGAIVLEEGFLLNTRKSAVVGQAQRQQVTGIVVNRKANISRQQFDQMKAILHHCIHQGPHHQNRDQVPDFQAHLKGKISYMQSINPQRGNKLMKLFQQIQWQNAD

SEQ ID NO: 5461 - protein, 427 aa, unidentified
  source 1..427: note = Related to JABLXQ010000049.1; note = Gammaproteobacteria bacterium
MNAHRYFAYTLARICLQSSWEREPMAEAVELSLQGQGPWVNSLIRQVLHRFPRRPGLPALFDFLRQSEGLAAIRLRYQPRICRYPLTLPHVVLPSSLPPLDSVGALCEWLRLAPADLDWFADRSNRAAGHAAPKVRHYHVTTIPKRQGGMRLLEVPKSRLKQIQRRIHDDILLQLPLHPAAQGFVRGRSPVAHAGLHVGQAVVLRFDLRDCFLHVHGGRVFQAFRALGFPEDVSRLLMGLCTHRLPQWLSTQLPLDEVQRQKARQNHLPQGAPSSPLLSHFALRGVDVRLSAYASALGANYSRYADDLVLSGGEHLRHSFRAIEARVGAIVAEEGFALNFRKSRCVSAAQRQQVTGVVVNRQLNVPRVQFDALKAELHNCVQQGWVSQRPTHVADYRAHLLGRIGWVMQVNPQRGAKLRGLFERIDW

SEQ ID NO: 5462 - protein, 464 aa, unidentified
  source 1..464: note = Related to VISH01000001.1; note = Alteromonadaceae bacterium 2753L.S.0a.02
MYGGARCARKYTQNQRLVLEPLILNDMDAHYKKLLIRQLARAVLIGEHSPAGITRSITHCLGIGTEQARALAVEISAEHLFRAYPHHAELFLRTTLQESTTLTAIFAGRDLRVINWPLAALQSQQNPPAKYLWQLPVIKSAEQLADFLDVQLNDLYWFAQRFAKPNSSFKQQHYYYRFITKSDTSLRLLEIPKSRLRCLQRTILKKVLQPMPVHEAAHGFVKNKNCASFAEPHVAKSLIVSMDLENYFLHIPVARITRLFQVAGYPVDVASLLAGLCTHRTPNQIIANTPGSHSKYLHIRHLPQGAPTSPMLANLASFWLDVRLNALAKTMGYHYTRYADDLAFSCDSDNHNPKRLIRSVSDIIQAEGFRLNHQKTRVQKPGQRQCLAGLVVNEKLTIPRNIVKRLQAELYNCVQHGPESQNRLNKADYKSHLAGRIAQVAGVSNVKAEKLFALFDQISWPQER

SEQ ID NO: 5463 - protein, 432 aa, Ketobacter sp.
  source 1..432: note = Related to RCHN01000046.1
MNYRKLLIRQLALSLLEGAHHPVGLANSIAGCVNLTLRDALPLAEELARNLDWGSLTVMQLEQWLEASERLAVLYRSQRLRVVKWPLTAIPAPQRAALGSAWGLPPFHNTDHLAQWCGLSPGDLNWYSQRYPNQRPDARKLQHYHYQPRHKSDGSQRILETPKSRLKSLQRKLNHDLLNKVPVHDAAHGFVAGRSVKSFSRLHVDRPVVLAMDLKHFFLSIAPGRLVRLFQRLGYDLAVSKALIGLCLNQTPEAVLSPIHCLATRQRYRQPHLPQGAPTSPVLANLMAFRLDLRLEAAAHGQGFCYTRYADDLAFSSHRHDRAATRILQRQVRSIAADEGFAIKEEKTRVMTRAGRQQLAGVVVNKKQSLPKAEIKQLEAILNNCVRYGPHSQNRARHPQFRAWMEGKLAYVQHLAPHHFERLQRHFELIQW

SEQ ID NO: 5464 - protein, 445 aa, unidentified
  source 1..445: note = Related to JABJPU010000111.1; note = Methylococcales bacterium
MSNQNQIIGFISHAILAGEWQTDAIKERIGRSIGYQFNARLLIKELMSEFELTQAQTQHTAIQQFLKNNVTFQQCWGEQRQLIQLDKIYIPKQDRCRPPRQLNHIELPALNTEQQLGDWFKISVNDLIWLSGIWEKPYDAKSCKLYHYHYQWLKKHNGKKRLVEIPKSRIKSLQKKISIQCLDSIPIHQNAHGYCKNKSCQTLVQQHIAKPTILKMDLQNFFASIDYRKIFNLFFSLGYNKDISRLFAHLCTTATPLSVLSAELIAGQQKDYWHQRKLYRERHLPTGAPSSPVISNLCFFNLDCRLTAFAEKMGLNYSRYVDDMVFSGGREFYNKSDYLIKTISKICQSEYFFINHKKTQLLKPHQSQQVCGLVVNQKPNLTRKNYDQLKAILYNCVRTSPKQQNRLNHANFKEHLAGKIAYLSQINPQKGQKLADLFDQICWME

SEQ ID NO: 5465 - protein, 431 aa, unidentified
  source 1..431: note = Related to CP065008.1; note = Alphaproteobacteria bacterium
MQNLARTSRLLAASIIDGPWETGPLARRIAHAISLRGFNPERLALALVRRFGKGKTPVLRDLTAAIAANEHFAVCFESTGRPAWFRMGVEPPQMTRPPSNLVTFPLPVIETAKELSAWLNVDLSTLEWLADTRRRQKNAKDFRFVNYSYIWKKRPGKPPRLIESPKSKLKATQRKILTEILNKIPPHEAAHGFCRNRSIITHALLHTEKDAVACFDLKDFFHSIPPARIMAMFRTIGYPQEVSRRLTNLCIHTPNPEFLGKTLETLPWAVRKKILIPHLPQGAPTSPALANLCSFHLDTRLQALAESMNLTYSRYADDLTFSGGKELKSRFSYLRGTVQGIAQDEGFTINPEKTRLMTQAQRQVVTGVVVNKRPNISRTEYDRLKATLYTYSKSTGLDGLIKAQLRGKVEFVRALSPQRGEKLFELWKKIP

SEQ ID NO: 5466 - protein, 432 aa, unidentified
  source 1..432: note = Related to JAGRIJ010000030.1; note = Alphaproteobacteria bacterium
MPGYKQTTRLLAASIIGGPWESGPLSRRIHHAISLKGLNSERLALDLVHRFGEGRTPSVKELASAIAANKHFEKCFMASEGQAEWLRMGVEPAQMNPPKGDLATLPLPALATSRDVCEWLEIDQPALEWFADTRKRQPHVRDERLLHYTYLWKRRRGKSPRLIESPKGKLKKFQRKILSEILNKIPPHEAAHGFARNRSIITHALLHTEKECVASFDLKDFFHAVPPARIASLFRALGYPHEVSRILSGLCLHAPDAHYLGSPLTNLPFPVQKKILSPHLPQGAPTSPALANLCAFRLDVRLQSLAQSMDLTYSRYADDLTFSGGKDLKKQFSYLRGTLSEIAAQQGFKLNPEKTRLMTQAQRQVVTGVVVNKRPNISRAEYDRLKATLYQCAEGEEKDALLKQSLRGKVEFVRTLNPQRGEKLLRLWEKIT

SEQ ID NO: 5467 - protein, 350 aa, Archangium gephyra
  source 1..350: note = Related to QFQP01000062.1
MGPSKWNVPELHVVGDVAAWLSVSPEELRWFSDTSGVERARRRQSARNYVHQWVARGEKLPRLLEAPKAKLKALQRAVLHGLLGKIPVHDAAHGFVAGRSALTHARLHVGKKVVVRFDLRHFFTSIDTARAFGVLRWLGYTHEVSAVLIGLCTTRTPNHVLGRAPIPDLAEGEVLNQRFMMLRQLEAWHFPQGAPTSPAWANLCAWWLDVRLSAYAKKFGLTYSRYADDLVFSGDQLSSISRLRDVVDGVVRAEGFVINRAKTKVMHAHARQFVTGVVVNERPNVTRVEFDQLKALLHRCEMKGALSQSKGPVDQFRAELEGKVAWVAQLNAARGAKLKAQLSRIDWTEG

SEQ ID NO: 5468 - protein, 450 aa, unidentified
  source 1..450: note = Related to JAACJQ010000409.1; note = Archangiaceae bacterium
MNERERSPWPTPTSLRRNDARFIARQPWNRTDLLRALSVAFGSSGIPLRDLVDRLLRAVTAPQRELIAIQRVLEGSPFGVERYRAFERRPNAVDRFDLPRISSAPALHDWLGLPTEWASWFTDFRELERKRQPPKTKHYPRWWTARRWSIPRLIEAPKSQLRRMQRKLLHELLERVPFHPAAHGGVRGRSAVTHASLHTGRRVVAQFDLADFFPSITFKRVSGFFVALGYPKPVAREVAALTTTTTPAELLDLQQLHSGGDRVVFHQLVMRLRERHLPQGAPTSPALANHLTFMLDQRLSEAAKSMGLTYSRYVDDLAFSGDVPVSLERLERIVESNVISEGFTLRHRKSRLHTSSTRQRVTGLVVNVKPQPGRREFDRFRALLHQQAKTPTLPLAELEGKAEWFSTGRPARRAKLRRLLDAINSAAASAAAGAAASTAAESRAGADRAR

SEQ ID NO: 5469 - protein, 445 aa, unidentified
  source 1..445: note = Related to JAEUIQ010000011.1; note = Planctomycetaceae bacterium
MVFDKLAELLLDSDWTHEAIVRLLTACYRPPLSLRKTRPPKHELLATSILTAFPSPPSQARLIEHLRLSPGARRGFRYGKVQQVKLDAQMAGGQMRHTPTLQSGWDYPRISNLRELAECLGILDQTLNWLARGPRGNHACAAHYRIQAVEKRAGGCRLIEAPKATLKRTQREILRHVLNRLPVHVAAHGFVPQRSTLSHARLHVGQKWMLRMDLEDFFPSIDGSRVFGLFRSLGYPYEVVQALTNLTTHVLSIDAIRESVRHLARNARNERTITDLARLYFRRHLPQGAPTSPMLANLIAYRFDCRLTGLAKTCHVTYSRYGDDLLFSGSSTCHSSLSKIEDHVGAIAIEEGFRVRHRKTAFIPNSQRQAAVGIVLNEKPNVARHEYDQLKAILHNCVRYGPESQNRVGHDNFAAHLLGRIQWLRSLHPQRGEKLFECFKRIHFG

SEQ ID NO: 5470 - protein, 478 aa, unidentified
  source 1..478: note = Related to JAGFNH010000001.1; note = Candidatus Accumulibacter sp.
MDELSDRSSYASAAQRRVATALARACMAGEASPPAMRARAERVLGHPTPWLVPLALHLHFECAPPAGEVWHPRQHDQVVAAILAFPAFLAAFEQPEGAPGVRAYYPFHQPMGHPPEPLAGLLLPSLATIGDLADWLEMTPSLLDWYADAAAWSVRSRVEKRDHYHSRWVAKAAGGARLIEAPKENLRFIQRRILREILNRVPVHEAAQGCVRGRSVVDNARRHLGSALLLKLDLRDFFVGISGARVHALFRTLGYPRETARYLTGLTTRCSPAWLLRQVPQEAYPSPEERCRRRDWARQFMGRHLPQGAPTSPALANLCAYRLDLRLAGAARECQAGYSRYVDDLVFSCADGDLARGRRIVSMVQEIILEEGFSPNWRKTRLAPACASQRITGLVVNERLNLPRTEYDRLKAILTNCRRHGPASQNHRGVPDFGAHLQGRLSWFRQVNPERGARLQALFDAVPWEHDRPDDSVPGLAR

SEQ ID NO: 5471 - protein, 465 aa, Propionivibrio sp.
  source 1..465: note = Related to JADKJO010000032.1
MDEIPDLPNYPLNATRKVAIALARAFLAGEGSPAAMRVRGERVLGRSYSWLVGLTLHIHFALGPALGRGWQPELHDQIVTHILAFPDFLAAFEIPDEVPQVRGYFPFHASMRSPPVPLAGLALPSLATPGDLADWLDVSPSMLDWYANTAAWVYAPGASKLDHYHYRWVAKARGGVRLIEAPKENLRFIQRCILREILDRVPVHEAAYGCVRGRSAVSNARLHSASPLLLKLDLRDFFVSIPGARVHAMFRTLGYPQETARYLSGLSTHNTPARVLREVPQEEYPSPEEHRHRKEWARQFTGRHLPQGAPTSPALANLCAYRLDLRLSGVARECQARYSRYVDDLVFSCADDDPARGRRILTMVQGIILEEGFVPNWRKTRMAPASTSQRVTGLVVNDRPNLPRREFDILKAILTNCRRHGPASQNRLGLPDFRAHILGRLSWFQQVNAERGERLKLLFDQVSWD

SEQ ID NO: 5472 - protein, 459 aa, Azovibrio restrictus
  source 1..459: note = Related to NZ_AUCH01000007.1
MDEPWFPPPITPHIRQVAEALTRAFLYGDDRPGPMRERGTRLLGSPWPWLTDLCLRLHFELGQGRPWQPEQHDEILALILAYPPFLGATPPRVRGFFPLQPRMAPRPGALAGVALPALASTGELADWLELSPTQLDWFANPGGRRPQAPELGHYHYRWMQKRQGGARLIEAPKARLRALQRRILAEILNRVPVHPAAQGCVRGRSVLSNGALHTGAPLLLKLDLRDFFVSIPGARVHALFRTLGYPRETARYLTGLTTHGTPPGVLRQVPQEEYPSPEERRQRQAWARQFMERHLPQGAPTSPALANLCAYRLDLRLAGAAREAGAVYSRYVDDLVFSLPSHDPGRGRRILTMVQEIILEEGFTPHWRKTRILPASTRQSVTGLVVNQQLNLPRQEYDRLKAILTNCRRHGPASQNREGRPDFRAHLQGRIAWFAQVHPPRGARLMALFAGIDWDGLRS

SEQ ID NO: 5473 - protein, 498 aa, Ferribacterium limneticum
  source 1..498: note = Related to NZ_CP075192.1
MSSSSATRQAGEGTAFHRIAKAPMDEFSESPEPPDLPEKAMRQVAVALARSFLAGERSPAGMRQRGTAALGHAWPWLVQLSLHLHFELGQDLQARKHDQIVAFILAFPRFRAAFDTPGQHPRVRSYFPFHPVMGTPPPPLAGLAFPALATPGDLADWLGITPRELDWFANDWNSTAAQPKFKHYHYRWLAKRSGGARLIEAPKENLRAIQRHILHGILDHVPVHEAAHGCVKGRSTLDNARRHAGAPLLLKMDLRDFFVSIPARRIHALFRSLGYPVATASYLTRLTTHATPAYLLQQVPQAEYPSPEERRQRQIWARQFMERHLPQGAPTSPALANLCSYRLDLRLAGAARECNARYSRYVDDLAFSCDDNQAHGRRILAMLQDIILEEGFTPNWRKTRLASAATTQRLTGLVINAHPNLPRKEFDTLKAILTNCRRFGAASQNRDGRPDFRSHLQGRIAWFRQVNPERGEKLRRLFEQIDWASAETIRNRARISLT

SEQ ID NO: 5474 - protein, 462 aa, unidentified
  source 1..462: note = Related to JAGTRU010000007.1; note = Proteobacteria bacterium
MDEFSDDPELPELPTKAMRQMAVALTRAFLAGEPNPAGMRERGGIALGQAWPWLVPLSLHLHFELGSELQAREHDRIVALILAYPRFRAAFAVPGERPKVRGYFPFHPPMGRPPPALADLALPALATPGDLAGWLGLTPGELDWFANAWHQPAATGKLDHYHYRWLAKRSGGARLIEAPKENLRAIQRRILHGILDRVPVHEAAMGCVKGRSVLDNARRHAGSPLLLKMDLRDFFVSIPARRVHALFRSLGYPSATARCLTGLTTHATPAALLRQAPQTKYPSPEERRQRQQWARQFMEHHLPQGAPTSPALANLCAYRLDLRLAGAARAGQARYSRYVDDLAFSCANGDPRHGRRLLNMLQDIVLEEGFTPNWRKTRLAPASTAQRLTGLLVNAHPNLPRGEYDRLKAILTNCRRHGPASQNRDGLPDFRAHLLGRIGWFGQVNPARGEKLHRLFEQIDWA

SEQ ID NO: 5475 - protein, 466 aa, Dechloromonas sp.
  source 1..466: note = Related to WBUO01000290.1
MNDPDDFDDDFDPDDLLPARAMRSVAIGLVRAFLAGSSDPASLRERGRRALGESPRWLPSLVLHLHLELGSQFTTRQHDALLDAVLAYRQFRNAFLPGSTRPRILCHFTFHPPMDEPPAVLAGVAVPTLPTSGDLADWLGLLPNELAWFCGNWREQPSQPKLGHYRYRWLNKANGGRRLIEAPKETLRSIQRRILHGILDKLPAHTAATGCVRGLSVVDNARRHADSPLLLKMDLRDFFASIPAGRVFALFRTLGYPPASAHCLTQLCTHATPMRVLRELPQDGHGSWEWRRQQQEWARRFNTRHLPQGAPTSPALANLCAYRLDLRLAGLARECRATYSRYVDDLAFSLPRHDSARAHRIQLLAEEIILQEGFAPNRRKTRLCPAGQTQTLTGLVVNRHPNLPRAEYDRLKAILTNCRRHGPTGQNHDQHPDFRAHLQGRLAWLRQVNPPKGEKLLVLFGEIDWG

SEQ ID NO: 5476 - protein, 465 aa, unidentified
  source 1..465: note = Related to JAGRFZ010000003.1; note = Rhodocyclaceae bacterium
MDDEEAHPPFGPEHAGRDKARVALGLASAFLAGSPEPASLRERGRRALGRDWPWLPALALRLHHTFGKAFPPHRLDDLQRLIVRDPDFIASFADSEGGPRIRAWFPLHPRMAPPTIPGLPALPQLATLDALADWLEVRLEDLDRLAEPQAWRPPRSASPLEHYRYHWRQKRDGGLRLIEAPKPRLRRLQRRILHGLLDLVPVHPAAMGCVRGRSVIDHAGQHAGQPRLVKLDLRDFFPGNRASRIHALFRSLGYPTMVARHLTGLTTHCSPPRILRTLPHGEYDSPEQRLRTRRRAMALCDRHLPQGAPSSPALANLCAFRLDLRLAGAALACGARYSRYVDDLSFSGAFDAARGHRMLAMIDDIVRDEGFDPNWRKAAVVGAGAAQRLTGLTVNRHPNLPRAEYDRLKAILTNCRRHGPTSQNKAGHRDFRAHLLGRVAWACAVNPARGEKLRSIFDRIVWPEG

SEQ ID NO: 5477 - protein, 465 aa, unidentified
  source 1..465: note = Related to JAGRFY010000153.1; note = Rhodocyclaceae bacterium
MDEEEADLPFGPAHAGRGLARVALGLAAAFLAGSSEAAGLRERGRQALGRDWPWLPSLALRIHFAFGSEFSPDRLEDLQSLILGDPGFAKALADPDGGPRIRAWFPLHPQMASPVVPGLQALPQLATLDQLADLLELSVDDLDWFADPQAWRAPKPDSPIARYRYHWRRKRDGGLRLIEAPKPRLRRLQRRILHGLLDPVPVQPAAMGCVRGRGVIDHAGLHAGQPRLVKLDLRDFYPGIRASRIHALFRSLGYPTKVARYLTGLTTHCSPPRILRALPYGEYDSPEQRMRTRRRAVSLCDRHLPQGAPSSPALANLCAYRLDLRLAGAARACGARYSRYVDDLCFSGAFDAAQGHRILAMIDDIVREEGFEPNWRKAAVVGAGAAQRLTGLTVNRHPNLPRAEYDRLKAILTNCQRHGPSSQNKGNHRDFRAHLQGRVAWACAVNPARGEKLRSLFDRIDWRQG

SEQ ID NO: 5478 - protein, 460 aa, Uliginosibacterium gangwonense
  source 1..460: note = Related to NZ_KB892867.1
MSRLPKPPIDPAILHVARGLARAFLHEAGGITDLQQRGKAALGTAHDWLPRMVRRLDQHFGLPLRPAQFEDIVTCIATLPSFIGAFERRPVPKIRRYFSFQPQMAALPRTLAGLDLPALPTVGDLAAWLALSMDELEWLADVHSISSKTGSEALRHYHYQWKAKASGGHRLIESPKPLLCAIQRKILHGLLDKIPVHDAAHGCVPHRSILSNAQVHAGSPLILKMDLQDFFTSIRASRVHALFRTLGYPEEVTRYLTALTTHVTPSFIFHTQPRPEGLTSKALQTRRKQAESYRARHLPQGAPTSAALANLCAWRLDLRLAAAAQESGVRYTRYVDDLIVSFPSHTRAHAWRISLMIDTIILEEGFTPHPRKTRLTSQSQAQWVTGVLVNEKPNIARSDYDRLKATLTNCMRHGPHGQNREALPDFRARLQGRIAHVKHINPARGEKLQTLFDAIGWQAI

SEQ ID NO: 5479 - protein, 507 aa, unidentified
  source 1..507: note = Related to JAEUNN010000841.1; note = Rhodocyclaceae bacterium
MEGRTAFGAKAAEGGRVEDSYDDEEAAAAWLAARARATQAVATALARAFLAACASQAQTAADAGGPVAAPHTATGARAAAAAMQACGRRVLRRKYPWLARLVRHVQAAAGDCPRPAQHDEVRALILEFPPFRSAFEDDEPPRVHAWFPWHECMRAPPRRLAGLNLPQLDTPGDLAAWLHVSVGELAWFADPGGWAEASGVEALRHYRYRWNAKAGGGWRLLEIPKPRLAALQRKILREILDRVPPHAAAQGAVRGRSALGNAAMHADCGLVLRLDIEDFFPRLAGARIAALFRTLGYAPAVARLLAGLCSHATPAAVSSTAPCAGLPGIDGLRARRDLADMYGSPHLPQGAPTSPALANLAAYRLDLRLDGAARACGWRYTRYVDDLFFSGPGGSPAHALRTAQMLQGIVLDEGYRPNFRKTRVMPRGRRQLVTGLVVNRRAAIPRDQFDRFKAMLTNCLRHGAASQNRDGVADFRASVAGRLAWFEQVNVARAAKLRALFDAINWA

SEQ ID NO: 5480 - protein, 487 aa, unidentified
  source 1..487: note = Related to JAHCAA010000009.1; note = Rhodocyclaceae bacterium
MRIAQQGEGEEPYAHRFAAPTAAMDAVAIALARAFLAAVTQTADSAAGAAEAMEPSQRALAAAMQACGRRVLARKWPWLARLVRHILSETGPQLRPAQHDEVRALILGFPPFRLAFAADQPPAVHAWFPWHDAMRSAPRALAQLALPQIDTPGDLAAWLGLTVGELAWFADSGGWAARSDTERLRHYRYRWLAKPSGGWRLLEIPKPRLAALQRKLLREILDRVPPHGAAQGAVRGCSAATNAAAHTGRGLVLRLDIENFFPTLGAGRIAALFRTLGYPGAVASLLAALTTHGTPAAIAGAAPLGEYAGAADLRARRDIAQLYRRAHLPQGAPSSPALANLAAYRLDVRLAGAARACGWIYTRYVDDLFFSGPATTPAQARRNAQMFLSILCDEGYTPNCRKTRIMPRGRRQCVTGLVVNERPGIARDEFDRFKALLTNCLRHGAASQNRAGVADFRASVAGRLAWFEQIDSARAAKLRRLFEAIEF

SEQ ID NO: 5481 - protein, 477 aa, unidentified
  source 1..477: note = Related to JADJSA010000006.1; note = Sterolibacteriaceae bacterium
MRAAPMHDESHPRFDSQYIEPDLLALATQLANALLAGEQRSPALRKRLQTVLGRNWPWLAQLIRQVRLDFGDGISSAEHDELVRSILAFAPLRRAFESDGEVPRVRGWFPFQPPMGAPPARLGAIDLPALATPGDLADWLGLRIGELDWFAGSLRPQVAANGPLWHYSYCWLAKRRGGYRLIEIPKPRLRNLQRRILRDILERVPVHPAAHGCVRGRSVVSAALPHTGTDVVLQIDLREFFSTVTAARVHAVFRTLGYPPAVARLLTGLATHSTPHSVLRAAPVAEHADAQAKRSQMQRQVLLTVPHLPQGAPSSPALTNLCAYRLDLRLSGAAAACGVGYTRYVDDLIFSGDVAFARKIERFKSMVYSIIVDEGFEPHFQKTRARTQATPQHVVGLVVNRRLNVPRCEFDALKALLHNCRCHGPAGQNRHAHPMFRQHLLGCIARVAQVNPARAARGCCGISAPSTGPDRAKPRCA

SEQ ID NO: 5482 - protein, 368 aa, unidentified
  source 1..368: note = Related to JADJHQ010000003.1; note = Sterolibacteriaceae bacterium
MGEPPASLRAKAKELPRLATPGDLADWLGLPIGELDWFAASLRSDLTADGPLCHYRYRYRYRWLAKRRGGYRLIEIPKPRMRGLQRRVLHRILEQVPAHDAAHGCVSGRSTISAALPHSGKNLVLQIYLQDFFTGVTAGRLHAMFRTLGYPPAAARTLTGLVTHSTPYSILRASPSPELGQNDDAGTKSRRHAMLRIAHLPQGAPSSPALANLCAYRLDLRLSGAAAACGIGYTRYVDDLIFSGDDAFARKMERVKSMLYSIIVDEGFEPHYRKTRAQRQATSQRIVGMVVNQKPNVPRREFDTLKAILHNCRRHGPQGQNHLCHPHFRQHLLGRISRVAQLNANRGERLLREFRQIDWSPAVLPKAG

SEQ ID NO: 5483 - protein, 502 aa, Vandammella animalimorsus
  source 1..502: note = Related to NSJF01000001.1
MAFALPHPMGLNPHDDVALRAFAQHLARALLAGPWTPMAMRARLRRALGLARGGASPDWLRQLVRQLHAQPPFALPAQPQRRKAAGAATGPVPGSAHLQAVADAVAQCPALQQAWSATPAHAPWRIKGFFLPPPPPKPAAIAKLQPFVRELPPLAQVGDIAAWLELEPGQLDWLANCQDRPTPSPKLAHYRAHWLPKGQGGLPRLIEAPKARLKQIQRRILQELLAPIPLHNAAHGGVRGRSALSHAQAHAGMPVLLKFDLRDFFPSIRAARIHAIFACLGHTPAVCRVLTALVTTRTAHGVLRTAPLTAPPQSAPCGAGTGPSLAVQQAQLRQLYGQRHLPQGAPSSTLLANLATARLDMRLAAAAAALQGRYTRYVDDLAISLPQLPRAQLLRMQRLVRRIVHEEGFVLNEAKCGLYTASQAHYLTGICINAHPNLPRAAYDQLKAILHQCVLHGPSSQNRDGHRDFRAHLQGRIAWCRSLNPARAAKLQRLFERIDWQD

SEQ ID NO: 5484 - protein, 431 aa, Maritalea sp.
  source 1..431: note = Related to JAKGTI010000001.1
MDKRLFSHNLAVHLSLCPWSLDQISACLRRNLPKGAHKYTTEIANELHIGLPTIFTPSVSAIEIVLRRAIRLESTYQFCRKQGKWPALNLSSPTMCPTPAFEGLDIPQLPTTASVADWLSISERRLDYLADEQNRHEEHGEASINHYHYIFKNKNGGGIRVIEAPKENLKSIQRAILKNIIGIVPPHDAAFGFVKGRNCLKAANRHVGEKVVLCFDLKNFFPSIGAGRVFGLFRCLGYPDAVARVLTSLCTSLTPRRILERFPLEERSIYNKRHLPQGAPTSPALANQICFGLDKRLNALAKCLGAQYSRYADDLTFSGDKHIARPLQYFLPVIAQDEGFSLNRAKTRVMPRASRQTVTGVLVNEHLNIDRRSFDKLKAIIHACGKPGDRRLLDPSFRKSLMGKIDWVESVNPHRGQRLRQLLSKAVENHI

SEQ ID NO: 5485 - protein, 430 aa, Thalassococcus halodurans
  source 1..430: note = Related to FNUZ01000001.1
MNRNEVSLNLARSITRGEWSKEFINSNLLRRLPSTVHKLVPAISEDLVTELSARYAPTEKYVAEHLLYDRNFERIYRYCARKGIWPTPDLSPPVMAPIPAFQKIDLPQIPTLSALAEFLFLTPEQLEYLADRNGRHEEHGDMAVNHYHYVLKPKRTSGHRLIEAPKERLKAIQRHILRSILDKLPTHPDTFGFVRSRNCLQGANRHAGEQVVLRFDLKNFFPSISAGRIFGLFRCLGYPHNVAVDLTALSTTKTPARVLERLFYPDRGLYKTTHLPQGAPLSPALANHAAFGLDRRLAGLAKRLDANYSRYADDLTVSGDHTITSNLLRLVPQIIKDEGFALNTSKTRVLPQTTRQTVTGIVVNDHLNIDRKTFDHLKAVIHAFQKEGDHRLSDPAFRASLEGKIAWVEAINPSRGQKLWRLLDNAEKPS

SEQ ID NO: 5486 - protein, 424 aa, unidentified
  source 1..424: note = Related to JAESRD010000022.1; note = Rhodobacteraceae bacterium
MAASLSATQWQAHALERVFRSRLPTPLAQYAAEFSAGLIAALPSAYAPEPAAVAAVLVHLTSFEQVTAWAVKNGHWPVPDLRETQFLPIAAFADLSVPKLATMAQLGDWLGLSQERLAYLADTQARHEEHGETAINHYHYVLQRKKGPGLRLIEAPKQRLKAAQHQILRQMLDPLPVHDDAYGFVRGRSCQAHAARHAGTQMVVSFDMRQFFPSISAGRVFGLFRCLGYPSAVAHHLTGLCTSATPPRILQRLPYADRVVYRAAHLPQGAPSSPALAYHVAFRLDRRLSALADSLDATYGRYADDLSFSGDRRITEPLMRLVPQILREEGFCLNPSKTRAMPQTARQSVTGIVVNQHLNIARGQYDRLKAVVHACGKPDDSRLADPVFRGRLEGQIGWVASLNRARGAKLQALFNTALDGALGG

SEQ ID NO: 5487 - protein, 455 aa, Aliiroseovarius halocynthiae
  source 1..455: note = Related to VICH01000004.1
MSCTLRLTMERHERHMNDQHLALLLATRLTGPWSVQDITQSLCRHLPAPLHTQAEAISQKLLRIHPGPYAPPIKQIARTLRNADEFPRIKAHCVRYNVWPAANLTPPQMMPIGALASLDLPQIPTLEDLADWLLIPTDQLNYLADPQKRHEAHNEMAVNHYHYHIHPKSNGASRLIEAPKQRLKAAQAQILRGILAHVPDHDEAFGFTKGRNCMSGATRHVGEQVVVGFDVKNFFPSIGAGRIFGLFRCLGYPESVARFLTAICTNVTPSRILNRLQAPERQQFRHPHLPQGAPTSPALSNKVAFTLDRRLSGLATRLGANYSRYADDISFSGDVGITHPLLQQVPRILRNEGFAPNPAKTRVMPRGGRQSVTGIVVNQHLNISREKFDHLKAVIHACRLPTDLRLDDLAFRMKLEGQITWIECINPVRGCKLRRLLKKSLKARIAETTKTGRAL

SEQ ID NO: 5488 - protein, 443 aa, unidentified
  source 1..443: note = Related to JABDJG010000107.1; note = Hyphomicrobiales bacterium
MDKRDLASNIAISLTNGTWSKDQVTAQLMRRFPKSLHRFSNQLSAELLAACPTIYAPSANAVQNVLQMSAIFERIFRYCQRRNIWPNPVLVEPIMAPTATFSELEIPQLPTVEALADWLLVPIDRIDYLADPIGRHENHEVAAVNHYHYLLHPKKSGGLRLIEAPKHALKSIQRQILRGILDKVPTHDDAFGFVRGRCCVGAAARHAGEQVVVNFDLKDFFPSVGTGRVFGLFRCLGYPNTVAGLLTGLCTTRTPHRLLKRLNPADRAQYRERHLPQGAPTSPALANHVAFALDRRLAGLARSIGANYSRYADDLSFSGDLQISATLLGIVPQIVHEEGLSLNPHKTHIMSAGSRQLVTNIVVNRHVNVTREKFDKIKATIHACAKPDDERLSDPVFRAKLLGQIGWVETVNPKRGLKLRKRAIEAIRKATIRSPSRNTSTQI

SEQ ID NO: 5489 - protein, 432 aa, unidentified
  source 1..432: note = Related to JAGRLY010000042.1; note = Alphaproteobacteria bacterium
MDSKSLARNLAQSLAMGPWSRQFIRATLVRRLPRQLHRMIAGLSEELIKSLPCAYAPSVKTVAGALGRSDRFEKILRHCIRHDVWPDPDLSSPAMAPVAAFATLDLPQLATLDALAEWLFLPPDRLEYLADKDSRYEEHRDAAVHHYHYIEKVKASGGVRIIEAPKPHLKAAQRRILRGILDKVPVHADAFGFVSGRNCLNGANRHVGEDVVVCFDLRNFFPSIGLARIFGLFRCIGYPHEVARLLTGLCVTTTPMHVANTLTTVDRQTYRRPHLPQGSPASPALANLAAFPLDRRLSGLAKSLDTNYSRYADDLSFSGDRESVGALLRAVPGIVADEGFELNQTKTRIMSATSRQMVTGIVVNDHLNIDRREFDRLKAIIHACGRPGDTRLADPVFRSALLGKIAWVEAVNSQRGQKLLTLLSLSITSRHA

SEQ ID NO: 5490 - protein, 314 aa, Anderseniella sp.
  source 1..314: note = Related to JABDRA010000277.1
MSPVAVFAALDIPQLATLDALSDWLLLPIERLDYLADLHSRYENHGDTQVNHYHYVLHRKKSGGMRVIEAPKATLKTVQRQILHGILDKVPAHPDAFGFAKGRNCLDAANRHAGEQVVICFDLKDFFPSIGAGRIFGLFRCLGYPHQVASCLAALCTSVTPSRVVEHMSGPDRDTYRKPHLPQGSPASPGLANLAVFTLDKRLSALAKSVDANYSRYADDLSFSGDSHVAGILLRAVPQIIEDEGFQPNSAKTRIMSKTSRQVVTGVVVNHHLNVTRKAFDQLKAIIHACGKAGDLRLNDPVFRTSLLGKIGWV

SEQ ID NO: 5491 - protein, 319 aa, unidentified
  source 1..319: note = Related to JABURO010000157.1; note = Rhodobacteraceae bacterium
MDRGALAVNLAQGLCSGGWSAPEVGAILARRLPGAARRLAPRIASELVTAAPGPYAPTARITRAVLQRCESFERLYRWCNRNDIWPAPDLSRPSMAPVAAFARLDLPGLATQKALADWLLLPPERLDYLSDPASRHERHGDFAVNHYAYVLHRKTHGGLRLVEAPKPTLKSLQRQILRGILNRVPPHDDAFGFVRGRNCRGAARRHAGEQVVICFDLKDFFPSIGAGRVFGLFRCLGYPQPVARHLTGLCTNTSPSRITDRLPPPDRPMYRRPHLPQGAPCSPAMANLAAFGLDRSLSGLARSLGAGFSRYADDLAFSG

SEQ ID NO: 5492 - protein, 434 aa, unidentified
  source 1..434: note = Related to NZ_JAEHHL010000001.1; note = Proposed Thermohalobaculum xanthum
MKPRALAYRLAVSATQGAWSLPEVQAVLARRLPPAHRHLAKDIAAAMLSCGEGSDLTPPPQVVARALPGTPAFENLYLHCRNTNVWPAPETEPPVMRPLPPFDGLDLPQLPTEGELAAWLMLSPERLAQFADLAGRAEASPETAINHYFYRVVPKRAGGVRLIEAPKPALKGLQRQVLRGILDPVPVHRDAFGFVRGRGVTAGAARHAGEAVVLRFDLADFFHSVGRGRVFGIFRAMGYPHNAARCLAGLTTTAAPPWIMERLGAGDRPYLRIPHLPQGAPTSPALANLSAFGLDRRLAGLARRLGAAWSRYADDICFSGDPDIVAPLMAAVPGIVAEEGFRLNAAKTRVMRAQARQCVTGLVVNRHLNLPREEFDRLKAIIHRAASPGDARLADPRFRAALAGRIAWAEAVNPARGAKLRARLEAALAQKVAL

SEQ ID NO: 5493 - protein, 424 aa, Cognatiyoonia koreensis
  source 1..424: note = Related to NZ_FOIZ01000001.1
MTPQSPKRLAQNLAESLSLSVWDKRGIADCLCRRFPPALQRFTQLQTQGLLDHFPTQIAPGRTAVASALAQSSVFARIHRYCVLNSVWPAPDLRAPKMQPLQAFAHLEIPQLATLGDLADWMLLTPQQLDYYADQTGRHEEHGDMAVNHYHYHLSPKIGGGHRLIEAPKPRLKSLQRLILRAILDHILPHPNAYGFVQGRNCIEAAARHVGEKAVVAHDLRDFFSSIQGGRIYGIFRALGYPPNVAHALTGLCTVTTPARIRNRMGFHQRQALRVAHLPQGAPTSPALGNLAAHGLDRRLTGLARSLGATYTRYADDLTFSGDEHIIRAICVAVPDIVSEEGFALNPAKTRLMPSHRRQVVTGIVVNNATNVDRREFDQIKAAIHARAWQTDPALQARLSGQIAWVRQLNPARGAKLERLMARA

SEQ ID NO: 5494 - protein, 386 aa, Litoreibacter roseus
  source 1..386: note = Related to NZ_BLJE01000002.1
MIVEFPQRYAPDANRIAEMLSKQLVVRRLFKHCNKADVWPSLPLEPPRMLPVAPFDALVLPTLHTAIDLADWLLLTPEQLDAFVDRNGWRETHPMPGVNNYFYRMSPKSSGGLRLIEAPKPRLKSLQRLINHRILAKVPTHPDSFGFVRGRNCIGAAQRHAGEEVVIGLDLKNYFSSLRYGRVYAFFRHLGYPVSVAHGLSGICTIVTPSRIRQRMPYEQRQTLMEPHLPQGAPSSPALANLLTYRLDRRLAGLARSLGANYTRYADDLTFSGDSGVRDAVLTTVPEIVEEEGFRIRTGKTRIMPCYRRQMVLGIVVNETINISRKEFDRLKAIIHQKAWKNDPAEFEKILGQIGWVEQVNPSKAQKLYAKLELANAREHVQGSST

SEQ ID NO: 5495 - protein, 436 aa, Yoonia sp.
  source 1..436: note = Related to JACXGQ010000004.1
MHPDQRNSLKIFARLVAPSLAKGRWAVSDVTGALKRRLPAQFQREAQLIAEDLVAFLPAMTAPNAGAISKALCACDAFVRLHGECLRRGLWPDPDLNSGKMLPLFPFARLDLPNIPTFAALADWLVIDGGRLMYMADIANRHNEHPDAPVHHYLYGLRPKPTGGYRVIEAPKSGLKALQRQILRGILDKVPVHSDAFGFVRGKSCAQAANRHCGAQTVVGFDLRDFFPNLAAARVFGLFRRLGYPDAVARTLTGLCTTTTPQRVRARLPHLQGQLMRTPHLPQGAPSSPALANLIAFTLDRRLAGLARALDAQYSRYADDLTFSGDAGIAPVLTRAVPHILQEEGFVLNPRKTRVRNAAQRQVVTGIVVNQHINVPRARYDLIKAKINALRHTDDLGRLGHAHCLSLEGQIDWVCTLNPSRGQKLRQLYARAINGG

SEQ ID NO: 5496 - protein, 411 aa, Yoonia maritima
  source 1..411: note = Related to NZ_PKFN01000009.1
MPELTGALQRRLPPQFHREAQLIAADLIPLLPVMVAPTDGAITKGLLNCGAFARLHRECLRLGIWPAADLQSDQMRPYAPFAQLDLPDLRTEANLADWLMLDYSRVAYFTDISNRQNDHPDAPVHHYLYGLRRKSSGGLRVIEAPKSNLKSIQRRILHGILDQVPVHTDAFGFVRGRSCVQGAARHCGEECVVRFDLRDFFPSIQSKRVLGLFRRLGYPRWVAQSLTGLCTTATPGRVLVGLPPQQRQQMRVPHLPQGAATSPALANLIAFTLDRRLSGLARSVGAGYSRYADDLTFSGDIGITGVLEDAIPQIIADEGFVINPNKTRVTHRSERQTVTGIVVNQHLNISRKQYDQIKAIIHALRRPDDPRRLDQAFCLSLEGKIDWVCAVNPHRGNKLRRLYQVTIEDFG

SEQ ID NO: 5497 - protein, 433 aa, Paenihalocynthiibacter styelae
  source 1..433: note = Related to NZ_JADCKQ010000007.1
MNRTQFASSLAPSLLAPRWSETELSQCLLQRLPGQQKALSARLTAELLQTFPGPVAPPERQLVAGLRGRPTFERLYRHCAKQAIWPAPVLTQTRMQPASGLGRPEVPHLDTPGDFADWLPLPEDRLNYLADVDGRYACHAYRTIRHYHAVAEAKKSGGHRLIEAPKSQLKAVQRQILQGILRQIPVHEAAYGFAPGKGCADAARLHCGRDEVVCFDLADFFPSVSFAWVFGVFRHLGYPEAVTRLLAGLCTTETAPDVLVQFPFAMRQLYRIPHLPQGAPTSPALADILLFNLDCRLNALATKLGASYTRYVDDLTFSGPAGLGRGLLKLVPEIIRDEGFRSNPGKVRVMPSGGRQVVTGIVVNAHLNMRRAEFDQLKAEIHACGRPGDLRLSDPHYRARLIGRIQWLRHLNPIRGEKLLTLLGRAEAQKITA

SEQ ID NO: 5498 - protein, 437 aa, Roseovarius aestuarii
  source 1..437: note = Related to FWXB01000002.1
MARYTKQDLLFGPLSQGLSQLEWTFWDIRHHLEQRLPSRLRSVSHRLARELKQTFPATAAPDDRQILLYLKQSPATDPLFRHFTLTGAIPDPLIDPPQFRPVPALDGLGLPVLTTSDDLAAWLALPPLQLTRFADLLGLSANADSAFAPHYRHHLIAKRNGTLRLIEEPRPFLKKLQRRILRDMIAHIPTHPAAFGFCRGKNCAQAAARHAGEEMVVSFDLSGFFPSIHHHRIYGLFRSFGYPAAVARHLAGLTTALTPRDVLATAHLADRDHLTGRHLPQGAPTSPALANLAAFTLDTRLAGLARSLGANYTRYADDLTFSGDAPIANPLQRMVPQIVRDCGFVLNAAKTRIQPAHRRQTVTGLVVNRHLNLPRADYDHLKAVIHHLRDPVDPRRADRIFIDQLAGRIAWFEQVNPTKGAKLREWLANALQTGTIG

SEQ ID NO: 5499 - protein, 441 aa, unidentified
  source 1..441: note = Related to DQCI01000287.1; note = Rhodobacteraceae bacterium
MSGRSVSDRVFGPLAASLVRQAWTALTLRQHLQARLPQALSAEAPGLARDLKAAFPGTAAPDRKRVALWLSMCPLAGDLVTIARASGAPIPPPLDPDRFQPPPAFAGLDLPPLGTLADLADWLALTLPQLSRFSDLHGISAAQDNPFAPHYHHHLLEKRDGTQRLLEEPKPVLKHLQRRVLRQILARIPPHPAAFGFCAGRSCLQAAQRHAGEALVVCFDLKAFFPSIGWHRVYGLFRAFGYPPAVARHLAGLCTAITPPRVLAAPRLAARDLLTNRHLPQGAPTSPALANLTAYALDARLAGLARSLGLTYTRYADDLTFSGDTRPAAALHRAVADIVRDCGFTLNRDKTRVQPRHRRQVVTGVVVNRHLNLPRADYDRLKAVIHHLRNPDDPRRADRVFLDRLAGRIAWLEQINPAKGAKLRDRLAAALATTRATRHHG

SEQ ID NO: 5500 - protein, 433 aa, Actibacterium ureilyticum
  source 1..433: note = Related to NZ_NSBT01000024.1
MSVLVDPVFAALASGLVHVDWTADQIAAHLRRRLPRRFQSRAGDIARHLHDRFPGAASPDEERIAAALSDGPAARALVRFSDKTGELPAYIWTPARFQPIPAFATCGLPALTTPEELADWLGLTTAQLTRFADLKGLSAQTDNAFAPHYRHHLRPKRDGTLRLIEEPKPLLKTLQRRILRGILARVPPHDAAFGFRAGRNCTMAAARHAGEGGVVRFDLAAFFPSIAQHRVYGLFRGFGYPAPVARHLTGLCTAHTPARVLTTPGLAAAGHLSSRHLPQGAPTSPALANLVAFTLDTRLAGLARRLDATYTRYADDLCFSGDARIAPVLRAALPGIVADCGFHLNPAKTRVQPAHHRQTVTGIVVNQHLNLSRRDYDRLKAQIHHLSDPADPRRGDRAFLTRLEGRIAWLEQLNPHKGAKLRARLAAALSPGP

SEQ ID NO: 5501 - protein, 438 aa, Gemmobacter tilapiae
  source 1..438: note = Related to NZ_BMYJ01000004.1
MLSLHVLLPLAHRLANQPWDQPLLAACLRSYLPPPLNRQANRLANRLIKDFPGTTAPDAQQIAKALGQTTTAARLATLARQQTRPPSPDLNPPHFRPNPALHIPAIPVMETIPDLAFWLGLTEDQLTRFADLRGLSARSHPEFGSHYRQHLIPKSDGTLRLIEEPRPFLKRLQRRILTGLLNHVPPHPAAHGFRPGHSVLTAARAHAGEQIVLRFDLRHFFASITIARVYGLFRTMGYPATIARPLAGLTTAITPTEVHKTPHLAGAELFAARHLPQGAPTSPALANLAAWFLDLRLAGLARSVNAQYTRYADDLTFSGDRRIAPVLLDALPHIITETGFRLNLSKTRIMPAHQRQTVTGLTVNRHLNLPRDQYDRLKATIHHLTCPDDPRRQDPAFLAQLSGRITWAEQANPHRGAKLREALAAALERLPPPPISPI

SEQ ID NO: 5502 - protein, 441 aa, Pseudorhodobacter sp.
  source 1..441: note = Related to NKIU01000001.1
MTRPLRPPFPDRAALAPLAASLAQQDWTEAALVLHLRQRLPGDQPARAARLARSLLQSFPARSAPDAAQILRHLQQSPQGRAVLAHARRYQLLPAHSLTPPAHRPIPPLHHLALPPLATEAELADWLAITPDQLTRFADLRGLSARTDSPWAPHYHHHLIAKSNGQLRLIEEPKPFLKRLQRRILAGLLNHIPPHPAAYGFVPGRNCIQAAARHAGEQIVLCFDLAQFFPSITDRRIYALFRALGYPAHCARSLAGLTTALTPAHVLHTANLAARDQLSNRHLPQGAPTSPALANLSALQLDRRLAGLAHSLGASYTRYADDLTFSGDARIAPILQRAVPQIVAEQGFRLNPAKTRAQPAHHRQTVTGITVNETLNPARGSYDLLKATIHHLSRPTDPRRHDRAFLANLHGRIAWVAQINPAKGAKLHDRLHAALLTPQDS

SEQ ID NO: 5503 - protein, 395 aa, Rhodobacter sp.
  source 1..395: note = Related to JADJTJ010000002.1
MPASFVRAPETLAEALIRAFPGPVAPDPALILGLLAHQPEIARLLSHARRHDVAPAVWLQPPPFRPAPALADLPLPRLATCDALADWLALPPDRLTLYADLRGLSARTDSPFAPHYHHHLLPKADGSLRLLEEPKPILKRQQRQVLHGLLSRVPPHDAAFGFCPGRNCIGAAARHAGEAVVLGFDLVDFFPSIGIQRVYAVYRTLGYPRAVAWALAGLCTALTPPKILATPALAAREALSTRHLPQGAPTSPALANLCAHALDRRLAGLARSLGASYTRYADDLAFSGDTRIAPILRTAVPRIVAEEGFRLNPAKTRQMPAHHRQCVTGLVVNAGVNTPRAAFDQLKATLHRLARAGDPRRTDPGFLARLSGQIAWVEQVNPARGARLRTRFDAL

SEQ ID NO: 5504 - protein, 445 aa, Gemmobacter serpentinus
  source 1..445: note = Related to NZ_WCHR01000012.1
MPPAFNRPVVSLAVLGPIASSLVQAEWKEASLKQVLLQRLPVRMRNQAGRVAGRLIQAFPGGSAPDVGRLRRMLQDLSISARLRDHARRTDSLPAPVLDPPRFRPVSALDRLDLPKLATPGDLADFLAITPEQLIRFADLRGLSAHSTDPFGPHYLCHLRPKRNGGHRLIEAPRPFLKTLQRRILRGILDHVPPHHAAFGFRRGRNCVQAAARHAGERVVLGFDLTDFFPGLDVARVYGLFRSLGYPAATARDLAGLCSALTPRRYLLGHDPTLTGRLHARHLPQGAPTSPALANLLAFRLDCRLAALARSLDAQYSRYADDLSFSGDARIAPILLRAVPEICAEEGFRPNHRKTRVMPSHQQQKVTGILVNHHTNLPRVEYDRLKAILHRLQQPDDPRRQDMAFLGHLSGRIAWLAQLNPHRAARLSQSLQLVSASARTVPPAR

SEQ ID NO: 5505 - protein, 440 aa, Gemmobacter caeruleus
  source 1..440: note = Related to NZ_VKKX01000051.1
MAPLHPDDPPPLPPVAAVFGPLAASLSQSPWQEDALHRLLLTRLPGPLRAQARRIAQGLIGAFPGSVAPDAARLCKVLRDLPGARGLRAHAARTGLRPAPELTPPTFLPAPGLAGLALPVLTSPADVADFLAISPDQLIRFADLRGLSARSPDPFGPHYLCQLRPKRRGGWRLIEAPRPFLKTLQRRVLSSLLAHVPPHPAAYGFRRGRNCIMAAARHAGEPLVAGFDIADFFPRLTVARVYGLFRALGYPAAVARDLAGLCTAITPAATLAALPARDAPIWRTRHLPQGAPTSPALANLLAWRLDCRLAGLARILGATYTRYADDLTFSGPARIGPILRDAVPAILRGEGFAPNLAKTRLMTAQGAQIVTGVMVNRHVNLPRAEFDRLKAVLHHLARPDDPRRQDAGFLAALSGRIGWVEQINPARGAKLRARLVALTG

SEQ ID NO: 5506 - protein, 401 aa, Exiguobacterium profundum
  source 1..401: note = Related to CP059262.1
MPTSLRRLASPLAAELRAAFPGLSAPDAARLLAHLLASPLGQRIADHAARTGTRPASVLDPPAFQPLPALADLPLPRLSSPGDLAEFLALSPDQLIRXADLRGLSARSPTPFGGHYRIHLMPKPANGLRLIEEPKPFLKKLQRRLLHGLLDAVPPHAAAHGFRXGRSCIGAAAAHXSEAMVACFDLADFFPTFGFARVYGLFRSLGYPAAVARDLAXLCTALTXPDILRGTPGLAAGRXTNRHLPQGAXTSPVLANLMAFALDSRXRGLARSLGARYTRYADDLTFSGDARIAPILARAVPEIVAEEGFRLNPSKTRLQPAAHRQVVTGLTVNTRVNIPRSEYDQLKAILHHLANPADPRRADPAFLSSLQGRIGWVEQVNPHRGARLRHALATLALDGAR

SEQ ID NO: 5507 - protein, 427 aa, Ruegeria sp.
  source 1..427: note = Related to NZ_WQIE01000002.1
MHLQQAIRSLAASLSQAQWTYFDTKLILQQRLPPRLRNLAPSLARRLVSALPQPYAPSARTIAQTLASFPETGQIARYTEPRKLVAPFPIAPQKFAPIDIFRSLNLPDLSSCDELAEWLAIPPIQLVRFADLNGLSNRTKNAFAPHYRFHIIPKRDGTSRLIEEPKPALKRLQRRILRSILNQVPTSPHAFGFVQDRTCIQAAARHCGEPVVVSFDLKNYFTSITYPRIFGVFRCLGYPADVARHLTGLVTLVIPAHVRAQLGRIGHHDLRRRHLPQGAPTSPALANLCSYNLDRRLAGLAQSLDATYTRYADDLTFSGETHIARTLCSVVPDIIRDERFTTNPDKTRVMPSHTSQVVTGIVVNHHVNITRKDFDRLKARIHRLRSQGKDDLETLQHLDGQIAWVEQVNPLKGAKLRQRFEHALSLT

SEQ ID NO: 5508 - protein, 395 aa, Shimia sediminis
  source 1..395: note = Related to NZ_RYZK01000009.1
MAFASHLASEILLWYPKTYSPCQSDLATTLSRLPEIADVWNYARQKNVWPRSRIDTPEFLPAPALEGLDIPHLATCADLADWLLISQDQLTRFADLKSLSASTDNAFAPHYRYHTISKASGQARLIEEPKPFLKTLQKRILKGILNHVPTSEISFGFTRGRDCLQAASKHCGEDVVVTFDLRSFFPSVRQSRVIGLFRCLGYPDAVARHLAGLTTVITPAFVLKRLRLENDRFLPNRHLPQGASTSPAIANLSAYALDRRLMGLARRLDAQVTRYADDITFSGPREITTPLKHAVPEIIADSGFVVNPQKTHIMPRTQCQVTTGLVVNDHINILRRDYDNLRAELHHLLTLDDPRRRDASYLFALDGRITWVERVHPVRGQKLRESFNQVLLRGN

SEQ ID NO: 5509 - protein, 429 aa, Sulfitobacter algicola
  source 1..429: note = Related to NZ_JABUFE010000011.1
MNRANLAQSLAGSLVCCDWTLWAVEHHLTSRLPSGWSKTASNLASELIAAFPAPYVPSQAALVQRLISSDYLTRILDHAMKHDLRFSPILDSARFAPIPAFEGLDIPQMTTLSDLADYLALNTDQLVRFTDLMGLSNGTDNVFAPHYRFHLIAKRNGRQRLIEEPKPVLKSLQRRVFQTILNKVPVHDEAYGFVPGRSCRDAAARHTGEQVVIGFDLRNFFPSVSYGRIYGLFRALGYPDGVAHHLCGLCTIRTPPHIRARMSYDDGRGLEARHLPQGAPTSPALANLVCHRLDCRLSGLAHSLDARFTRYADDLTFSGDRRMANAILKVVPQIVTSEGFALNPTKTRCQGQHGRQVTTGIVVNSHINLPRETYDYLKAVLHHLIQPKDPRRGDPAFLKSLSGQIGWVEQINPGKGAKLREKFDQIIQH

SEQ ID NO: 5510 - protein, 443 aa, Pleomorphomonas sp.
  source 1..443: note = Related to NZ_JAKJIC010000019.1
MQEERTPPIGRTALASALVHALSTTAAWTETALVDTFTHVLQGAAPGSVASLARLLAADASVACGPERRLGQIIEDAPSFVRILQTVQRRRLVLAPPLTPPLFRPASRFAGLPLPCLATSGELAAWLGLTPTELDWFAATLPQRGETQPPLQHYSLRAVAKASGRLRLIEAPKTRLKAIQRQILAGILAHVPAHPAAHGFIAGRSVLTAVNPHAGEGLVVAVDLADFFPSTPIGRVWRLFRHLGYPDAVAHLLTGLVTTRTPSPALDGLLLPPETRRRLRVRHLPQGAPTSPALANLAAYGLDVRLSSLASRLDASYSRYADDLVFSGSGPQLRQSQRFLRLVSEIAAAEGYALHPDKTRIMPSSGRQQVLGVTVNAHLNLPRPSYDLLKAILTNACRHGLASQNREGLPHFRDHLNGRIAWFEQVNPARGLKLRALFDRIAE

SEQ ID NO: 5511 - protein, 440 aa, unidentified
  source 1..440: note = Related to JAIENJ010000270.1; note = Parvularculaceae bacterium
MTARAAQYLGKRAPRSLQRLIEHVIASARTPYPPSSEHVARALLNSTYFDAAARAVLQADSPPKAVLHSPAFAPARAFAGLPIPRIETAGELAAWFKLSVDELDWLADTRRGHGRASQAQLQHYSYALAAKRVGAPRLIESPKPRLKAAQRRILHEILDHAPSHSNAHGFVRGRSCISGAQIHAGEPVVLRLDLQRFFTGIRASRVHGLFRALGYPSETARLLTGLCTTCTPQIATAAIEDWRIRQEYGAPHLPQGAPTSPSLANLCAWRLDQRLGGLARRLAINYSRYADDLCFSGDRALAARAPSFVSLVETIASEEGFVVNSDKTKVMRASSSQRVTGVVVNQHVNAQRHDYDALKATLHNCRTSGDPETQNRKGLPDFRAHLEGRINWVEQLNPHRGMKLRLMFDAIHWPAGARDAGDRRADASRRPPLPFAGEAD

SEQ ID NO: 5512 - protein, 442 aa, unidentified
  source 1..442: note = Related to JAEUMS010000015.1; note = Hyphomonadaceae bacterium
MADRALIARELAAFLLAGAWTKGRLLARTRQYIGNSAPKALQRLIEHVFALVETPYPPAPDELARMLMASRDFDVAARRMLRADRPLQLALHSPKFAPCRSLAGLPVPKLETPGDLAAWLGLPMELVDWLADTRRGHAHAATTQLQHYSYTFVPKRIGAPRLIEAPKARLKAVQRRILHEILDHLPPHSSAHGFVRGRSCISGAQLHVGEYIVVRLDLRRFFSSIGSARVHGLFRSIGYPWAAARLLTGLCTTCTPAKTLAALTDWRERQEYTAPHLPQGAPTSPTLANLCAWRLDNRLTGLGRRLGINYSRYADDLCFSGGRAFAKHMPRFLSLVGTIVGEEGFALNGRKTSLLRANAAQRVTGIVVNQHVNVAREQYDALKSILHNCRVSSDPTTQNRDSHPDFKAHLDGRIGWVEQVNPHRGRKLRLMFDQIKWASARA

SEQ ID NO: 5513 - protein, 438 aa, unidentified
  source 1..438: note = Related to JAEUMQ010000004.1; note = Hyphomonadaceae bacterium
MASSTTIAKGLAAALVAGVWTERALLARCEGFLGAATRASQKKLISALLVRAYDRYPHSPASLVRWLLRSPAFERAAAPLLRAGPKPPVVLKPPLFWPAPPLAGLDVPKLATPRDLADWLEISVEQLDWFACAKRQAIALSFPKLRHYECALVRKRSGGSRLIEAPRRRLKAIQRRLLREVLDHVPTSDRAYGFVRGRSCIDGAQVHAAEEVVVTLDLQRFFQSIAARRVHATFRGIGYPWAVARLLTGLCTTRAPSWGFADVPYTEFDWRARKMLEAPHLPQGAPTSPTLANLAAWRLDRRLAGLARRLDANYTRYADDLAFSGRRNIASPTFLRAVGEIVVDEGFVLNRPKTHIMRRGARQEVTGIVVNEHVNLPRDAYDALKATLHNCIRNGAAVENRDGHTDFRAHLDGRIGWAETVNPHRGARLRAMFERITW

SEQ ID NO: 5514 - protein, 433 aa, Acidisphaera sp.
  source 1..433: note = Related to NZ_LMUJ01000042.1
MPTRHWAANNLAARLLAGPWTQEAIAIVIDAVLGPVDLRARADLITDVAALAEATYPPTPQALTTYLVRSRSFKPHPERPIPAVLAPPRFAPTPPFAGLPIPALATQGDLAAWLGQSPEQLDWLADERRRHSRVTRPPLRHYHYTFASKRTGAPRLIEAPKPRLKAIQRRILREILSPVPTHPRIHGFVAGRSCLTGAQIHAGEAIVATFDLTQFFPSIGLPRIHGLFRSLGYPWAVARRLTGLCTTTTPSGVFPDPQHPDHALYRVPHLPQGAPTSPALANLLAWTLDRRLDGLARSAEANYTRYADDLAFSGDEAFVARIDRFRRTVETILEEEGFALNTAKTRIMPRSTRQRVTGIVVNEHCNIGRAEFDTLKAILHNCTRTGPAAQNREAIPDFRTHLDGRIAWVEQVNFPRGLKLRRLFDQIDWTPPP

SEQ ID NO: 5515 - protein, 418 aa, unidentified
  source 1..418: note = Related to JADLHI010000158.1; note = Hyphomonadaceae bacterium
MEARAAAYLGKSTKRWQKRLIAEIVSANGAGYPPSPAALADRLLASSHFDRAVAIVLRQKTPPPMVLDPPAFAPAPAFAAMHPPRIETIGDLATWLEIPIARLDWLADEKRQHSRANLPILQHYHYRFVPKSSGAPRLIEAPKAQLKALQRRILVEILDLAPVHPRAHGFVRGRSCLTGAQVHAGEQLVVCADLRDFFPSIRAARIHGLFRSFGYPTAVARALTGLCTTSTPRSIFQRIDEGQQFDWFTRRRYSAPHLPQGAPTSPALANLCAWRFDQRCDGLARALGGSYTRYADDLTFSGDAAFAARTSRLIAALGKIIGEEGFAINESKTRLMRRARPQRVTGIVVNDHVNVPRRGYDELKALLHNCCKHGPASQNRDRRTDFRAHLDGRVGWVEQVNPNRGAKLRTAFDAISWS

SEQ ID NO: 5516 - protein, 443 aa, unidentified
  source 1..443: note = Related to JADFVY010000399.1; note = Proteobacteria bacterium
MSFENWTAWHLAEILIATDWTPQAMEDAARKALGGNRQRKWLPRLIADIMGSSPTAYAPSPRTVAGLILDSRAFRGLRLNDRERPLFDRYFLPAPIFSPTPAFRDLAVPELANALDSARWLNLSPRHLDWFADIEGYRSSAAAESTRHYVQAWIPKRTGPPRLIEAPKQILKDLQRKILREILDPVAVHDSAHGFRRGRSCITAAQLHAGEDMVITMDLKDFFPSVPIRSVHGIFRSLGYPWAVARLLTGLCSTTAPASLFDNPPGDSGHDEETRRLFHQRHLPQGAPTSPALANLCARRLDGRLNGLAHCMEARYTRYGDDLAFSGDRDFAARSGAFLRMASAICAAEGFAVNHRKTRIMRQGDCQRITGLTVNSHINVPRGAYDRLKAILHNCTRHGPANQNRENHPDFRAHLDGRITWVENVNPPRGLRLRLMFMAVEWG

SEQ ID NO: 5517 - protein, 400 aa, Hyphomicrobium sp.
  source 1..400: note = Related to JAEUME010000009.1
MLRRLAAFADHSGQPPSPDWLTDFFLAAPEFAGAVARILKEPQILHCVLKPAKFAPAKKFAGLNVPKINSSGDLAAWLGLSNEHLEWLSDTRRQHSRTAIPVLQNYQYTFVLKKHGPPRLIEEPKPRLKTIQRRILREILDRVPVHACAHGFVAKRSCVTSAQAHCGEFIVLAADLKDYFASIPAARIQGIFRAIGYPSSVARLLTGLCTSGTPTSVFASRSGGRMCDWQTRKLYEQPHLPQGAPTSPALANLVSFSLDRRISGLAARFGAKYTRYADDLAFSGDEIFDRRVDTFLEHVAMIAVDEGFMLNAAKTRIMRRSQSQRIIGVTVNDHINLPRGTFDELKAILHNCRKFGPNTQNLLGVANFEEHLRGRIAWAASLNPARGAKLHAMFNLIRWT

SEQ ID NO: 5518 - protein, 441 aa, unidentified
  source 1..441: note = Related to JACMJQ010000424.1; note = Chitinophagales bacterium
MNTPPWIARNLAASFLGSAWNKNDLRLAATKTLGLATRAAQRALINRLFDAHNAPTPPSEDWLTSYFLMSEWFEIASLRAREHPRGVNAVLTPPRFAPSQRFADFGAPKLTAPGELAKWLAVSIEYLDWFADRKRMQAKTDIPLLQHYSYKFAPKKSGPPRLIESPKPQLKAMHRLILREMLNCAPVHECAQGFVRRRSCLTAAKIHAGEHVLITADLKDFFLNTRLSRVHGVFRNLGYAQPVARLLTALCSTSTPQSLFARLPVSQRHDWETRKRFEAPHLPQGAPTSPALANLCAWRLDCRLFGLAKSFGANYTRYADDMAFSGDKAFADRVAGFVAALETIAADEGFALNRRKTRVMRGHTSQRVTGVVVNEHVNIARKDYDRLKAILHNCRRNGPEAENRAQIRTFRAHLDGRVNWVETVNPNRGTKLRRIFNEISW

SEQ ID NO: 5519 - protein, 376 aa, unidentified
  source 1..376: note = Related to JABFRX010000116.1; note = Alphaproteobacteria bacterium
MKKDDPAKALAAALLAGEWSRSALEKRAITALGARSKRRASRIVDDIWTNHKAPYVPHRNELRRLIYASNAFAGLGETAITRLNELKPKEQPPRFAPLPRFQNANLPPLATAGDLAQWLGLSPSQLDWFADERRTLARASDTLQHYSQTWLPKRSSGWRLIEAPKPRLKDIQRRILRGILDPIPTHDAAFGFVPGRSCTTAAAKHAGEGVVVTLDLRDFFVSVPAHRVHALFRCLGYLWSVARLLTGLCTAATPHATLASDQLDHETRQRLRARHLPQGAPTSPTLANFAARRLDARLDGLARRFEARYTRYADDLTFSGDERFHTSVPRFLIAVAQIARDEGFALNAAKTRIMPRHTRQTVTGIVVNDHINVARP

SEQ ID NO: 5520 - protein, 441 aa, unidentified
  source 1..441: note = Related to JAIOQG010000119.1; note = Alphaproteobacteria bacterium
MKSNRHLVPILAFMLLDGPWTPMALKRRAVRILGRRSRTRAIELVEEILASIKTPYAPQFKQLERAIVSCSSLHKIGEATADRLGKLSVTVPPPRFAPLAPFRGAGLPGFTTTAALAHWLAVPLGQIEWLADSKHTLSHATSDVLHHYACHWIPKQTGSWRLIESPKPRLKAIQRRILHDILDHMPVHDSAFAFIKGRSCATAAARHAGEDVVITVDLKDFFLTTPPRRIHAIFRCLGYPTSVTRVLTGICTTATPAAVLETNADIAARNHETRKRYASPHLPQGAPTSPTLANLAARGLDCRLTGLASRFNARYTRYADDLTFSGDKALLARSNRFIRAIQEIVQDEGFALNASKTRIMPRSTRQSVTGLVVNQHINIARPDYDNLKATLTNCARHGAPSQNREGHADFRAHMDGRVAWVENVNRRRGEKLRRIFEKISW

SEQ ID NO: 5521 - protein, 436 aa, unidentified
  source 1..436: note = Related to JAEUML010000192.1; note = Alphaproteobacteria bacterium
MSRRTDHFPVLALALLQGRWTRNALRKRARDLLGPRSKTRANRLVDEILAVHRLPYTPGWRTLTKIVAGASALHGLSDATIERVASTPGRQHPPRFEPIAPLQPASAPTLATTADLATWLEIPIDHLDWFADERRTLDREQDKALSHYAYHWRLKRSGAWRLIEAPKPRMMAVQRRILKDILNRLAPHEAAHGFVAGRSCVTAAAKHAGEHVVVTVDLRDFFLSAPVGRVHAIFRCLGYPHAVARALTGLCSTSTPRHVAAEHFDHEAQRRHATRHLPQGAPTSPALSNLAALGLDRRLAGLANRFGARYTRYADDLTFSGDSPFCARVPGLLKAVADIARDEGFALNAAKTRIMPRHQRQSVTGIVVNDHINFARDDFYRLKAALTNCVRHGPASQNRDAHPDFRAHLDGRITWVERLNLRRGEKLRRLFDAIAW

SEQ ID NO: 5522 - protein, 447 aa, unidentified
  source 1..447: note = Related to JADMJM010000043.1; note = Hyphomonadaceae bacterium
MPSQNQIAGDLAAALLGGAWTRRALLRRLSGYLRNKAARSNARLVDEILERTEGSYPPSPFALKRFILDSRAFPRAAAVLLRTTVPVAAVLTPPRFWPAAGNAAPGVPEIETPGDLAIWLGVPISRLQWLADEQRRHHTTAIPMFQNYRYRFMPKASGGWRLIEWPKPHLRAIQVKILREILDRLSVHEAAHGFVRGRSCKTAAAMHAGEAVVACMDIRDFFGSVRLQRIHAIFRRIGYPWAVARLLSCLCVTSTPASVFARAPDDAGLDWETRKRFSERHLPQGAPTSPALANLVVGEMDRRLEGLARHCDARYTRYADDLSFSGDETFARRIGGFLGSATDIVRDEGFSIHTAKTRIMRRGARQVVTGLVVNEHVNILRHDYDTLKAILHNCAKHGAESQNRSGVPNFPAHLAGRIAWVEHVNPVRGARLRTLYNKVAWTPRAEI

SEQ ID NO: 5523 - protein, 318 aa, Inquilinus sp.
  source 1..318: note = Related to JABDIP010000422.1
LPPELDWFADTRRQHGVTEKRPLQHYSYAWVPKRRGAPRLIEAPKPRLKALQRQILRDILDRIPVHEAAHGFVKGRSCLGGAARHGGEAVVATLDLADFFPSVPLERVHGIFRCLGYPTAVARLLTGLCSTTTPRGVLAAAPGVKRPPGAFVPEAAPHLPQGAPTSPALANLSANRLDARLDQLAEYAGARYTRYADDLAFSGDDEFAAGIGSFLATVEEIIRAERFAPNRRKTRIMRRAGRQQVTGLVVNQHLNVPRPDYDRLKAILHNCARHGPAGQNRDGHPDFRAHLDGRVGWVQTVNPHRGLKLRLLFEAIAW

SEQ ID NO: 5524 - protein, 445 aa, unidentified
  source 1..445: note = Related to JAFECD010000003.1; note = Proteobacteria bacterium
MHWPNSSRHRLIARNIAVTLLAGAWTERAMADRLETLLGSTTRSTQRGLIGAIFDKSGGPYPPSLAELTASILEAPQFPAAARLALEYTTRLDIATRQPRFAPIARFADLEIPRLTTPGDVAAWAGLSIPELEWFADERRQHGRTAIPIFQHYTYAFRKKSSGPPRLIEAPKPRLKTIQRKILRDILDHIPVHPAAHGFVEGRSPRTGAAQHVGAPVVIAVDLENFFLSVPVGRIHALFRSVGYPDEAARALTRLCTTMTPRSVIDRVPNPARHTRAALAPYLDPHLPQGAPTSPALANLVAWRLDVRLAGLANSFGAKLTRYADDIVFSGDLTAPGKTQSLIAAIAEIVEDEGFGLNDKKTRIMTASQRQSVTGIVVNSRLNARRDSYDSLKAILHNCRLNGFEAENREGHADFRAHLEGRIGWIESLNPTRGRRLRDIFSRIP

SEQ ID NO: 5525 - protein, 434 aa, Hyphomicrobium sp.
  source 1..434: note = Related to JABFRT010000004.1
MARNIANVLLSGLWAERAMLLRLQTALGKATAKSQRALIAEVLKANPASYPPPAAELVRTIFSAPSFEKAAASALLSKAPLHMALRPPKFAPTADLSDCDVPALPTSGDVARWLGLPLEHLDWFTDERRQHGRTAIPDLQHYVYAFRAKPHGPPRLIEAPKPRLKTMQKRILHGILDSVPVHEAAHGFVKGRSCKSGAEQHAEAAIVICFDIADFFLTSPLGRVHALFRGLGYPHAAARVLTRLCSTSTPETVFDRISSPRKHTRAALQAYCEPHLPQGAPTSPALANLVARRLDIRLTGLALSLGGRYSRYADDLTFSGDAAFAKKTNSLMAAVAGIVEDEGYALNERKTRVMTSSRRQQITGIVVNARTNAPRDAYDQLKATLHNCRKTGLAAENRDGHADFRAHLAGRIGWVASLNPARGDRLRAMLTEIA

SEQ ID NO: 5526 - protein, 449 aa, unidentified
  source 1..449: note = Related to JAEUMD010000019.1; note = Hyphomicrobiaceae bacterium
MRFEELIARNLAAAWLAGPWTEAGLFERGQEVIGKAGRRRFLQLVRAAIQAAPSDYPPSPGWITAFLRERDGLPDYTERFLNSRRSISLALEPAHFSSSLSLAPLDVPRLETPHDLAVWIGVPIEHLDWLADSRRQAYSTDIPMLQNYRYAFVPKRTGPPRLLECPKPLLMAAQRKILSGILDKIRAHDAAHGFVAGRSCLSGASRHAGEDIVIALDLKDFFLTTPVRRVHGIFRALGYPWAVARLLTGLCTSAVPLSVFRRLPPAERHDWKTRQLFNSRHLPQGAPTSPALANLAAYRLDVRLTGLARSLDATYTRYADDLAVSGSLTDRNAQKILATVRSIAREEGYEVHPSKQRVMRSDARQCITGVVVNRHVNVPREDFDRLKATLHNAARHGPRSQNRDGHADFRAHLDGRVTWVENVNPNRGAKLRRLFDAIVWKEGSGDAIG

SEQ ID NO: 5527 - protein, 354 aa, unidentified
  source 1..354: note = Related to JADKAD010000001.1; note = Deltaproteobacteria bacterium
MLDALDLPPLPHAEALASWLGIDADELVVLADCEGRERRRAARAQHYHYRRVAKPGGGERLIEAPKPRLKAVQRHILHGILDRVPPHDAAHGFVPGRSVWTGAGRHTGREMVIRVDLRDFFASVRGARVFALFETIGYPRSVCSLLTGLCTNATPATVWGTPSHAISTAALRERWHRIQRYAAPHLPAGAPSSPALANLAAHRLDRRLAGLAHAVDGSYTRYADDLTFSGDALRRGTLAFFSSVCRIVVEEGFEVHARKTRFHHRSQRQLVTGVVVNEHPAARRSAYDRLRAILFNCVRHGARSQADRDLAAFRAHLRGRIEWFAHSPARAAKLHALFDRIDFSEPDDDPPADG

SEQ ID NO: 5528 - protein, 333 aa, unidentified
  source 1..333: note = Related to JAEUJU010000311.1; note = Myxococcales bacterium
ALADVLALDDAALRGLADLEGHERRRRPTARHYHYACARKADGGERLIEAPKPRLKAAQRRVLRRLLDRVPPHDAAHGFVRRRSAVTSAELHAGQAMVIRVDLRDFFASIPASRVHAIFGALGYPVAVRRLLTGLCTNATPLAVWGPASPSLSSVALRERRRRLAQYAGPHLPAGAPTSPSLANLAALGLDRRLAALARSMDCRYTRYADDLTISGGDALRRGAHACVSTICRIAVEEGFVIHPRKTRLQPRGVRQTVTGLVVNARPNVPRDTYDRLRATLFNCVRLGPRTQSDLPLAELEAQLRGRVEWCAVNPGRAAKLRALFDAIDWSAA

SEQ ID NO: 5529 - protein, 352 aa, unidentified
  source 1..352: note = Related to JACMJN010001335.1; note = Deltaproteobacteria bacterium
MTEPLRFESEVELARWLALTPAELWWFADVEGIGRTRVNGPLAHYRYRFHAKPDGSTRLIEIPKLRLKLIQRRIARRLLAPLQLHDSVHGFVRGRSAITGARVHVGRALVLRVDLREFFASVSAGQVRAVLRRLGHADAVARALTGLCTNCTPRAAWTGSSTPANAEAVRQLWHRRQRYASPHLPTGAPTSPALANLVAGTLDLRLAALARSFGAAYTRYADDLTFSGDAPFRRDAERFFELVCGAVAEHGFAVHGRKTRFQGAETRQQVTGVVVNVHTSLVRRELERLEAIVHNCVRFGPAGQNRSGHPDFRSHLAGRIAHVASVHGRHGARLRERFAAIDWSPLDERSEA

SEQ ID NO: 5530 - protein, 423 aa, Gordonia lacunae
  source 1..423: note = Related to NZ_NGFO01000034.1
MTDPFLRAHEAAEVAADFSRTYTSWTWPEVLTALRVLLPAEVTADVADRIFELSPHEPRHPATVVLEALAPWTHPEPQPRRPLVLHEPESSGTVLDDLPDLYDVEQVAHWLDFTVPELEWFADRGQWLRTARPPLRHYRIWRRDKREGVRVIEAPKPRMRETQRRLLRRLVERIPAHSAARGFVPGSSPAAFAWPHTDRPAVVRVDLRHCFESITVQRVRAVFRDAGFQPHIARLLAELCTTATPVDELRGLDHMHAALLRERHLPQGAPTSPHLANLVMRSLDRRLDGYARRNGLRYTRYGDDLAISGDAIDADRVLWTVLRIVDAERFTVHPDKVRIMHSHQRQRLAGLVVNDRPQVARSEYDNLRALLHNARRHGAASQNRADHPDFRAHVYGLIAWVGATGEARRRRLLDLAATVDWET

SEQ ID NO: 5531 - protein, 423 aa, Gordonia hongkongensis
  source 1..423: note = Related to NZ_CP095552.1
MTEPFLQPHEAAEVAAAFSRTYTAWTWPEILAAVTAVLPAEVTSEVAAGIIELSPHEPRHPATVMIQALAPWTHPAPVAAQPVVVHEPRSAGTVSDALPDLYDVEQFAHWLDFTVPELEWFADRGQWLRTARPPLRHYRIWRREKRDGVRVIEAPKPRMRETQRRLLRRLIERIPAHPAARGFIPGSSPAAFAWPHTDRPVVLRVDLRHCFETITVPRVRAVFRQAGYPPHIARLLAELCTTATPVDELRGIDHTHAALLRERHLPQGAPTSPHLANLVMRPLDRRLDGYARRHGLRYTRYGDDLAISGDAMNADRALWTVLRIVEDERFTVHPEKVRIMHSHQRQHLAGLVVNDRPQVARSDYDNLRALLHNARRHGASSQNHDEHPDFRAHVYGLIAWVGATGETRRRRLLNMARTVDWDS

SEQ ID NO: 5532 - protein, 423 aa, Gordonia sp.
  source 1..423: note = Related to NZ_JAKOIW010000003.1
MTDPFLTAADAAETAAAFARTYAAWTWPEVVAALRAVIPAHFVDDVAERVFELSPHEPRHAAELMTEALAPWTHPPEPVREPLILREPISPGTVPDELPDLYDITQLAHWLDFTVPELEWFADRGGWLRTAHPPLRHYRIWQRPKRDGVRLLEAPKPRLRETQRRLLRRLVEKIPAHRAARGFVPGSSAAAFAWPHTDRPVVLRVDLRHCFESITDRRVRAVFRDAGYPPHIARVLAELCTTTTPVDELRDIETGHAALLRERHLPQGAPTSPHLANLVMRPLDRRLDGYARRHGLRYTRYGDDLALSGDSMDADRALWTVLRVAEAEDFTAHDDKVRIMRRHQQQRLAGLVVNDRPQVARSDYDNLRALLHNARQHGASSQNHDDHPDFRAHVYGLIAWVGATRDERRRRLLTMADAVDWDA

SEQ ID NO: 5533 - protein, 422 aa, Gordonia sp.
  source 1..422: note = Related to RKME01000013.1
MTPSLSADEIAEVAAAFSRTYAAWTWPEVLEAVHAVLPSSIADDVSVRLFELSPQEPRHPAAALTDALTPWTAPAPTVRPQISLQEPTSTGTVIDGLPDLYDVEQLAHWLDFTVPELEWFADRGGWLRQARPPLRHYRIWRRAKREGVRVIEAPKPRMRETQRRLLRRLVEQIPAHPAARGFVRGSSAAAFAWPHTDRPVVLRVDLRHCFESISVRRVRGVFREAGYPQHIARVLAELCTTATPVDELHDIEAGHAALLRERHLPQGAPTSPHLANLVMRSLDRRLTGYAQHNGLRYTRYGDDLALSGDEMNADRALWTTLRVVRAEGFTVHPGKVRIMHRHQQQRLAGLVVNDRPRVARADVDNLRALLHNAIHYGASSQNVDDHPDFRAHVHGLIAWIGATGEARRRRLLEMADQVDWDR

SEQ ID NO: 5534 - protein, 423 aa, Rhodococcus sp.
  source 1..423: note = Related to NZ_SLVY01000022.1
MIEPSLPAVEVSEAAAVFSRIYTAWTWPEVLRALDSVLPGEIAPDVAHRLFRLTRAEPRHPAAALVDALAPWTIPRPAVPRHIELHEPTSTGSVLDGLPDLYSVEQCAHWLGLTVPELEWFADRGNWLRTAGPPLRHYRIWHRTKRDGVRVIEAPKPRMRETQRRLLHRLVGKIPAHPAARGFVPGSSPAAFAWPHTDRCTVLRIDLRRCFETITLRRVRGVFDRAGYPPRIARLLAELCTTTTPVDVLHGVTSAHAALLRDRHLPQGAPTSPHLANLVLRSLDRRLDGYARRNDLRYTRYGDDLALSGDTLDVDRTLWMVVRVVSAEGFVVHPDKLRIMHRHQRQRLAGLVVNDRPQVARSDYDTLRALLHNAIREGAASQNRSGHRDFRAHVYGLIAWIGATSPARRQRLLEMAAAVDWQS

SEQ ID NO: 5535 - protein, 424 aa, Williamsia sterculiae
  source 1..424: note = Related to NZ_FTNT01000002.1
MAAPVLTVAEAAEAAADFSRGYGGWTWPEVLRAAGAVLPEGIAEDAVERLFAANPREPRHPAQAFTEALQPWTLPTPAPPRVIELSDPVPVGPMPYGLPDLYDVELLAQWFGLTVGELEWFADRGRWLRNARPPLRHYRIWRRHKRDGVRVIEAPKPWMRETQRRLLRRVVERMPAHPAARGFVAGSSTAAFAWPHTDRPTVVRVDLRHCFESITVGRVRRVFADIGGYRAPIARVLADLCTTATPVDELTGVEYGHAALLRDRHLPQGAPTSPHLANLVMRSLDRRLAGYARRNGLRYTRYGDDLAVSGDGIDADRVLWVVMRIVAAEGFVVHPEKVRIMHRHQRQQLAGLVVNDRPQVARDDYDNLRALLHNAIRDGAATQNRDGHDDFRAHVYGLIAWVGATSPARRQRLLEMARQVDWAR

SEQ ID NO: 5536 - protein, 422 aa, Gordonia desulfuricans
  source 1..422: note = Related to JAADZU010000055.1
MSEPSLPAGEVAAAAAEFSRILTAWTRSEIVRAVIAVLPYDVAAEAGNRLFERTPHEPRHPAAAFVAALQPWTLPTPVTRTWDLTEPVRADGLPAGLPDLHDVEQFAYWLDFTVPELEWFADRGGWLRTARPPLRHYRIWRRAKRDGVRVIEAPKPRMRETQRRLLRRLVERIPAHPAARGFVPGGSTAAFAWPHTDRPSVLRVDLRHCFETVTTARVRRVFADVGYPPAIARLLAEICTTATPVDELTDIDHTHASLLRYRHLPQGAPTSPHLANLVMRSLDRRLDGYARHNGLRYTRYGDDLALSGDDFDADRALWVVLQVVGDEGFLVHPGKVRIMHRHQQQRLAGLVVNDRPQVARADYDNLRALLHNAIRDGAQAQNRDAHPDFRAHVYGLIAWIGSTGTLRRDRLLEMAARVDWDS

SEQ ID NO: 5537 - protein, 429 aa, Gordonia polyisoprenivorans
  source 1..429: note = Related to CP003119.1
MLLDHSMTDATLAFDQVRELAAEFSRIYTGWTWPEVLRALRAVLARDLADAVAPRVFELAPTEPRHPEAVLVEALSPWTLLPPDPQLVLRPQEPRSSGTVPEGLPDLYDVTQLAHWLDFTVPELEWFADRGGWLRTSRPPLRHYRIWRRSKRDGFRVIEAPKPRMRETQRRLLRRLVEHVPAHPCARGFVAGSSTTAFAWPHSDRPVVLRADLRHCFETITTTRVRRVFHDVGYPAHIARILAELCTTATPIDELGGIDLAHRALLRDRHLPQGAPTSPHLANLVMRGLDRRLDGYARANGLRYTRYGDDLALSGDSMDADRTLWVVLKIIETEGFTAHPDKVRVMYRHQQQRLAGLVVNDRPQVSRASYDNLRALLYNAAAHGAQSQNHADHPDFRAHVLGLISWVGATNPTRRQRLLQMADAVDWDS

SEQ ID NO: 5538 - protein, 425 aa, Gordonia sputi
  source 1..425: note = Related to BAFC01000046.1
MTRPQPPFTTDQVRVLAAAIADRIVDWTWPAVVRAVGIELPAEICVDVAQEAFALAPDEPTHTAEIFRLALVPWTVPDPPATRVVELPGPPPATALAHDLPLLSDVEQFAVWLDFTVPELEWFADRGTWLRTANPRLRHYRVFRREKRSGVRVIEAPKPRMRETQRRLLRRLVVRIPAHPAARGFEPGSSPAAFAWPHSDRTTVLRVDLLHCFESIGVGRVRRIFDEVGYPPHIARLLAELCTTSTPADQLSGIDYAHASLLRRRHLPQGSPTSPHLANLALAQVDRRIAGYANANGLRYTRYGDDLAVSGDDLDLPRALWTVTRIVDDCGFAVNTKKTRVMHRHQQQRLAGLVVNDRPRVSRHDYDALRALLHNAALTGAQAQNHHGHNDFRAHVYGLIAWIGATGEVRRQRLLDMADRVDWTA

SEQ ID NO: 5539 - protein, 425 aa, Gordonia aichiensis
  source 1..425: note = Related to NZ_BANR01000005.1
MTRPEPPFTAAQARAISAAIADAMADWTWPEALRAVGAQLPAEISADIAQSAFAMAPAEPAHTAEVFRLALLPWTAADSPSGRIVELTGPTPVAGLPHGLPPLADVSEFASWLDFTVPELEWFADRGGWLRTANPRLRHYRVSRREKRSGVRVIEAPKPRMRETQRRLLHRLIARIPAHRAARGFEPGSSPAAFGWPHSDRPTVLRVDLQHCFESIGAGRVRRVVEDVGYPPHIARLIAELCTTSTPADQLTGIDHAHASLLRRRHLPQGAPTSPHLANLALAQLDRRLEGYANANGLRYTRYGDDLAISGDEFDAGRALWTVLRIVDDCGLHLNAAKTRVMHRHQQQRLAGLVVNDRPQVSRREYDAVRALLHNAAITGANAQNRHGHNDFRAHVYGLIAWIGATGEVRRQRLLEMADRVDWNR

SEQ ID NO: 5540 - protein, 425 aa, Gordonia otitidis
  source 1..425: note = Related to NZ_CP085974.1
MTRPDPGFTTDQVRTVAAALADRIIDWTWPTVMRAVAAELPEEICVDVAQEAFAVAPHEPPHLAEVFRLALSRWTLPEPPIPRAVELPGPTPVTDLPYGLPPLHDVAQFAAWLDFTPAELEWFADRGTWLRTANPRLRHYRVFRREKRQGVRVIEAPKPRMRETQRRLLRRLVSRIPAHPAARGFEPGSSTAAFAWPHSDRPTVLRLDLEHCFESIGAGRVRRIFDDVGYPAHIARLLAELCTTSTPADQLGGIDLTHAALLRRRHLPQGAPTSPHLANLALARLDRRIDGYARANRLNYTRYGDDLALSGDDFDHGRALWIVRRIVSDCGFVVHPDKVRVMHRHQQQRLAGLVVNDRPQVSREDYDNLRALLHNAARSGARSQNLQGHNNFRDHVYGLIAWVGATGHERRRRLLDMADRVDWSR

SEQ ID NO: 5541 - protein, 442 aa, Gordonia soli
  source 1..442: note = Related to NZ_BANX01000005.1
MTEPSRSAPQPFLSVADAAVVGALFARHHTAWTWPETLRAVDSALIDALQAGVTALADVPDGLARAISLRILDGGPLRDPVAVFVHAAARWTLPADAAPRSIETPGPTPSVGLPDELPELHDVEQFAHWLDFTVPELEWFADREGRLRTARPTLRHYRVWRRDKRSGVRVIEAPKPRMRETQRRLLRRLVERIPAHQAARGFEPGSSTAAFAWPHTDRPTVLRVDLRHCFESVPAARVRRVFADVGYPASVARLLAELCTTTTPIDELTGIDSEHAMLLRGRHLPQGAPTSPHLANLAMRSLDRRITGFAELNGLRYTRYGDDLAISGDEMDAGRALWTVARIIRAEGFTVHPEKVRIMGRHQQQRLAGLVVNDRPRVSRVDYDNLRALLHNAIRDGATAQNREGHPEFRSHVYGLIAWVGATDPARRRRLLAMAADVDWDA

SEQ ID NO: 5542 - protein, 423 aa, Dietzia alimentaria
  source 1..423: note = Related to NZ_AGFF01000003.1
MTTPVLTADEVNDAAAWFSRTYTGWTWPELLRALESVLPAAIARDALPALLTLSPAEPRHPAESLRRALKKWTQPPARHPTVPMPEPPPRDTIADGLPQLYSVPEVAQWLDLTTGELEWFTDHGGWLRTAPTRLRHYRVWTREKRDGVRVIEAPKPRLREAQRRLLRLLVSRIPAHPAATGFIPGSSTADFARPHSGKATVLRADLRHCFESITAPRIAEVFRRAGYPPEIARLLADLSTTATPADQLAGVPAEHATYLRGRHLPQGAPTSPHLSNLVMRSLDRRLNGYARANGLAYTRYGDDLALSGDAMDADRALWVVLKVIASEGFTVHAGKVRIMRHHQRQNLAGLVVNDRPRVSRSDYDNLRALLHNAQRHGASSQNHSGHPEFRAHVLGLIAWIGANDPARRERLLHMANEVDWTRS

SEQ ID NO: 5543 - protein, 421 aa, Dietzia sp.
  source 1..421: note = Related to NZ_CP046569.1
MTTPVLTTDEVNDAAAWFSRTYTGWTWPELLRALESVLPAAIARDALPALLTLSPVEPRHPAEALRRALKKWTRPPAKPTIVPPSVPPPHDTIAEGLPELYSVSEVAQWLDLTTGELEWFADHGGWLRTAPSRLRHYRVWTREKRDGVRVIEAPKPRLCEAQRRLLRLLVSRIPAHPAATGFIPGSSTADFAQPHSGKATVLRVDLRHCFESITAPRIAEVFRRAGYPPAIARVLADLCTTATPADQLAGVPAEHATYLRGRHLPQGAPTSPHLSNLVMRSLDRRLDGYARANRLAYTRYGDDLALSGNAMDADRALWVVLKVIASEGFTVHAGKVRIMRQHQRQSLAGLVINDRPRVSRSDYDNLRALLHNRSVSNQMRREVLGWAWLVSGDRASGSLMVAFSGSRGGRGRRVNRSGCLA

SEQ ID NO: 5544 - protein, 422 aa, Dietzia sp.
  source 1..422: note = Related to NZ_CP046567.1
MTSPVLTVEEVGEAAARFSRTYTGWTWPELRRALDSVLPEAITRDALPILLAWYPDEPRHPAAALRQVLTEWTRPAGAPTTVPLPEPPPRTTIVDGLPQLYSEAEVARWLGFTAGELDWFADPGNWLRTAPPRLRHYRVWTREKRDGVRLIEAPKPRLREAQRRILRLLVSRIPAHPAATGFIPGSSTSAFARPHSGSATVLRVDLRHCFESITTPRIAEVFRRAGYPSSIARLLAHLCTTATPADQLADVPASHAAYLRGRHLPQGAPTSPHLSNLVMRSLDRRLQGFADANDLAYTRYGDDLALSGDAMDADRALWVVLRVIASEGFTVHAGKVRIMRRHQRQNLAGLVVNDRPRVSRAEYDTLRALLHNARLHGASSQNHSGHPDFRAHVLGLIAWIGATDPTRRERLTRMADRVDWAM

SEQ ID NO: 5545 - protein, 372 aa, Dietzia natronolimnaea
  source 1..372: note = Related to NZ_NTGA01000019.1
MTSPVLTVEEVGDVAAWFSRTYTGWTWPELRRALDSVLPEAIARDALPTLLAGFPDEPRHPAAALRQEWFADPGNWLRTATPRLRHYRVWTREKRDGVRVIEAPKPRLREAQRRLLRLLVSRIPAHPAAAGFIPGSSTSAFAQPHSGSATVLRVDLRHCFESITTPRIAEVFRRAGYPPTIARLLAHLCTTATPADQLTGVPAAHAAYLRGRHLPQGAPTSPHLSNLVMRCLDRRLQGFAVANGLAYTRYGDDIALSGDAMDADRTLWVVLKVIASEGFTVHAGKVRIMRRHQRQSLAGLVVNDRPRVSRVEFDNLRALLHNARQHGASSQNYSGHPDFRAHVFGLIAWIGATDPTRRERLTRMADQVDWTR

SEQ ID NO: 5546 - protein, 421 aa, unidentified
  source 1..421: note = Related to DWWP01000013.1; note = Candidatus Dietzia intestinipullorum
MTERRLTADEAGDAAAWFSRTYTGWTWPELRRALDSVLPSDIAREALPALFQWHRVEPRHPAAALRRVLARWTVPPAPRPLSVAEPVDPGTITEGLPALYAVADLARWLDLTVGELEWFADHGGWLRTAAPRLRHYRVWARAKRDGVRVIEAPKPRMREVQRQLLRLLVSRIPAHPAATGFLPGSSTVDFARPHAGKATVLRADLRHCFESITAPRVTDVFRREGYPPAIARLLAEVCTTATPVDHLTGVPAEHAAYLRGRHLPQGAPTSPHLSNLVMRSLDRRLHGYAAANGLTYTRYGDDLALSGDRMDAGRALWVVLKVIASEGFTVHAGKVRVMRAHQRQTLAGLVVNERPRVSRAEYDALRALLHNARRRGASSQNHAGHPDFRAHVLGLIAWVGASDPDRRERLLRTADEVDWAS

SEQ ID NO: 5547 - protein, 423 aa, Dietzia aurantiaca
  source 1..423: note = Related to NZ_JAIFXZ010000017.1
MTEPRPPARLSPAEVGDAAAWFSRTYTGWTWPELLRALDAVLPGDVAREVLPSLLMLPREPRHPAAALRRVLRPWTAPAPQLATMPVPARRDTVAEDLPALYSVREVADWLDLTVGELEWFADHGGWLRTASPSLRHYRVWTREKRDGVRVIEAPKPRLREMQRRILRQLVSHIPAHRAAKGFVPWSSTADFAWPHSAKAIVLRADLRHCFESITAPRIADVFRRAGYPPTVARLLADLCTTASPADKLRGVPSEHAAYLRGRHLPQGAPTSPHLSNLVMRSLDRRLYGYAAANGLTYTRYGDDLALSGHEMNADRALWVVLKVIASEEFTVHAGKVRVMRAHQRQTLAGLVVNDRPRVRRADYDNLRALLHNARRSGASSQNHAEHPDFRAHILGLIAWVGASDPVRRERLLRMADEVDWEA

SEQ ID NO: 5548 - protein, 426 aa, unidentified
  source 1..426: note = Related to DWWG01000159.1; note = Candidatus Dietzia intestinigallinarum
MSETHPPTQLSAAEAHDAAAWFSRSYTGWTWPELLRALESVLPPDIARDALPGLLASHRREPRHPAEALLRALRPWIIRTPKPPTTVTDVPPARDTIAEGLPTLYSVREVAEWLDLTIGELDWFADHGGWLRTAAPRLRHYRVWTREKRDGVRVIEAPKPRLREAQRQILRQLVARIPAHRAATGFIPGSSTADFVRPHSGKPTVLRTDLRHAFESITASRVADVFRRVGYPPAISRLLADLCTTATPPDRLRGVPSAHAARLRVRHLPQGAPTSPHLSNLVMRSLDRRIQGYARANDLTYTRYGDDLALSGEAMNADRALWVALKVIASEGFTVHAGKVRVMRRHQRQTLAGLVVNDRPRVSRADYDNLRALLHNARRHGAASQNHTNHPDFRAHVLGLIAWIGASDDVRRERLLRMADEVDWTR

SEQ ID NO: 5549 - protein, 433 aa, unidentified
  source 1..433: note = Related to DXGN01000154.1; note = Candidatus Dietzia merdigallinarum
MTDSDPAPRLSLAEAHEAAAWFSRTFTGWTWPELLRALESVLPAEIAREVLPALLMRHRDEPRHPAQALLRVLRPWIIASPPAQLSVTVPDPHDPTTPPERDTITEGLPTLYTAGEVSEWLDLTIGELEWFADHGNWLRTAAPRLRHYRVWSREKRDGVRVIEAPKPRLREVQRRILRQLVSKIPAHRAATGFLPGSSTADFARPHAGQPTVLRADLRHCFESITAPRVRDVFRHAGYPPPIARLLADLCTTATPADQLRGMPAEHAALLRGRHLPQGAPTSPHLSNLVMRSLDRRLHGFAAANDLHYTRYGDDLALSGHEMNADRALWVVLRVITDEGFTVHAGKVRIMREHQRQRLAGLVVNARPRVSRAEYDNLRALLHNARHHGAASQNHAGNEDFRAHVLGRIAWVGAGDEVRRERLLAMAAEVDWEN

SEQ ID NO: 5550 - protein, 352 aa, Gordonia sp.
  source 1..352: note = Related to JAKWBF010000007.1
MRRWQQPEHRGHPIDLPGPAPIDSLPYELPVLTGVDDVAAWLALTPAEVDWFADRGSWLTTARPALRHYRVSHREKRTGTRIIEAPKPMLRETQRRILRRLVQRIPAHPAARGFVPGGSTAAFAWAHSDRPVVLRADLRHCFESITVSRVRHVFAQAGYPAGVARVLAELCTTTTPPDQLIDVDPAHAGLLRRRHLPQGAPTSPHLANLALLRLDQRLDGYARRNQLRYTRYGDDLAVSGDAMDADRALWTLLRIVEDCGFVVHPEKVRIMPAHQRQRLAGLVVNDRPQVSREDYDRLRALLHNAARHGPESQNHSAHPDFRAHVYGLIAWVGATSETRRRRLLDMADHVHW

SEQ ID NO: 5551 - protein, 440 aa, Gordonia amarae
  source 1..440: note = Related to CP045804.1
MTPNELSGDELRAVATHAADAITDWTYPRIRGAVHAALAATTPRRFALPHVVADRVATDALALSPDRPDNVAAFIGEALQPWRRPDPPPPPPDTRLRLQPAEPQPPTGMRHGLPPIAGYEELAFWLNLTVGELDWLADRGRWLEHARYPLQHYRITRREKRGGHRIIEAPKPLLRETQRRLLRRVVEHIPAHPAARGFVRGSSTAAFAWPHADRAAVVRVDLRHCFESIGISAVRAVFTSAGYPPHIARVLADLCTTTTPADQLHGIDWEHRDLLRRSHLPQGAPTSPHLANLVLRRLDRRIDGYAKRNDLQYTRYGDDIAVSGDSIDAHKTLRVVLAIVEDCGFTAHPGKVRIMYAHQQQRLAGLVVNDRPQVSRADYDALRALLHNAVHHGPDSQNHHGHPDFRAHVHGLISWVGATNPTRRRRLLDLAAQIDWNTEQ

SEQ ID NO: 5552 - protein, 430 aa, Williamsia phyllosphaerae
  source 1..430: note = Related to NZ_BMCS01000002.1
MSDPLFSPDEAAEIAAHVEAHLTAWTWPEMQRALIAAGLSPEFADVVGLRLFDPSDDVVAGASDIESRILGALRDRTAPLPETDDRSAPAVWELTEPSSTGRVRDDLPDIYDVEQLAHWLNFTVPELEWFADRGRWLRNAREPLRHYRVFRVEKRDGFRVIEAPKPRMRETQRRLLRRLVERIPPHPAARGFVRGSSTAAFAWPHTDRPVVLRVDLRHCFESIDARRVRHVFSAAGCSPAIARILTELCTTATPPDAIHGLDPVHAGLLRERHLPQGAPTSPHLANLVLRGMDRRLAGFAAHNDLRYTRYGDDLALSGDRMDADRVLWTVLRVVADEGFTVHPAKTRIMHAHQQQRLAGLVVNDRPQVSRADHDALRALLHNAIRTGGAAQNHDGHPDFRAHVYGKIAWIGATSPARRDKLLDMASHVDW

SEQ ID NO: 5553 - protein, 437 aa, Williamsia muralis
  source 1..437: note = Related to NZ_RBKV01000001.1
MTTDSTHPGDSTDSAHPDDLGGLGPEIRIPARSLDLLINRLEVDPRWSVHALGDMLAATTAPATATALLGLLLEKFPERPEPEAVRRALWSMVIENRSHVFGELPTPEMTFALTPLADATDVARWLGLTVGELEWFADRGLWLRSKKTALAHYRYVTIPKRDGVRVIEAPKPHLREIQRRILREILDRIPPHRAAQGFVAGRSTASFAWPHSDRNVVLRVDLRNCFPTITSARVRAVFAAVGYRRTSRLLSEICTTATPPDVLRGLDFAHASLLRARHLPQGAPTSPALANLVMRTMDRRIWGYARHNNLHYSRYGDDLAISGDVMDAGQVLWTVLRIIADEGFTVHPDKTKIMYSHQRQQLAGLVVNDRPRVGRVDYDNLRALLHNAIRTGAHAQNRDDHPRFREHVYGKIAWIAATSPSRRNTLLAMAERVDWDR

SEQ ID NO: 5554 - protein, 425 aa, Williamsia soli
  source 1..425: note = Related to NZ_JAFRDR010000008.1
MNDSYSLGGLGPRMRLTADSVEHLLTRLEVDPRWTVSALVEMLVATVEQPVVTELLGMLLDRFPERPTDLGDVRTFLAPLIGEPRSREFDDPADPVMRFDLPRLPDYSDVARWLNLTVGELEWFADRGHWLRTKDGPLQHYRYWQVPKRDGVRMIEAPKPHLREIQRRVLRTILDHIPPHRAAQGFVPGTSTASFAWPHTDRPVVVRLDLRDCFSSIGTARVKAIFAAVGYERTARVLAELCTTTTPIAHLRDIDHRQAALLRQRHLPQGAPTSPALANLVMRAMDRRIWGYAQRNRLHYSRYGDDLAISGDHMNPEAVLWVVLRIVADEGFTVHPDKTKTMRAHQRQQLAGLVVNDQPRVARRDYDNLRALLHNAIRTGAQAQNRSAHPNFRAHVHGKIAWIGASSPRRRNTLLALAEQVDWDR

SEQ ID NO: 5555 - protein, 436 aa, Gordonia phthalatica
  source 1..436: note = Related to NZ_CP011853.1
MGDLFGGPQGVSHPRRYDSAQVRLAVHAIDRLRRPVTPDRSAEVWTSREINGALVTVLDPVVADDVTRLLVTAFAAPPHRDDLAAFLAAIPADRTVRVAEPVVSHPVFAVRPIDDVTALAHWLAMSVTELDWFAARGRWSRRAKPQLRHYRVQRLPKRDGGFRIIEAPKERLATAQRRILDEILSAVPPHPAAHGFVRGRSVQSYASTHALHDTVVRVDLRRCFEHVTYPRVRAVFAAIGYAPAVAAYLASLCTTTIAIDDEKLVDPIHAALLRERHLPQGAPTSPALLNLVLRRIDFRIAGYAAKHRIAYTRYGDDLAFSGDDLDAGKLVWFVTRVAAAEGFVVHPSKTRIMHDHQRQQLGGLVVNRGVRSSRADFDALKALLHNAIRHGAQSQNRDGHPDFRAHVYGRIGWVSTGSPARRKRLRDMAARVDWES

SEQ ID NO: 5556 - protein, 435 aa, Gordonia sp.
  source 1..435: note = Related to JAAYXO010000187.1
MSDDRTSPGIGARRRFDSVQVDRIVIAIDELLRSVEAPRVADVWTSREIDGALVDVLDPVDADDLTRALLAAFPAPPRSGPVAAFVADLPAAPRVVVPELRVSAPVFEVRQVEDIAALAGWLNMSLEELEWFTASGRRSRRLKPALRHYRVSRIPKRDGGYRIIEAPKERLATAQRKILDQILTGLPPHPAAHGFVRGRSITSFAAKHALHDTVVRVDLRRCFEHVTYPRVRAVFAAIGYAPAVAAYLGSLCTTTIAVDDEALVDPHHAALLRERHLPQGSPTSPALLNLVLRRLDFRVAGYADKHHITYTRYGDDLAFSGDQIEIGRLLWFVERVAAAEGFVVHRRKTRIMHDHQRQQLAGLVVNRGVRAGRAEFDALKALLHNAIRDGAHSQNRERHPDFRAHVYGRIDWLSTGSPQRRERLRTMAAQVAWDR

SEQ ID NO: 5557 - protein, 863 aa, Gordonia neofelifaecis
  source 1..863: note = Related to NZ_AEUD01000002.1
MEQWITTSEAAARLGVKRGTLYSYVSRGVLTSRRMPGQNESLFDRTQIDSLAAAKHDGRRSGDRLLRFRAVASGVSAIRDDRLYLRGRDIEELCADMDFADVAQLVLDSSEARPVPDVDTTVVHGVSIERRIPLTVALVAAADPLRADLSDVGARVLGLLPHLAAAVPEIDFAHRWVDLLATVLIDNGLAASTTAARVAASARAGIFDALLAGYAALAGPLHGGAPATARALLDAVVGGAAVDRALADAVVGGLVPGFGHVIYSGPDPRAQIVLDRVRAERPRSSALAAAEAVEQRVGRPMNIDFAGAVVTHELGLPARSGEVLFVGSRRAFREPPPAASSLCGGGVRRGPAALARQSDGLSCSAAAVRTLSSRRSPRTTTRHLIGGASGAFTVGPRSRAQAAHSVCWVRADDDKSGRTVLPAAEREDVIEPGMRSPFRFDQHRVHRAVGAVVGLLGAAAGDDAGDDAGSLRTAPELDGALVAVIDPVDADDLAQALIREFASPPSSERLTAFIAAIPAAPRVRWPEPRTSAPRFDVRQVADVEALAHWLNLDLGELEWFAARGRWSRRTAEPLRHYRVKRIVKRDGGFRIIEAPKERLATVQRKVLDEILVHVPPHPSAHGFMRGRSVESFGSRHALHDVVVRVDLRRCFEHVTYPRVKAVFSAIGYAPAVASYLACLCTTSRAIEDRHRVDFDHAVLLRERHLPQGAPTSPALLNLVLRRLDYRVAGYAARHGVTYTRYGDDLAFSGDDVDVGGLLWFIERVVKAEGFAVHRDKVRVMRDHQRQQLGGLVVNRGPRSCRSDYDALKALLHNAIRDGAESQNRDDRPDFRSYVYGRIGWVSTGSARRGEKLRTMAAQVDWHR

SEQ ID NO: 5558 - protein, 432 aa, Gordonia malaquae
  source 1..432: note = Related to BAOP01000031.1
MGAGLSRPRRFTARETAMMAGAVAQRLMRVRGSDLGPEWTRPELTDLLMRVVSPADAEEVARAILEAFPAPPADPREAIRELIDAMCDGPFRFVADPDVSTPVFDVKRIADVEALAAWQNMSLPELDWFAARGRRSKRLPERLRHYRVWRIPKAHGGFRIIEAPKERLATAQRRILDDVLAAVPPHPAAHGFVRGRSAVSFAGPHSLHDTVVRIDLKHCFEHANYRRVKAVFTAIGYTPGVCEYLAALCTTTCAIDDAAQLDPFHAALLRERHLPQGAPTSPALLNLILRRMDIRIAGFAEKNRLTYTRYGDDLALSGDDIDPKLVTWVVSSIVHDEGFRVHPDKLRVMGDHQRQQLAGLVVNAGPRARRTDFDALKALLHNAVRDGGESQNREGRGDFRGYVYGRIGWVSTGSPTRRRKLMALAAQVDWSV

SEQ ID NO: 5559 - protein, 433 aa, Gordonia humi
  source 1..433: note = Related to NZ_JACIFP010000001.1
MTGQGLEPPQRFTGHDANAMGFAVSRRMMRLRPAERADAWTWLTLQEMFADTVWPDDADEIAQAVLAVYPEPPSRIQEALTAVIVAMPGRREPFAADPGSSSPVFDVRQIADVEELAAWQNLSMPELDWFAARGRGSRRAPTRLRHYRVWQIPKRHGGLRIIEAPKERLATIQRRILDDVLAHVPPHPAAHGFVRGRSVTSFAGPHALHDVVLRIDLRHCFEHVTYPRVKAVFTAIGYQPGVAAYLTALCTTTIAVDDQRLTDSLHAALLRERHLPQGAPTSPALLNLVLRRTDIRIAGFAAANRLTYTRYGDDLALSGDDVDVGRVLWAVSSIIRDEGFTVHPDKVRVMGEHQRQQLTGLVVNAGPRAARADYDALKALLHNAIRDGGQSQNRAGRDDFRAYVYGRIGWVSTGSQARRRKLTEMAARVDWER

SEQ ID NO: 5560 - protein, 433 aa, Gordonia asplenii
  source 1..433: note = Related to NZ_JABBNB010000006.1
MVGKQTAAQPDRFSRNDIHRMSAVIRRLLGPPLDDGYAERVWTRRELNGALVTAVDPVDAEEVARELLMRYPTPPPLPGIADAVRRVVAVLTAPVIREPVGPPRFGLPEIGDVGALASWLNVSVDELDWFADHGLWLQRATPRLRHYRVTRIPKRHSGFRVIEAPKERLATLQRRILDAILADVPAHPAAHGFVRGRSPYSFAAPHSLHDTVIRVDLKHCFEHITAAQVRAVFTAVGYRSATARCLAEICTTATAFDDLPGDDPFHAGLLRGRHVPQGAPTSPALVNLALRRLDFRIAGYAAKNGLAYTRYGDDLALSGDEMNVGQLLWVVRNVIVDEGFTLHPEKVRVMGDHQRQQLAGLVVNVGPRSRRSDFDELKALLHNATCTGARAQNRGAHADFRAHVYGRIGWVATGSAARRRKLLALAAEVDWDG

SEQ ID NO: 5561 - protein, 423 aa, Williamsia sp.
  source 1..423: note = Related to JAHCSG010000002.1
MTAGLRSEQRFSADRAASLANWILEDRDLLWDSWAVSARLSWQLPPEIADEVADAILVALPEQPSAPEVLAEFLAAIPSEPVIIIPSEPNPPVVAAGLPVITDVGELAASLNLDIGELEWFADRGTWLRTARVPLRHYRITRIPKRDGVRIIEAPKPRLAEIQRKILRRILDHRDPHPAACGFRRGKSVAHFAWPHTDRPVVLRLDLRHCFTTIGTARVRRVFADCGYSPAVSRVLAELSTTTTSSDALGDLDPWLAAMLRARHLPQGAPTSPALANLVMIRLDRRLAGYARRHALRYTRYGDDLAFSGDAMDADRVLWAVLRIVAAERFVVHPDKTRIMGRHQRQQLAGLVVNDHPQVPRAEFDALKALLHNAITTGASTQNHAGHPDFRAHIYGRIAWVGATNASRRERLLALADQVDWSA

SEQ ID NO: 5562 - protein, 417 aa, Williamsia herbipolensis
  source 1..417: note = Related to NZ_JXYP01000014.1
MRRYPRSTAEMLAAIVDAADPEWTREGLADALSAHRRGLDDAQADAVAGHLLVAFPRQPPDRRDAIAGRIVELAMPPMRERPALRELWDGLPRYTDYYALAAAYDMTVPELDWLADRGTWLRSRTGPLQHYRVTPIPKRRGARVLEIPKPRLRETQRRILRRVLDRLPPHPAAQGFVAGTSPATFSSPHAGRPVVIRIDLRRCFETITVARVRAVFAAVGYPPAVARALADLCTTTTPAERLVGVDPVHAAILRSRHLPQGAPTSPALANLVMRTLDRRITGYAHRHGLVYTRYGDDMALSGTIDDPSAVVWVVRQIVADEGFTVHGDKTRIMYAHQQQRLTGLVINDRPRVCRSEYDDLRALLHNAIRTGARAQNRDDVGDFEAHVRGRIAWVGATSPARRQKLLEMASRVDWSSD

SEQ ID NO: 5563 - protein, 427 aa, Nakamurella lactea
  source 1..427: note = Related to NZ_AUFT01000012.1
MTGDYLYSPDWARLLADLVVAARARWRRSDLAAAMAEVLDDAEADGTAHRILQAFPREPVDVRATLAGYLVELRSVSEPLSEPQTGALLAASARTPVLWAGLPVLNTPAELASFLDLTIGELDWFADHGNWLRSHRGPLQHYRQRRIAKRSGLRLLEIPKPRLREIQRKLLRTLVSVIEPHPAAHGFRPGRDARSFAAPHAGGPIVLRVDLRDFFASVPGARIRAVFVAVGYPPPIAALLADLCTTATPIAALCGLDPAIAGLLRGRHLPQGASTSPALSNLVLRNTDRRIAGYVARHGLRYTRYADDLAVSGSGFDPAAVRWVIEKIVTDEGFRLHPDKTSVMRSHQRQRLASLVINTRPQVNRSEYDALRALLHNAASTGAAAQNRGGHEHFREHVFGRIGWAGASNPDRRRVLLGLAERVDWSR

SEQ ID NO: 5564 - protein, 421 aa, Nakamurella aerolata
  source 1..421: note = Related to JABEND010000002.1
MADWAFDSGTAARLARVVVESRTSWRAADVAEALTQLLPPEQAEELAARMLAAMPSPPVDVGPAVTGYLAGLRRQDAPATIAFEVRTAELWAGLTPLADPAALARLLDITVGELEFFADRRGWLRTKPTALQHYRYRTLPKQSGLRVLEIPKPRLRELQRRVLRHCVAPIPPHPAAHGFVPGRSVHTFAEPHTGSRVVIRVDLRDFFLTVARPQIEATFHTVGYPPAVGEVLAALCTTATAPAAFAGIDSATAARLRRPHLPQGAPTSPALSNLAMFEVDRRLAAFAGRHGLSYTRYADDLAFSTGLGEPAIAVSAVLAVTRKVVAAAGHRLHPRKVLVRRAQQRQQLTGLVVNRTPQPPRAEFDTLRAILYNCARFGPESQNRDDLADFRGHLLGRMQWVASGSATRRRALAELFDRIAW

SEQ ID NO: 5565 - protein, 425 aa, Tsukamurella tyrosinosolvens
  source 1..425: note = Related to NZ_CP070357.1
MTVVEVARRVPRSWRHAVADRVVLLTEEMWTAETIASLVRGTVPDELVGPVVEALLSGHPQPPVQVVDGHVRRPRTAPLVAALDAVRIVETLDSGGPVDVPGLALPDVASIARMLDLTVPELEWFADHGRWLRHARPPLRHYRVARMVKPAGGFRVIEAPKPRLAEAQRRILLRVLDPAGAHPAARGFRPGGSVLAYASPHVGSLSVVRLDLRDCFSTVAVPRVRSVFRRLGYPAPVATVLADLCTVATPADELRGLDPWRAATLRSRHLPQGAPSSPALVNLALHRLDARLTGLAHAQGARYTRYGDDLAFSGARDPALIAGVAPKIVAAEGLSVNPRKTRIMRAGARQELAGVVVNARAQVPRAEYDDLRALLHNAARSGGESQNRDGHPDFRAFVYGRIAWVAQGNEQRRLRLLAMAARVRW

SEQ ID NO: 5566 - protein, 425 aa, Tsukamurella conjunctivitidis
  source 1..425: note = Related to NZ_VIGX01000010.1
MTAVEIVRGLPRAQRYAVAGRVVSLTEDLWAADVIAPLIRGAVPDELVDAAVQALLAGHPEPPVRFVDGDVLQSGPGPLVAALDGVRIVVALEPAGPGDVPGLALPDVAAVTRLLDLTVPELEWFADHGMWLRHARPPLRHYRVSRMDKPAGGIRMIEAPKPRLAEAQRRILRRVLDPAGAHPAARGFRPGGSVLAYAAPHVGARSVVRLDLRDCFSTVTVPRVRNVFRRLGYSAPVAGVLADLCTVSTPADELHGLDPWQAATMRSRHLPQGAPTSPALVNLALHRLDARLTGLARAQGARYTRYGDDLAFSGALDPALIAAVVPKIVAAEGLSVNPRKTRIMRAGARQELAGLVVNARAQIPRSEYDALRALLHNAARSGGEIQNRDGHDDFRAHVYGRIAWVAQGNDARRERLLAMAARVRW

SEQ ID NO: 5567 - protein, 425 aa, Tsukamurella pulmonis
  source 1..425: note = Related to NZ_UHII01000001.1
MSAVEISRRLPRAWRYAIADRVEMFTEEMWTADRVAVAIRGIVPGELVPTVARELLAAHPAPPLAIIDGTPVAPDRDAIVVALDTVRTVERLGARAPLEVPGVALPDVAAVARMLDVTAPELEWFVDHGQWLRHATGPLRHYRVRRMAKPSGGVRVIEAPKPRLAEAQRRILHRVLDPAGAHPAACGFRPGGSVLAYAAPHVGARSVVRLDLRDCFSTVTVDRVRGAFRRLGYPVPVAGLLADLCTTSTAVDELRGLDPWQAAVLRSRHLPQGAPTSPALVNLVLRGLDARLTGLARAQGARYSRYGDDLAFSNARDAALIAGVVPKIVAAEKLSVNPRKTRIMRSGDRQELAGVVVNARAQVPRAEYDALRALLHNAARFGPESQNRDGHEDFRAHVYGRIAWVAQGNDARRERLRAMAERVRW

SEQ ID NO: 5568 - protein, 425 aa, Tsukamurella sp.
  source 1..425: note = Related to JAIULG010000072.1
MTGVELSRRLPRAWRYAIADRVEFFTAAQWTEEFVAAAVADLVPVDHAVPVARTLLAEHPAPPLSIVDDLPVAADRNALLSALEAHRTVQLLESKGSGTPPGIALPDVGSIARMLDLTIPELEWFADHGQWLRHAGRPLRHYRVRRIAKPAGGVRVIEAPKPRLAEAQRRILRRVLDDAGAHPAARGFRPGGSVLAYAAPHVGTRSVVRLDLRDCFPTVTAPRVRAAFRRLGHPAPVAAVLADLCTVATPGDELRGLDPWQAAALRGRHLPQGAPTSPALVNLVLRRLDARLTGLARSQGARYTRYGDDLAFSGALDSSLIAGVVPKIVASEGLSVNPRKTRIMRAGARQELAGVVVNARAQTPRGEYDDLRALLHNAARFGAASQNRDGHPDFRAHVYGRIAWVAQGNEHRRERLLSMAARVHW

SEQ ID NO: 5569 - protein, 426 aa, Tsukamurella sp.
  source 1..426: note = Related to AP025688.1
MTSVEVTRRLQRAQRYTIAARVEWFTPTQWTVDRVAGAISGVVPADEASAVAAALIAAHPRAPLDPQDDGPPVLANPAALVAALDGYRTVELLEPDGPLDVPGLALPDLSAVARMLDLTAPELEWCADPGGWLRHSSKPLRHYRVRRIPKPAGGVRVIEAPKPRLAEAQHRVLRRVLDPAGAHPAARGFRPGGSVLAYASPHVGASSVVRLDLRDCFSTVTVSRVRDVFRRMGYPAPVARVLADLCTVATPGDELRGLDPWQAAVLRSRHLPQGAPSSPALVNLVLRRLDSRLTGLAQSQGARYTRYGDDLAFSKPRDPSLIAGVVPKIVAAEGFSVNSTKTRVMRAGSRQELAGVVVNARAQVPRAEYDALRALLHNAARFGAESQNRDGHSDFRAHVYGRIAWVGQGNESRRERLLTMAARVRW

SEQ ID NO: 5570 - protein, 425 aa, Tsukamurella pseudospumae
  source 1..425: note = Related to NZ_LSRF01000001.1
MTAVEVSRRLPRGTLYAIAARLEWFTASQWTGEFVAAAIGDLVSTDLAGPVARFLIAAHPDAPLRIVDDRPVRADLGALRAALDGFRTVDLLDAPGVLDVPGRALPDSAAVARMLDLTAPELEWFADHGQWLRHSAAPLRHYRVRRMDKPAGGVRVIEAPKPRLAEAQRRILRHVLDPAGAHPAARGFRPGGSVLAYATPHVGARSVVRLDLRDCFSTVTAPRVRAVFRRLGYPAPVARVLADVCTTATPGDELRDLDPWQAAVLRARHLPQGAPTSPALMNLVLHRLDARLTGLARAHGAMYTRYGDDLAFSGAPDPMLIAGIVPKIVVAEGFSVNPAKTRVMRAGTRQELAGVVVNTRAQVSRDEYDDLRALLHNAARFGAESQNREGRADFRAYVYGRIAWVGQGSERRRERLLAMAAAVRW

SEQ ID NO: 5571 - protein, 415 aa, Tsukamurella paurometabola
  source 1..415: note = Related to CP001966.1
MPAVEIARALARAQLRQAIRIAVQLHPEEWNRVELAADLGAVLPAELAEEVARFVIASAPTKPRGAILANLLQDFRVESLLEPEPARETPDRPLVDLAAVAAMLDVTVPELEWFADTGSWLRHSSRPLRHYRVRRMSKPAGGVRVIEAPKPRLCEAQRRILRHVLDAAAPHPAARGFLPGGSVLRYAEPHVGAGSVIRLDLKDCFTTVGASRVRAVFHRLGYPNAVARVLAALCTTETPADELHGLDAWQAATLRFRHLPQGAPTSPTLMNLSLRQLDSRLTGLARAQGARYTRYGDDLAFSGAPDASLIAGVVPKIVAAEGFAVNPRKTRIMRRGSRQELAGLVVNDRAQVPRHEYDALRALLHNAARFGPASQNRDGHDDFRGHVYGRIAWVGQGNRERRERLLALAERVPWE

SEQ ID NO: 5572 - protein, 414 aa, Tsukamurella sp.
  source 1..414: note = Related to BPMV01000001.1
MPSVDLSRPLTRAQQAQSALLVGRIDPAEWNRIELAADLGAALPAELAEEVALFVTEAAPTKPHPAVIRRLLQTYRVDSALEPEAGGAVPGRVLADLDGLAAMLDLTVPELDWFADTGRWLRHSAAPLRHYRVRRMPKTAGGVRVIEAPKPRLREAQRRILRHVLDPAAPHPAARGFVRGGSVLHYAEAHVGSAAVVRLDLKDCFTTVGENRVRAVFRQLGYPAPVARILAALCTTATAGDELRGLGAWQAATLRARHLPQGAPTSPALMNLALRRLDSRVAGLARAQGAHYTRYGDDLALSGARDPSVIAAVVPKIVRSEGFSVNPRKTRIMRSGTRQELAGVVVNARAQPPRRAYDDLRALLHNAARFGPDSQNHDGHDDFRAHVYGRIAWVAQGNPTRRERLLAMAARVPW

SEQ ID NO: 5573 - protein, 414 aa, Rhodococcus koreensis
  source 1..414: note = Related to NZ_CP070609.1
MTERPALPPEFARRLAAAAIDGTWTRAGLVLRFEESGVPDAARIAARLHDLMPTPPIDGIDSVFRLLSDLPLIERAEPIVDEVSGNDWRFDVPQWSRTAAVAEAVGLTSAELDWFADPGGWLRTKAPPLQHYRYRIRPDNRLLEAPKERLREVQRRILRTVLDRVPPHAAAHGFVRGRSVHTFAGPHAGHEVVLRIDLRAFFPSVSRTRVRAVFDALGYPTRVSRVLAGLCTTSTPPGVLAELPFDAASRLRGAHLPQGAPTSPALANLVAHRLDRRLAGLARAHRVAYTRYADDLAFSGSDLAVDRLIHAVGRIVTDEGFAVHPGKTRVMRAHRCQHLAGLVVNTRPQASRAEYDDVKALLFNCVRHGPDSQNRDGRPHFREYVYGRIAWVGESNESRKRSLHALAARVDWTG

SEQ ID NO: 5574 - protein, 405 aa, Rhodococcus sp.
  source 1..405: note = Related to RRBB01000228.1
MASTNATQARDSGETPARAGLILRFEETGAPDAGRLATRLYDLMPTPPIDGVDSVYRLLSELPQIEQPEPVVEVSGNGWKFDVPRWSRTSSVAEAVGLTPAELDWFADPGGWLRMKAPPLQHYRYRIRSDNRLLEAPKERLREVQRRILRSVLDGVPPHAAAHGFVRGRSVHTFAAPHAGHDCVLRIDLRAFFPSISQTRVRAIFDALGYPAPVARVLAGLCTTSTPPGVLAQIPFDAASRLRGAHLPQGAPTSPALANLVAHRLDRRLTGLARAHHSGYTRYADDLAFSGSDLAVDRLIQAVGRIVADEGFSVHPGKTRVMREHRRQHLAGLVVNTRPQTARADFDDLKALLFNCVRYGPESQNRDGRPHFREYVYGRIAWVAESNESRKRSLHALADRVNWAG

SEQ ID NO: 5575 - protein, 416 aa, Rhodococcus opacus
  source 1..416: note = Related to CP003949.1
MTAGRALQPEIARRLAVEATVGAWTRAGLILRFEEAGEPDAGRIATRLYDLMPTPPIDGVDGVYRLLSELPQIEQPETVVESSGSDWKFDVPRWSHTAAVAEAVGLTPAELDWFADPGGWLRTKATPLQHYRYRIRSDNRLLEAPKERLREVQRRILRSVLDRVPPHAAAHGFVRGRSVHTFAAPHTGHDVVLRIDLRAFFPSVSQTRVRAVFDALGYPTRVSRVLAGLCTTSSPSGVLAQLPFDAASRLRGAHLPQGAPTSPALANLVAYRLDRRLTGLARTHRAGYTRYADDLAFSGTELAVDRLIHAVGRIVAHEGFSVHTGKTRIMRAHRRQHLAGLVVNTRPQAARTEYDDLRALLFNCARYGPDSQNRDGRPHFREYVYGRIAWVGECNASRKQSLHALAARVDWADQRR

SEQ ID NO: 5576 - protein, 413 aa, Rhodococcus sp.
  source 1..413: note = Related to NZ_CP058638.1
MTGRRALSSAVARRLAAVATSGSWTRAAIAQRFEEIGTPDADRIATRLFDLLPTPPVEGVDSVYRLLSELPHIDEPAPVVEQPDHEWRFDVPKWTHTVAVAQAVGLTPAELDWFADPGEWLRNKAPTLQHYRYRIRSDHRLLEAPKERLREVQRRILRGLLDRVPPHAAAHGFVRGRSVHTFAAPHAGRDVVVRIDLRAFFPSISQARVRAVFDSLGYPPRVSRVMTGLCTTSTPPDVLARLPFDTASRLRGSHLPQGAPTSPALANLVAYRLDRRLTGLARSSRAEYTRYADDLAFSGVDLAADRLISAVGRIAADEGFSVHPRKTRIMRAHRRQHLAGLVINSHAQAARTEYDQLRALLFNSLRTGPDLQNRDGRPYFREHVYGRIAWIGESNPNRKRALLALADRIEWTG

SEQ ID NO: 5577 - protein, 409 aa, Rhodococcus cavernicola
  source 1..409: note = Related to NZ_VLNY01000005.1
MTDQRALPPVMARHLAEVADAGPWTKYALTQRFEEAGARDAVSIAHRLFDLMPSPPIEGAESVYRLLVELPRIDRPAPIAPRVLWKFGVPQWSQTAAVAEAVGLTPTELDWFADRGGWLRTKAPPLQHYRYRTRGDRLLEAPKERLREVQRKILRAVLDSVPTHPAAHGFVVGRSVHTFAAPHAGREAVVRIDLRAFFSTITQARVRAVFGALGYPDHVARVLAGLCTTATPAKVLAPLPFESATRLRTPHLPQGAPTSPALANLVCHRLDRRLTGLARSHRAAYSRYADDLAFSGSELAVDRLVHAVGLIVADEGFTVHPRKTRIMRAHRQQHLAGLVVNDRPQAARSDYDDLRALLFNCVRYGSHSQNRDDLPHFREHVYGRIGWIGESNETRKRTLLSLADRVDWA

SEQ ID NO: 5578 - protein, 412 aa, Hoyosella altamirensis
  source 1..412: note = Related to JACHWS010000003.1
MPSRPPRAFTRLEADLLAAAAVAGPWTRSGLEERLGEAGAADPVLLARRVLDLMPGEPIEGESTVRNVLAELPELPARPVEVTVESSLWKFDVPRWQTPHALCQAFDLTMPELEWFADVQGRLRGKPGRLHHYRYHNGARLIEAPKVRLREVQRRILRKVLDRLPVHAAAHGFRRGRSVHTFGSGHAGADLVVRIDLRWFFSTITAARVRAVFLAVGYPPSVASLLAGLCTTATPVPILRGMPFEQATLLRTRHLPQGAPTSPALANMVARNLDRRLAGLAQSQGLYYTRYADDLAFSGDVVNVEQLLWTVGAIVRDEGFFVHPSKTKVMRAHHRQRLAGLVVNAHPQASRDDYEALKALLYNCVRYGPASQNRDGRTHFREHVSGHIAWVGESNSRRREKLRRLEQRIVWS

SEQ ID NO: 5579 - protein, 317 aa, Rhodococcus rhodnii
  source 1..317: note = Related to NZ_QRCM01000001.1
MSRALDAGWAARLAAAAMSGPWTKNALAQRFSEIGFDRAEEIARRLHDLAPTPPVDGVDAVDRLLAELPRLEGPIPVRAQRPQWLFGVPRWNTLPALASSLNLTPGELDWFADPRGWLRTKPDRLQHYRVKTLPSGRVVEIPKERLREVQRKVRVSVLDAVPPHPAAHGFRAGRGVVGFAAAHSNSEVVIRVDLRAFFTTITATRVRAVFAALGYPPWVAGRLAGLCTTSTPPAALAGVPFEIASLMRAPHLPQGAPTSPALSNLVAGNLDRRLSGVARRHALTYTRYADDLAFSGSDVDVSRLLAMVPPCVRTRAS

SEQ ID NO: 5580 - protein, 435 aa, Nocardia mangyaensis
  source 1..435: note = Related to NZ_CP018082.1
MQRSTVDEGFWSLHHRRIFMSRMISVELAAELARAFELLDDEWAQARLAEAFGAVIEPGLAEEIARRVVDLMPVVPVDPVATLCRLLAELPKLPTIVVPLDPPEVRMRFGAVEIPDLATLAMLLNVTPSELEWFADRGGWLRRSTQPLSHYRYRRLPKANGTRLVEAPKVRLREIQRRILHKVLTGIPADPACHGFEKGRSAATFGAPHAGAPVVVRMDLRDFFPTIGLARVRTVFTACGYSPAVARVLAELCTTASPVAELRGLDHAQRTLLAVPHLPQGAPTSPRLANLVARGLDRRLTGYANRHGLTYTRYADDLALSGNANTAHLVWTVTRIAEDEGFTVHPAKTRIRRAHQRQILAGLVVNAHPTAPRDRYDAVRALLHNCLRTGATAQNLHGHNDFRAHVYGLISWIGETSPHRRDKLLTMADRVDWTR

SEQ ID NO: 5581 - protein, 418 aa, Nocardia salmonicida
  source 1..418: note = Related to NZ_BDBG01000003.1
MSRAIGLELAVRLARSFELLDDDWGLSPLAEAFAEVIEPGSAQEIAGRVIDLIPIEPVDPVNTLRRVLVDLPKLPTTVVALDPVVVPMRFGAVEIPDLAALALLLNVTPAELDWFADRGGWLRRASQPLSHYRYRRLPKATGVRLVEAPKVRLREIQRRILHRVLAGIPADPACHGFEKGCNAATFATPHAGAAVVIRQDLRDFFPTVAVARVRAVFAACGYSTVVARVLAELCTTTSPVAELRGLDYSQRTLLGARHLPQGAPTSPRLANLVARGLDRRLTGYANRHGLTYTRYADDLALSGDADLDTARLIWTVTRIARDEGFTVHTGKTLIRRAHQRQVLAGLVVNDRPAAPRDRYDAVRALLHNCLRTGVSAQNRDEHNDFRAHVYGLISWIGETSPHRRDKLLAMAERVDWTG

SEQ ID NO: 5582 - protein, 430 aa, Nocardia sp.
  source 1..430: note = Related to NZ_JACVEE010000002.1
MSGAVPPDLARELAYSFEFLGAEWSRSNLAEAFAEIVEPGRAEELARRVTDLMPSEPLDPVGTLQRLLAELPKLATIVVSLPPAADELADELPRTQPARTRFGAVDIPDLAALCALLNVTPAELEWFADHGNWLRRAAQPLSHYRYRQLPKTSGVRLVEAPKVRLREIQRRILHRVLSEIPAHPACHGFEKGRSATTFAAPHAGAEVVVRVDLRDFFTSIGVARVRAVFAACGYSPTVAQVLADLCTTATPVAELRTLDFNQRNLLRARHLPQGAPTSPRLANLIAHGLDRRLAGYATQHGLVYTRYADDLAISGKSDLDPGRTIWLATKIAKSEGFSIRPGKTRIRRPHQRQILAGLVINTHPAVPRDRYDALRALLHNCLRTGPATQNRDGHNDFRAHVYGLISWVGETSPARRDRLLAMADQVDWSK

SEQ ID NO: 5583 - protein, 418 aa, Nocardia goodfellowii
  source 1..418: note = Related to NZ_JAGGMR010000001.1
MTGAVPAELARELAYAFEFLDAEWTRSNLAEAFAEIVEPERAEDLARRVTDLMPSEPLDPVGTLCRLLAELPKMATVVVPLEPLSAPVLFGAAELPDRAGLCALLNVTPDELDWFADHGGWLRRASKPLTHYRYRRLRKSDGVRLVEAPKVRLREIQRRILRHVLSGIPAHPACHGFEKGRSASTFAEPHAGAEVVVHLDLRDFFTSITVARVRAIFAACGYAPAIAQILADLCTTATPVAELRGLDYDQRNLLRARHLPQGAPTSPRLANLIAHGLDRRLTGYAIRRGLEYTRYADDLAISGKSDLDAAEILWLVTKIAKSEGFAIHPGKTRIRRPHQRQILAGLVVNSHPAVPRDRYDALRALLHNCLRTGPTAQNRDGHHDFRAHVYGLIAWIGETSPSRRDRLRAMADRVDWSK

SEQ ID NO: 5584 - protein, 416 aa, Nocardia thailandica
  source 1..416: note = Related to NZ_BAGK01000206.1
MSHAVSGGLAAELAAHYADAEIGWERAALAEVFAEVIEPGRAEELAGRVVGLMPSEPLDGAATLRRLLAELPVLTVSTVALEPARRRMRFGATPIDDLAALAALLNLTQPELEWFADRGGWLRRSARPLTHYRYRRLPKSTGVRLVEAPKVRLREIQRRILRHALAGVPAHPACHGFEKGRNTATFGAPHAGAAVVVRIDLRDFFSSIEAARVRAVFAACGYAPAVARVLGELCTTAAPVAELRGLDHTQRTLLGARHLPQGAPTSPRLANLVARALDRRLDGYARAHGLAYTRYADDLAFSGPADADALAWAVTAIARDEGFAVHPGKIRVRRAHQRQVLAGLVVNAGPAVPRDRYDAVRALLHNCLRNGAAAQNRDGRPDFRAHVYGLIAWIGETNPHRRAKLLAMAARVDWDA

SEQ ID NO: 5585 - protein, 440 aa, Nocardia altamirensis
  source 1..440: note = Related to NZ_BDAY01000016.1
MNRPALPALVAARLADEFGRCGGRWHRDDLAEAFAAVLDRERAEVFAVRVIGLMPTEPIDSVVTLRALLTELPALPIVIAQLEPVPDELRFGAPELPDTSAVARMLNLTPDELDWFADHGGWLRRTREPLAHYRYRRIPKKDGVRLVEAPKPRLREMQRTIARRILAGIPAHPACHGFEKGASAATFAAPHARAAVVVRLDLRHFFPSIGVARVRGVFRACGYRENVATVLADLCTTATAIRALTGLDHEQASLLRTPHLAQGAPTSPRLANLIARNLDRRVSGYARRHGLTYTRYADDLALSDPADTDVDAMIWALTRIIEDEGFEVHRDKTSVRRPHQRQVLAGLVVNDRPAVARAQYDAVRALLHNCLRTGAAAQNHNAHPNFRAHVYGSIAWIGATSPTRRQKLLDMAKRVDWTQSDAAGSGLAADAVEDFHEGGG

SEQ ID NO: 5586 - protein, 419 aa, Antrihabitans stalagmiti
  source 1..419: note = Related to NZ_JAEMNV010000003.1
MTRRAVPPQLADLLADEFDAADRTWQRSDLAEVFGSFVNAVRAEELAQRVIALVPTEPVDRRNSLRSILAELPVLQRVVNLVEPAQHELRFGVPELTDLRSVASMLNVTPAELDWFADRGGWLRNSTEPLTHYRYLRRPKASGVRLIEAPKPRLREMQRTIARKVLASVPAHPACHGFEKECSAASFADPHTGSDVVVRVDLRNFFSSIGVGRVRAVYRAIGYDYAIANVLAHICTTATAVSALRGIDNQHASLLRMPHLAQGAPTSPRLANLIARNLDRRVAGYATKHDLTYTRYADDLAFSGPATTDVDALLWAVSHMVDDEGFTVNRRKTSVRRRHQRQLLAGLVVNSQPRAPREAYDALRALLHNCARTGAHEQNTDGHTDFRAHIYGRIAWIGETDPRRRQRLLDMAARVDWNR

SEQ ID NO: 5587 - protein, 451 aa, Smaragdicoccus niigatensis
  source 1..451: note = Related to NZ_BCRU01000034.1
MRRISWQQRPKPLGTLRVRPGDKDKSRSSATVARPLMQGRFSLPHAQAIARAFGRRELSWRRENLAEVFAGFVEAGLAESLASQVIDNVPLEPIEPYPTLVAQLRSLRWEIDLNPPLAKPLRFGVPELPDVSALAQFLNLTPSELDWFADCGGWLRTASGPLSHYRYRQLPRRSGRRLVEAPKPRLREIQRTINRRILACLPVHSACHGFESGRNPATFSAPHSSAGLLIRMDLKNYFSSIGEPRVRAIFEAMGYSEVVSRSLAGLSTNASSIAALRGLDHEQRTFLRVPHLPQGAPTSPKLGNLAARGLDRRLSGFALRVGMTYTRYADDLAFSGADGINAGSIVSAVERIIAAEGLFVNRQKTLIRRSHQRQILAGLVVNDHPQVPRDSYDKVRAILHNAARTGAAAQNRGGHADFRAHVLGLISWIGETNPDRRERLLDLAAEVDWTT

SEQ ID NO: 5588 - protein, 416 aa, Skermania sp.
  source 1..416: note = Related to VLIY01000014.1
MTPRAVSPAVAHALADEFARGGFRWRHSELAEAFAAIIDPVEAESLALRVVGLIPREPIDPQTTLQAVLADLPELPETVVAPEGEPGGLRFGVPEILDCGALATMLNLTTAELEWFADHGGWLRTAREPLSHYRYRRLPKSTGVRLVEAPKPRLREIQRTINRRILSGIPAHPSCHGFEKGRSAETFAMPHAQADVVVRVDLRDFFSSITVARVRAVFRACGYPDSVATALADLCTHASAIAPLRGLDHRQRTLLRVPHLPQGAPTSPRLANLVARNLDRRISGYARRSGLAYTRYADDLALSGTMDADSAVWAVTRIAEAEGFLVNPAKTSVRRQHQRQILAGLVVNNRPAAPRYAYDQVRALLHNCQRTGAAAQNRQGHNDFRSHVYGLIAWIGETSPARRQRLLAMAELVDWD

SEQ ID NO: 5589 - protein, 420 aa, Rhodococcus corynebacterioides
  source 1..420: note = Related to JAFBBK010000001.1
MSETFWHHHTARMVAARLVDIEWNSTELGEVLARFEHVADVETLITRLLERRIHAPDSTEVAAELLEVIGYPGDPFVLPAPPVRPTPTVRFGVPAFATTAELAASLDVTVSELDWFADVGGWLRRAAPPLRHYRAREVAKSRGGTRILEIPKPRLREMQRRVLHRVLDHVVPHPAAHGFRAGRSAVTFARPHEGRDVVVRVDLADFFPTVTRPRARAVFEACGYPYRVASVLAGICTTAMPVDEVAGLPRSQAALLGVPHLPQGAPTSPALANLVARGLDRRVAGLARARGLVYTRYADDLALSGPSDTDVSTLLWALDRIVRDEGFVVNGDKTHVARAHRRQTLAGLVVNESAAAPRDRYDALRALLHNSVRTGAAAQNRAGVPDFRASVYGQIAWIGESSPSRRSRLLAMADRVDWES

SEQ ID NO: 5590 - protein, 408 aa, Rhodococcus sp.
  source 1..408: note = Related to LMRP01000002.1
MPWTGAELGEVLGPFDRWFDVETLITRLSDAVRDAPDSVEAAVELLEGVGYPGLPFIPTPPPRIRPYRFGVPEISTPADLATSLGVTVPELDWFADLGGWLRRAAPPLRHYRAVEVPKKAGGKAGGRSDLGNIRILEVPKPRMREMQRRVLHRIVDHVDPHPAAHGFRTGRSAVTFARPHEQQDVVVRVDLADFFATVTAPRVRAVFEACGYPSKVAALLAGICTTAMPVDEASRLTTRRAAVMRTPHLPQGAPTSPALANLVARRLDRRVAGLARARGLTYTRYADDLALSGPSSTDVGTLLWALEHIALDEGFEVNAAKTHVRRSHTRQTLAGLVVNRSAAVPRDRYDDLRALLHNAARTGAAAQNRDELPDFRAHVYGLIAWVGESSPIRRVRLLDMAASVDWDA

SEQ ID NO: 5591 - protein, 450 aa, Rhodococcus corynebacterioides
  source 1..450: note = Related to JABUBR010000003.1
MHAPRAALRRRRESMVAPVPLPLATVTPPPENPHWARHHVPAIAPLLVDTAWTRAALDEMLVPFGGFLDVDTLRRRLMDAITGAPYTVDIAVRVLLEAGFPGPPPRISIPRAPLVVRPWRFDVPRYASAAELAASLDVTLDELDWFADLQGRLCRAPTPLRHYRALTIPKSAGAHRLLEIPKPRLREMQRRVLRRIVERIEPHDAAHGFRRGRGVHTFAAPHRQQDVVIRMDVRNFFPTITFARIRGVFAACGYPDAVAAVLAGICTTSLPVDEARPLPWREATDLRGRHLPQGAPTSPALANLVARGVDRRLAGLARARGLAYTRYADDLALSGPSSTDVRTVIGTVDRILRQEGFTPNEAKTRVRRSHRRQSMTGLVVNVSPQVPREEYDALRALLHNCRRTGAAAQNHDGVPDFRAYVLGRVAWVGESNDTRRRRLLALADEVDWAS

SEQ ID NO: 5592 - protein, 399 aa, Rhodococcus trifolii
  source 1..399: note = Related to NZ_BMCU01000001.1
MLVDARWTRSGLEEALESFSHRHDVDALVTRLLDLMPSAPLDVESGLSLLRGMPVLPMYLPPRPKPPSWHFDVPRYSSNIDLARSLDVTPWELEWFADLGGWLRTKPYPLQHYRTRTIDKRDGHRLLEVPKPRLREMQRRLLTRILDRIPPHDAAHGFVRGRSAVTFARPHEYADVVIRMDLADFFTSIRRPRVAAIFASAGYPRTVARTLAGICTTETPAERLSGLPHDRAVALRAPHLPQGAPTSPALANLVARRLDRRLAGFARKNGLTYTRYADDLAFSGSADVRVDKLITVVTTIVRAEGFSVNVRKTRIRRAHRRQVLAGLVVNESAAVPRARYDALRALLHNCSITGASEQNRDGLPDFRSHVYGVIAWIGESNEVRRAVLHDLAARVDWDS

SEQ ID NO: 5593 - protein, 415 aa, Rhodococcus sp.
  source 1..415: note = Related to NZ_CP032762.1
MSRQFSPQMAAWLASLAAEAPWTRGGLEEAFMPLLGDKAARLAYRLIDLLPSAPYDTESLRGLITGLPLLPEPRSVEPSRRRDGVKPWLFEVPRYVTTGDLAESLNLTIPEIEWFADAHSRLTVAPEPLRHYRVTPIPKRVGARLLEIPKPRLREIQRKILRRILDNVPAHAAAHGFVKGRSPRTFGIPHAGREVVMSVDLKDFFPTVGINRVVAVFDALGYPRNVAWNLAYLCTTSTPAGQLGGMPYATASLLRSRHLPQGAPTSPALANLVARRLDIRLTGLARSMGLRYTRYADDLAFSGSADVDAVLWVARQVIVDEGFVVNPVKTRVRRAHKRQILTGLVVNDWPAVPRKEYDELRAILHNCAVTGPEPQNRHGVPDFRAHLFGRIARIGETNSARRRRLLEMAEQVDWA

SEQ ID NO: 5594 - protein, 407 aa, Rhodococcus sp.
  source 1..407: note = Related to NZ_NPFR01000010.1
MAAWLASLAADALWTRSGLEEAFLPILGEKAPRLADRLIDLSPVAPYDPESLRGLITGLPLLPEPATVEPSRRTDGFKPWLFEVPRYASTGDLAESLDLTISEIEWFIDAQSRLRTAATPLRHYRVTPVPKRVGFRILEIPKPRLREIQRKILRRILHNVPAHSAAHGFVTGRSPRTFGIPHAGHTVVVSVDLKDYFPSIGIERVVAVFDALGYPKSVAWSLAYLCTTATPAEQLGGFPYATASLLRTRHLPQGAPTSPALANLVSRRLDIRLTALAKSLGARYTRYADDLAFSGDIDADKIIWSASKIIADEGFAVHPYKTRVRRAHKRQQLTGLVVNDWPSVPRKEYDALRAILHNCAVTGPDPQNLSAIPDFRAHLYGRIARIGATSAVRRRKLLELAERIDWE

SEQ ID NO: 5595 - protein, 472 aa, Rhodococcus sp.
  source 1..472: note = Related to NZ_LVCV01000404.1
MAHGRVSVRATDLRGNPWVGKKNWALRPTPVRTLRVHDGAEHERFRSPVAAAPWIAMTERQFNAQLAAYLAQLAADAQWTRERLEEAFMPILGERAPRLADRLIDLYPSQPFDQASVHRLIAELPRIPEAISHEPVRRSNSPKPWRFDVPRYFTTGDLAESLNLTIPEIEWFADAHSRLTTASPPLRHYRTTAIPKRVGARLLEIPKPRLREIQRKILRRILDHVPAHGAAHGFVKGRSPRTFGIPHAGKEVVISVDLKNFFPSIGISRVIAIFDALGYSRSVAWNLAYLCTTSTPAGQLNGLPYATASLLRTRHLPQGAPTSPALANLAARMLDIRLTGFARSMGLRYSRYADDLALSGDADVDKVLWVARRIITDEGFILNPLKTRVRRAHERQQLTGLVVNDWPAVQRREYDELRAILHNCTRTGPTSQNRSDMEDFRAHLYGRIARIGETSPTRRRTLLEMAERVDWT

SEQ ID NO: 5596 - protein, 416 aa, Rhodococcus sp.
  source 1..416: note = Related to NZ_JABFAO010000002.1
MSERQYIPPMAAALARLAADAPWTRERLEEAFMPLLGARASRLADRLVELHPAPPFDEASVHRLIADLPLLPETASITPERRTSSFAEWRFEVPRYVTTGDLAESLNLTIPEIEWFADAQSRLRTAPEPLRHYRTTPIPKRVGARLLEIPKPRLREIQRKILRRILDRVPPHSAAHGFVKGRSPRTFGIPHAGHEVLVSVDLKDFFPSIGIDRIVAIFGALGYPRTVAWNLAYLCTTSTPAEQLSGFAYPSASLLRTRHLPQGAPTSPALANLAARKLDIRLTGLAGSMGLRYTRYADDLAFSGSCDADVLLWTIRQIVRDEGFGLNPGKTRVRRAHKRQQLAGLVVNEWPAVPRREYDGLRAILHNCILTGPAAQNRAGVPDFRAHLYGRIAHIGETSAARRRRLLEMAEQVDWS

SEQ ID NO: 5597 - protein, 407 aa, Rhodococcus kyotonensis
  source 1..407: note = Related to LVHI01000032.1
MAAFLAELASDVPWTRDRLEEAFMPVLGVKALRLADRLIDLYPSPPFDEESLYRLIADLPRLPDKKSEEPERRTSGPKPWRFDVPRYFSTGDLAESLNLTIDEIEWFADAQQRLKTASSTLRHYRATSISKRSGARVLEIPKPRLREIQRKVLRRILDQVPAHGAAHGFVTGRSPRTFGIPHAGRDVVLAADLKDFFPSIGIGRVVAIFDALGYPRTVAWNLAYLCTTSAPAGELAGVPYETASLLRTRHLPQGAPTSPALANLAARMLDIRLTGLARSMGLRYTRYADDLAFSGTCDVDRVLWVVRHIVRDEGFMLHPNKTRVRRSHKRQQLTGLVVNEWPAVPRSEYDELRAILHNCARTGPEAQNRSGHGDFRAHLYGRIARIGETSATRRRKLLELAERVNWS

SEQ ID NO: 5598 - protein, 418 aa, Rhodococcus sp.
  source 1..418: note = Related to NZ_CP010797.1
MTERELTPQAAATLARLAADAEWTRSGLAEAFEPLVPAKATWLADRVINLYPSPPFDEASIFVLLRDLPFIPEPSVSSQRPTRNSDKPWRFEVPRYETTGQLARSLDLTISEIEWFADLQGRLRTAPFPLQHYRSARLDKRQGIRLLEVPKPRLREIQRKILRRILDRIPSHPAAHGFAKARSPRTFAMPHSERDVVISVDLRRFFPSIGFDRVVAIFEAVGYPRTVAKTLAALCTTVTPASELTGMDRPTAARLRATHLPQGAPTSPALANLAARQLDIRATGLARSGGARYSRYADDLAFSGGPDLDVDRLLWLITQIAHDEGFTIHPDKTRVRRAHQRQQLTGLVVNSWPAVPREEYDTLRALLHNCIASGPAEQNRHHHNDFRAHVYGRIARIGETNETRRAKLLSMASRVNWD

SEQ ID NO: 5599 - protein, 441 aa, Rhodococcus sp.
  source 1..441: note = Related to NZ_JABFAU010000077.1
MTERELTPRAAAILARLAVDADWTRSGLDEAFARLIPAKATRLADRVMNLYPSPPFDEASIFVLLRDLPFLAEPSISSEIPTHFGGKPWRFEVPRYETTGDLARSLDLTISEIEWFADLHGRLRSAPYPLQHYRSARLDKRQGIRLLEVPKPRLREIQRKILRRILDRIPPHPAAHGFRKARSPRTFALPHSGRAVVVSMDLRRFFPSIGFDRVVAIFEAVGYPGTVAAHLAALCTTVTPAVELIGMDRPTASRLRATHLPQGAPTSPALANLVARQLDIRASGLARSVGAHYTRYADDLAFSAAADLDVDRLLWVMSQIAYDEGFAVHPGKTRVGRAHQRQQLTGLVVNSSPAAPREEYDNLRALLNNCIRAGVSGQNRRGADDFRAHVYGRIARIGETNEARRTKLLNMAARVDWPTPVFEPRNSGSRTAHTPATEEDR

SEQ ID NO: 5600 - protein, 422 aa, Rhodococcus fascians
  source 1..422: note = Related to CP015235.1
MNDRELSPRAAATLARLAADAEWTQSGLEEAFSRFMPAKASRLADRIIDLYPSPPFDEASIFVLLRDLPLIAQSSKSSQRSPIRGRVVPWRFEVPRYETTGQLAQSLDLTISEIEWFADLQGRLRTAPFPLQHYRSARLDKRHGVRLLEVPKPRLREIQRKILHRILDRIPPHPAAHGFRKGRSPRTFATPHAEREVVVSVDLRRFFPSIGFDRVVAIFEAVGYRRRVAANLAALCTTVTPAGELTGMDRATAARLRTTHLPQGAPTSPALANLAARQLDIRAAGLARTMGARYTRYADDLAFSGPADLDVDKLLWVLSQIVRDEGFTIHPDKTRVRRAHQRQQLTGLVVNAWPAVPREEYDNLRALLHNCLGSVAAQQNRNGLTDFCAHVYGRIARIGETSETRRRKLLEMAARVDWEGSG

SEQ ID NO: 5601 - protein, 416 aa, Rhodococcus sp.
  source 1..416: note = Related to NZ_CP039254.1
MADRELTPRSAAVLAALAADVQWTRSGLQEAFAALVPARASWLADRVINLFPMPPFDESSIFRLLRDLPFIPEPLVSSHTPPPGGNVKPWRFEVPRHETTGQLAQSLDLTIDEMDWFADLQGRLTRAPFPMQHYRSARIDKRVGSRLLEVPKPRLREIQRKVLRRILDRVPAHPASHGFRRGRSARTFAIPHAGREVVVSVDLKNFFPSIGFDRVVAIFEAVGYPPTVASNLAGVCTTVTPAAELVGIDRPTASRLRSTHLPQGAPTSPALANLAARQVDIRLTGLARSMGLRYTRYADDLAFSGSPEVDTLLWVVGQVAQDEGFALHPDKTRVRRAHQRQQLTGLVVNDWPAVPRAEYDALRALLHNCMTTGADVQNLNGSADFRAHVYGRIARIGETSSTRRERLLAMAARVDW

SEQ ID NO: 5602 - protein, 416 aa, Rhodococcus erythropolis
  source 1..416: note = Related to NZ_CP007255.1
MRDFELDPELARRLAVAAADAPWTLSGLEEAFGTVFGVSPTLLAVRVLDLMPAPPFEPQTLYRLLRELPRLRPVPLSLDTNESSVWRFDVPRYNTSVDLARALDLTISELEWFADRGEWLRTKPLPLRHYRPMQISKKTGARLLEVPKPRLREIQRKILRRILDLVPPHDAAHGFVRGRSPLTFAAPHAQSEIVIGVDLAQFFPSISGSRVHAVFTALGYPPAVAGVLTGLCTVATPADTLRGLPYAQASQLRTAHLPQGAPTSPALANLVARKLDIRLSGLAQANWLTYTRYADDLAFSGIEVADVGTLLWSVEQIARDEGFAIHPRKTKVMRPHRRQHLTGLVINDQPSYPRDDYDRLRALLYNAASTSAQEQNRDGIENFRAHVYGRIAHIGETSTTRRHTLLRLAERVDWDG

SEQ ID NO: 5603 - protein, 444 aa, unidentified
  source 1..444: note = Related to JAGRPD010000186.1; note = Verrucomicrobiales bacterium
MSLDRVPLVQQLVRRALDGRWESHAILARWHTLGARPCITLRALAHLAVHCAGRGIRPTEKRLIRTLLSSPLLSRWLRQQHRTLLPLPPPAPKFEPVEKLAHLALPPLTTETDLAQFFHMELAELSWHADPQLRLRHQPDGRLQHYTYRWLPRRNGSPPPRLLEIPKPWTRQLQRRIWDQLLRPVPVHAACHGFVPGRSRLTAAAPHCGKEALLRIDLKDFFVSIPRWQVRALWMTLGYPEAVARLLAGLCTTVTPAAVLDACPAPPQDPSQRWWWRKRASTPHLPQGSPCSPALANLCAWRLDTRLTAYATAAGLDYTRYADDLLFSGSARTLRRPQRRHALMEIIRSEGFCVHPDKVRLMTQSQSQQALGLVLNQRLNLPRASFDQLKAELHHALHHQGLPSEASARSQKLAQLRGRIQEMIDIHPRRGQKLLALWQRLLRD

SEQ ID NO: 5604 - protein, 334 aa, unidentified
  source 1..334: note = Related to JAJTHZ010000014.1; note = Xanthomonadaceae bacterium
MPPTRSARAPALDSLDQLRRWLRLSTGELLWFCDVYGNGRRACATALRHYRHRWIAKRSGGLRLLEIPKARLKRMQRRILDELLSHAAIHPAATGFVRGRSCLDHARTHVGARWVVTSDLRDWFGSIPRARIAAQFRRSGASKHVADALARLCTACTPSAIVDLAAVPDRAHLRVPHLPQGAPTSPALANLVASRLDRRLAGYARHAGLNYSRYADDIALSPQPGVETPPQRALEALQRIARSEGFRVNPRKIRIKRHGSRMTVCGIVINERLNLARDAYDRLRAAVHRLASSTDVDPLEIARVRGRLSWLESLNPRRAAKLRRLLESRGTPST

SEQ ID NO: 5605 - protein, 458 aa, Microbacterium pseudoresistens
  source 1..458: note = Related to NZ_JACCBH010000001.1
MTDAATPASRVLARTPHPLPRDVAAALGDAFLAAEAWERAALIDAGADVLGARRRWLGPLVRDVLTELARPPSDAPRLLVSVIVRSSAFLEAVRKAEERGSPLRIRHRVIAPSVSREPTGALPAIGDVTDLAALLEIDLGRLQWLADVKHWNRRARSPALQHYRYEWRRRPGRVPRLLEIPEQRLRRAQRRLLHAVLALIPVNDAAHGFLPGRSAATGAARHIGAETVISLDLTTFFARVTAPRIYGVLRQSGFSEPVAHTMTGLCTTAVPPAVLAAMPPGGSPDERFALRRALASTHLPQGAPSSPMLANLAIRRLDSRLTGWADALDATYTRYADDLAFSGGPALARRADAFIRGARRIIADEGHEANARKTRVRGRGVRQSVTGIVVNERLNVSRDDYDRLKAIVHNCVVHGPATQNRGGVADFRAHLLGRISWVESLNARRGERLRAEFARIRW

SEQ ID NO: 5606 - protein, 456 aa, Microbacterium murale
  source 1..456: note = Related to NZ_BMCM01000001.1
MAATTASRVLARTPRPLPSSVAASLADAFLASEVWAPKELIRTGAFVMGARRRWLTPLVGDVMSAFVRAPVDAPRLLTSVILRAPDFIEAVRKADERRSPLRIHHHVVGPSTSQPPSGPLPRIDSIPDLAVLLDLDVGRLQWLADTKQWNRRARPGPLHHYQYEWRARPGRIPRLLEIPEQRMRRVQRTLLERVLGLIPVNGAAHGFVPGRSAVTGAAHHTGSDIVISLDLTTFFARVTAGRIFGTLRQSGLSEPVSHVITGLCTNAVPPRVLAAMPPGGSPEERFALRQALATSHLPQGAPSSPMLANLAIRRLDSRLTGWADAVDATYTRYADDLAFSGGSTLAKRPDAFIRGVQRIIEDEGHLANPRKTRVRRQGVRQTVTGIVVNQRANVSRADFDRLKATIHNCVLHGPHTQNHRSLDDFRAHLLGRISWVESLNPPRGARLRQEFLRIRW

SEQ ID NO: 5607 - protein, 459 aa, Microbacterium sp.
  source 1..459: note = Related to NZ_PCOT01000008.1
MTEALTPATRVLARTPRAGASAIATALADAFLAADAWTAPHLVDAGSFVLGARRRWLPRVVDDVMVDFVRAPVDSPRLLIAVIRDSPAFRAAIEKADAARTPIRIHHHVVATTRSREPAAGLPRIDDIAALAVLLELTDGQLAWFADTKRWNRRARPGPLHHYRYEWRSRPGRVPRLLEVPEERLRRVQRRLLERVLGLIPANDAAHGFMPGRSAVTGAARHVGAGIVVSVDLTTFFARVSAGRVYGTLRQSGYSESVAHTIAGVCTSAVPPRVLAAMPPGGTPEERFALRRALAANHLPQGAPSSPMIANLAVRRLDSRLTGWAAAVDAAYTRYADDLTFSGGPSLAARPDAFIRGVRRIVEDEGHSLNERKTRIRRQATRQAVTGIIVNERLNLVRGDYDRLKAIIHNCILHGPSSQNRAGVADFRAHLRGRISWVESLNAQRGARLRAEFARIVWA

SEQ ID NO: 5608 - protein, 465 aa, Microbacterium keratanolyticum
  source 1..465: note = Related to NZ_JAFBBQ010000001.1
MTSTAAARALGHSPQPAASAIARALADAFLETPSWTRPELMAAGARVLGARRRWLGPVVDEILGDLVRAPHDSPRLLATLIEDSPAFREGVSKAAARRAPQQIHYRPLAPQHPPALSHPLDPEPPLPRLRTLPELAALLDLSLGHLEWLADTKNWNRRARPGSLHHYRYEWRTRPGRVPRLLEVPEDRMRRTQRALLDQLLSRIPANDAAHGFLPGRSAVTGAARHVASDIVISLDLTTFFARVTATRIYGTLRQAGYDEQIAHAITGLCTNAVPPRVLAAMPPGGSPEERFALRRALAASHLPQGAPSSPMLANLAVRRLDSRLTGWAEKAEASYTRYADDLTFSGSGVIARRPDAFVRGVRRIIADEGHIANPAKTRVRRQGTRQAVTGIVVNQHPNLSRVEFDRLKAILHNCAVHGPAAQNRSDASDFRAHLLGRISWVESLNPGRGAKLRREFSRIDWGSP

SEQ ID NO: 5609 - protein, 469 aa, Rhodoglobus vestalii
  source 1..469: note = Related to VFRA01000001.1
MSGSFGKRAVPNTAVVIMAAHRSYRAPHPSPSAISHALAYAFLASDVWETKQLVDAGWSVLGAHRRWLRAVVADVVAAYHRPPTDSSRELAAFIRNSPAFVDAIAKARQQRRPIRIHHLVVAPSQARDVGGLVPRINTVAELAELLGLTIGQLDWYADTKNWNRRAPVGPLQHYRYEWRTRPGRTPRLLEVPEERIRRVQRLLLDAVIALIPVNDAAHGFIANRSAVTGAALHTGREIVVSLDLTTFFTRVTASRIYGVFRQSGFPETVAHILTGLCTNSVPPRVIAAMPPGGDADERFALRHALAANHLPQGAPSSPMLANLAIRRLDSRLTGWAHSVGAIYTRYADDLAFSGDRDLARRPDAFIRGVQGVVREEGQTINPRKTRVRRSGVRQTVTGIVVNDHTNISRHDYDLLKATLHNCATLGVERQNRGGHNDFRAHLLGRIAWVETLNPLRGEALRQKFALIRW

SEQ ID NO: 5610 - protein, 465 aa, Salinibacterium sp.
  source 1..465: note = Related to NZ_CP035375.1
MTDAPPQTTGSPISGVPRVRRVPHPTPAAIAGALSYAFLAADQWATNSLIDAGARVLGARRRWLRTVVADVVAVYHRPPADSSRELASFVVQLPAFVEAIAKAKQQRRPIGLHHFPAAPSQARDRGDPVPVVDTVGELATLLGVTVGHLEWCADTKNWNRRAPAGRLQHYRYEWRQRPGRTPRLLEVPEERIRRVQRTLLDTVIGLIPTNVAAHGFVASRSAATGAALHTAREIVVTLDLTTFFTRVTAARIYGVFRQSGFPESVAHILTGLCTNSVPPRVIAAMPPGGSADERFALRQALAGNHLPQGAPSSPMLANLAIRRLDSRLTGWANAIGATYTRYADDLAFSGDRDLARRPDAFIRGVHRIVLDEGHNVNPRKTRVRRSGTKQTVTGIVVNERTNISRHDYDALKALLHNCAQHGPDSQNLSHHVDLRAHLMGRIAWVTALNPHKGEVLHTKFALIRW

SEQ ID NO: 5611 - protein, 470 aa, unidentified
  source 1..470: note = Related to nan
MSLRFWSMTMDAASSTRAKAGLRGIRRPHPAPSAVSQALAYAFLASEVWAAKELVDAGSLVLGARRRWLRPVVADVMAAYHRAPTGSTRELAAFIATVPAFVDAVAAAAQQRRPIRIHRVVATASQARPAGGPLPAIDTVADLAVLLGLSLGELEWFADTKNWNRRAPAGALHHYRYEWRARPGRTPRLIEVPEQRLRRAQRALLECVIGMIPLNDAAHGFVPGRSAVTGATLHTGREIVVSLDLTTFFARVRASRVYGVLRQAGFAESVAHVIAGLCTNSVPPRVIAAMPDGGSAEERFALRHALADRHLPQGAPSSPTLANLAIRRLDSRLSGWATSVGATYTRYADDLAFSGDRELARRPDAFIRGVERIVHEEGHSVNPQKTRVRRSGVRQSITGIVVNEHTNISRREYDQLKAILHNCAAHGPESQNRDHHNDFGAHLLGRIAWVSTVNPLKGRSLRQKFALIDW

SEQ ID NO: 5612 - protein, 338 aa, Leifsonia sp.
  source 1..338: note = Related to LMDN01000001.1
MPVPRLDTLADLSALLGLDIGELEWFADARGWNRRAPERLQHYRHEWRTRPGRTPRLLEVPEQRMRRAQRTLLDTVIGVLPAHDAAHGFMPGRGVISGAEAHLGSAVVISLDLVSFFSRVSARQIYAVLRRAGLPEVVAHRVTALCTHAVPPAVLAGMPPGGSPEERFALRQALARPHLPQGAPSSPMLANLAVRRLDARLSGWSDAAGARYTRYADDLSFSGGAELSRRSDAFVRGVARIVAAEGHELNERKTRVRRAGERQSVTGVVVNDRLNLARRDVDQLKAILHNCAVHGPESQNRAGHPDFRAHLEGRLNWVESLNPARAARLRRDFERIAW

SEQ ID NO: 5613 - protein, 463 aa, Cryobacterium sp.
  source 1..463: note = Related to NZ_JPRS01000007.1
MSDSPGATGAGRAALVLGREPHPSSAGVATALAFAFLAADVWSPSGLSTAGTAVLGVRRRWLGPLIRDVLEAYRQPPHDASLELSRVIGATESFRAAVRLADSRGAPLRVLHHKVAESRAREMPGLVPHIDTPADLARLLELSVGDLDWFADAKQWNRRSAVAALHHYRYEWRLRPGRTPRLLEIPETRVRAAQKRLLVEVLGLIPTHDAAHGFVPGRSAVTGASRHTGSDVVVSLDLTTFFARVTGAAVYGTLRRAGLPEAVAYAITGLCTTAAPPRVLSAMPPGGDPDERFALRKALASTHLPQGAPSSPMLANLAIRRLDARLQGWAAAAGGTYTRYADDLAFSGGGQLARRPDAFVRGVQHIVIAEGHTANPRKTRVRRASVKQTVTGVVVNARTNMSRRDVDRLKAIIHNCVLHGPESQNTAAHADFRAHLLGRLSWLESLNPERARTLRTEFRRIEW

SEQ ID NO: 5614 - protein, 432 aa, Cryobacterium sp.
  source 1..432: note = Related to NZ_PJJO01000056.1
MALAFLAADDWSATRLSAAGSLVLGARRRWLGPLVRDVLAAYREPPHDASRELTTVISGSDAFRAAVDRADARGAPLQVTHHLVAQSRGREAPAPAPLLDTVSGLARLLDLSVGDLDWFADTKHWNRRAPAGALQHYRYEWRLRPGRTPRLLEIPGSRLRATQRKLLVGVLGFIPTHDAAHGFVPGRSAVTGASRHTGKNVVISADLTSFFARVSGARVYGTLRRAGIPETVAYTITGLCTTAAPPRVIAAMPPGGNLDERFALRKALAATHLPQGAPSSPMLANLAIRRLDARLEGWSSAAGAVYTRYADDLAFSGGGALARRADAFVRGVDRIVTSEGHTLNSHKTRVRGASLKQTVTGVVVNKHTNMSRRDIDELKAILHNCVVNGPDSQNQGAHPDFRSHLLGRLSWLEAVNPARGQKLRVEFGRIHW

SEQ ID NO: 5615 - protein, 461 aa, Cryobacterium roopkundense
  source 1..461: note = Related to NZ_JACHBQ010000001.1
MTSKLRGATPAALVLARRPHPSSSEVASTLALAFLSSKFWHATALSEAGSAVLGARRRWLGPLVRETLTVYREAPHDAPRALTAFIAAADVFRAAVAHADASGVPIGLAHHRIPLTRARPVPGVVPPLGTLAELADFLELPIGDLDWFADTRQWNRHAPSGALQHYRYEWRARAGRTPRLLEIPGARLRSAQRTLLTGVIGLVPTHDAAHGFVPGRSAVTGASRHTGTDVVISLDLTTFFARVTGARIYGTLRRAGLPEAVAYTITGLCTTAAPPRVIAAMPAGGRPEERFALRQALAATHLPQGAPSSPMLANLALRRLDSRLAGWAAAASSVYTRYADDLAFSGDLTLARRADAFARGVERIVAAEGHLVNPHKTRVRRASVKQTVTGIVVNTQTNMSRQESDRLKAIIHNCARHGPESQNRGAHPEFRAHLLGRLSWLETLNPARGRKLRAEFSRIHW

SEQ ID NO: 5616 - protein, 467 aa, Cryobacterium melibiosiphilum
  source 1..467: note = Related to NZ_QZVS01000068.1
MSAGAAVPRPTPAALVLARRPHPSTDALAATLAAALLGAKTWSKTEMIDAGAHVLGARRRWLGPLATEILSSYPRAPTDSPRELAAHIIDCAAFSNAIEAATSRGVPNIIAHYPLTPPLTPPQARAVTSALPRLDTLGDLAAFLTLTPGELDWFADTGQWNRTARPGALHHYRHEWRVRPGRTPRLLEVPGTRLRALQRTLLHDLLGLIPTHGAAHGFVPGRSAVTGAARHTGTAAVISLDLTTFFASVTGSAIYGTLRRAGYPESVAHSITGLCTHAVPPRVIAAMPPGGDPAERAALRRALAAPHLPQGAPSSPVLGNLALRRLDARLAGWADAAAATYTRYADDLAFSGGTDLRRRADAFVRGVTRIALAEGHTVNPHKTRVRPASVRQSVTGIVVNEHPNISRVDADRLKAILHNCELHGPAGQNRAGHADFRAHLLGRISWVEQLNPERGARLRASFGRIRW

SEQ ID NO: 5617 - protein, 417 aa, Cryobacterium sp.
  source 1..417: note = Related to SOHE01000083.1
MIEVGARALGARRRWLGPLASEILSSYPRAPTDAPRELAAHITGCTAFSNAVEEATSRGVPITIASYPLTPPQAGAVTSALPRLDTLGDLAALLGLTPGELDWFADTGHWNRRARPGVLHHYRYEWRARPGRTPRLLEVPGTRLRALQRTLLNDLLGLIPAHPAAHGFVPGRSAVTGAARHTGAAVVISLDLTSFFASVSAQNIYGTLRRVGYPEAVAYSLTGLCTHAVPPRVIAAMPPGGDPGERAALRRALASAHLPQGAPTSPVLGNLAIRRLDARLDGWAEAAEATYTRYADDLAFSGGDALHRRADAFVRGVTRLVTAEGHTVNPHKTRVRPASVRQSVTGIVVNARPNLVRVEADRLKAIVHNCVVHGPAGQNRGAHPDFRAHLLGRISWVEQLNPQRGARLRATFARIRW

SEQ ID NO: 5618 - protein, 391 aa, Marisediminicola senii
  source 1..391: note = Related to NZ_JAALGE010000001.1
MIRGHTPHSSTADVASALAGAFLAADAWTERDLVAAGAHVLGARRRWLPPLVRETLAAYRRPPVDAPRELGDFVEMTAAFGLAVVAAHDRRTPIRIEHRVLVAARAVPATPAVPRVDGLDDLADLLGLTPGELDWFADRRHYTRRATDTRLQHYRHEWRTRPQRTPRLLEVPGSRLVAVQRTVLAELLGPLPVHGAAHGFVPGRSAITGAARHTGAAVVIALDLSTFFSRVTAGRVYATLRRAGYPEAVAHAITGLCTHAVPPRVIAAMPSGGDADERFAARRALAAAHLPQGAPTSPMLANLSVRRLDARLSAWAERVDATYTRYADDLAFSGPPALARRSDAFIGGGERIVTAEGHPPNARKTPGRPARPPPRGPGNAGTDPPHTPRTG

SEQ ID NO: 5619 - protein, 370 aa, unidentified
  source 1..370: note = Related to JABMLG010000003.1; note = Microbacteriaceae bacterium VKM Ac-2855
MRAALRRAVKRGTPVIIAHHVLAEPVAPASASPVPRLASVTELAAALHLEIGELEWFADTRLQLRRASSTRLQHYRYEWRERPGRLPRLLEVPGRRLRAAQRAALDAVIGLAPLHDAAHGFVPGRSARTGAERHVGSEVVIALDLTTFFARVTARDVYRALRAEGLPESVAYVLTGLCTHAVPYRVAAHPPRGGDLDERFALQKALTVPHLPQGAPTSPALANLCVRRLDARLAGYAEAAGAVYTRYADDLAFSGGPALARRADAFARGVRRIVASEGHELNDHKTRIRTASVRQSVTGIVVNTRPNVTRAEYDALKATLHNCIRDGPASQNRAGHAEFRAHLLGRISWIASLNPARGERLRAEFDRIPW

SEQ ID NO: 5620 - protein, 364 aa, unidentified
  source 1..364: note = Related to JABMLH010000001.1; note = Microbacteriaceae bacterium VKM Ac-2854
MRAALADAAHRGRPLGIAHHLIAEPPSGTHPGSLAELAALLELTPGELDWFADTQLRQRRAPDGPLQHYRYEWRERPGRLPRLLEVPGRRLRAAQRVLLEEVVGLLPLHDAAHGFVPGRSVRTGAERHLGQEVVIALDLTTFFARVSARDVYRLLRGASIPEAVAYTITGLCTHAVPYRVAAHPPRGGDLDERFALQKALTVPHLPQGAPTSPALANLSLRRLDARLAGYAAAAGAAYTRYADDLAFSGGPALARRADAFIRGVERIVAAEGHLINAHKTRVRKAAVRQSVTGVVVNRVTNVTRTEFDALKATLHNCVVHGAASQNRGAHPDFRAHLLGRISWVAALNPARGAKLREEFDRIHW

SEQ ID NO: 5621 - protein, 459 aa, Marisediminicola antarctica
  source 1..459: note = Related to NZ_CP017146.1
MKETTVSAAALVLARHPHPSVPALATALGHAFLAADQWTARELIASAARTLGARHRWVGPLVAEVLAAYHRPPIDAPRELASMIEAAEAFRAAVARAEQRRAPIRIAHYAVEPGTARPMPAGVPRINGHGALAELLGLSPGELDWFADTALWNRRGTSERLQHYRYEWRQREGRVPRLLEVPQRRLKGVQRSVLASILGPIPAHDAAHGFVPGRSAVSGAALHTGNDVLIALDLSTFFARVPARRIFGTLRQAGLPEAVAHTVSGLCTHAVPPRVIAAMPRGGTAEDRFALRRALATPHLPQGAPTSPALANLAIHRLDARLSGWADAAGATYTRYADDLAFSGGPPLARRADAFVRGVTRIVEAEGHSLNRLKTRVRASSVRQVVTGIVVNDRTNLPRAEFDRLKAVLHNCVMHGPHSQNRAGHSDFRAHLLGRISWVEALNPGRGPRLREELERIRW

SEQ ID NO: 5622 - protein, 491 aa, unidentified
  source 1..491: note = Related to nan
MNETGPIPGDDDPTGPATARRRGGRHVPSPRSTRGSATLGREPAPGAPGLSLLLAYAFLAAPDWRQEELIAVGAVLLGARRRWLGPLARGVLTGYPRRPVGAPRELARWIAAQPAFTDAIARASARGMPISPARYLTAVTEGPAPAGSAPGSAVATPGTRDLAWLARELRLTPGELDWFADTRHWNRRAASRALHHYRYEWRVRPGRVPRLLEVPGIRLRTVQRHVLDHILAPIPLHDAAHGFAPGRSARTGAAVHTGADVVVALDLVSFFAHITPGRVFGVFRQAGFPEATAHALTGLCTHEVPDAVLQSMPDGGGSGERFALRQALRAAHLPQGAPSSPALANLAVRRLDARLAGWAAAAGGSYTRYADDLAFSSPAPLARRADAFIRGVERIVVAEGHAVNRPKTRVSGASVRQTVTGVVVNARTNVARTDYDALKAILHNCRVHGPESQRRGQADFRAHLAGRIARVESLNPQRGRRLRDAFERIRW

SEQ ID NO: 5623 - protein, 492 aa, Arthrobacter sp.
  source 1..492: note = Related to NZ_CP095501.1
MDRTGPTTGDDDRMRPATARDGGGRGRPSPRPTPASATLAREPAPGVPGLSLLLAHAFLAAPQWRREELIVAGAALLGARRRWLGPLVRGVLSGHPRPPDGAPRELARWIAAQPAFTEAVARASARGTPIGPAHHLPAVPEERTPLRTTASADAVRTPGTRDLAWLARELRLTPGELDWFADTRHWNRRAAHRALHHYRYEWRVRPGRVPRLLEIPGIRLRTLQRRVLDHILAPLPLHDAAHGFVPGRSARTGAAVHTGADVVIALDLVAFFARVPPGRVFGVFRQAGFPEATAHALTGLCTHAVPDAVLRSMPDGGSAGERFALGRALRTAHLPQGAPSSPALANLAVRRLDSRLAGWAAAAGGTYTRYADDLSFSGPASLARRADAFVRGVERIVVAEGHTVNRLKTRVGGAPVRQTVTGIVVNVRTNVARTDYDALRAILHNCRVHGPESQRRGQADLRAHLAGRISWVESLNPQRGRRLRDAFERISW

SEQ ID NO: 5624 - protein, 484 aa, Arthrobacter pityocampae
  source 1..484: note = Related to NZ_PRKW01000004.1
MDGAGPRAVRGPARPRRGRGAPEGPTSASATLAREPAPGVPGLAFLLAHAFLAAPDWRREDLVAAGAALLGARRRWLGPLVRGVLAGYPRRPEGAPRELARWIAAQPALTDAVARAAARGEPVRPARYLPPAPEEQAFGDRSAPGGVEASGARDLAWLAREVRLTPGELDWFADTRHWNRRAGAPALHHYRYVWRARPGRAPRLLEIPGIRLRTVQRRVLDHLLAPIPLHEAAHGFVPGRSARTGAALHTGADVVIALDLVSFFARVPPGRVFGVFRQAGFPEATAHALTGLCTHEVPDAVLRAMPDGGSAEDRFALARALRTAHLPQGAPSSPALANLAVRRLDARLSGWAAAAGGSYTRYADDLAFSGPADLARRADAFVRGVERIVVAEGHTVNRRKTRVRGAAVRQTVTGVVVNARTNVARTDYDALKAILHNCRVHGPESQRRGQADFRAHLAGRISWVESLNPQRGRRLRDAFERISW

SEQ ID NO: 5625 - protein, 488 aa, Arthrobacter agilis
  source 1..488: note = Related to NZ_CP024915.1
MDDTESLPDDGGSFPARGGPVRASRGTAAARTLARTPAPGGPGLAFLLAGAFLTAPAWQREDLLDAGAAVLGGRRRWLGPLVRAVLAGYPRRPDGAPRELARWIRAQPVFTDAIGRAAARGVPITPARYLTAGAPEEGHRPSRVDLGTGAPAAPGAGDLGRLARELRLTPGELDWFADTRSWNRRAPSQALRHYRYEWRSRPGRVPRLLEVPGIRLRTVQRRVLDLVLAPIPLHPAAHGFVPGRSARTGAALHAGTDVVISLDLVSFFAHVSPGRIFGVLRQAGCPEATAHVLTGLCTHSVPEAVLRAMPGGGTPEERFALARALRAAHLPQGAPSSPALANLAVRRLDSRLAGWAEAAGGTYTRYADDLAFSGPAGLARRADAFLRGAERIVAAEGHEVNRHKTRVRSAATRQTVTGVVVNAHPNVARADYDALKATLYNCLVHGPESQRRGQADFRAHLGGRISWVESLNPLRGRKLREAFDRIGW

SEQ ID NO: 5626 - protein, 559 aa, Vibrio cholerae
  source 1..559: note = Related to WNZI01000030.1
MLGWQRRIPAEAEHVHRARSSPGLPRGTQTDQHRAPQAPDCASRSSAPEQREQVGRDPSPADRQGGTGEGGHGGRRSNDGRQPDVSSRTRRAGPPPTTAGAALARLPTPGGPGLAFLLASAFLDSPSWQREHLVEAGAAVLGARRRWLGPLVRSVLSGYPRRPDGAPRELARWIAAEPVFSDAVGRARARRSPIRPARFLVQEDSERADPPEPVPPDAAVESGRTSGIKDLAWLARELRLTPGELDWFADTRHWNRRAGSALQHYRYVWRVRPGRVPRLLEVPGIRLRTVQRRVLDLLLAPMPLHGAAHGFVPGRSARTGARVHSGSDVVISLDLVSFFARVPPGRVFGVFRQEGFPEATAHVLTGLCTHAVPERVLRDMPDGGSGQERFDLAQALRAPHLPQGAPSSPALANLAVRRLDSRLAGLADAAGGRYTRYADDLAFSGPGALTRRADAFIRGVERIVEAEGHSVNRRKTRVRGASTRQTVTGVVVNVRPGVARPDYDALKATLHNCVVRGPESQRRGRADFRAHLAGRVSWVESLDPPRGRKLREAFDQIVW

SEQ ID NO: 5627 - protein, 487 aa, Arthrobacter agilis
  source 1..487: note = Related to LR131272.1
MVSDERGHHRGSDGAPGAPGRPALISRATAPTSAASRALARTPDPGTAGLALLLAEAFLEASAWQREELVRVGAELLGARRRWLGPLLRGVLGGYPRRPGGAPRELARWIEAQPVFVEAVSTARAAGRPIVPVRYLVGERDGPRTPEDPEASEAECRDLAWLARELGLPPGELEWFADTRHWNRRAGLLLQHYRYVWRSRPGRVPRLLEVPGIRLRTVQRRVLDRHLLPIPLHPAAHGFVPGRSARSGATLHTGSAVVITLDLVSFFARVTPGRVFGVFRQAGYPEATAHVLTGLCTHSVPEAVLRAMPDGGTAEERFGLTQALRAPHLPQGAPSSPALANLAVRRLDARLTGWAEAAGGVYTRYADDLAFSGPAELARRADAFVRGADRIVTAEGHAVNPRKTRVRGSSVRQSVTGIVVNARPNVARTEYEVLKAILHNCTLHGPESQSRGQGDFRSHLAGRIAWVSSLNALRGKKLRDAFERISW

SEQ ID NO: 5628 - protein, 326 aa, Arthrobacter sp.
  source 1..326: note = Related to LMLU01000001.1
MARELRLTPGDLDWFADTRQWNRRAVPVLQHYRYSWRQRPGRVPRLLEVPGPRLRVVQRRLLDRILAPLPLHPAAHGFVRGRSALTGAALHTGADVVISLDLTAFFAHVVPGRIFGALRQAGYPEATAHVLTGLTTHSVPDAVLRSMPDGGGPDERFALRRALRTAHLPQGAPSSPALANLAVRRLDARLTGYAEAAGGVYTRYADDLAFSGSADLARRADAFVRGVGRIVTAEGLAVNARKTRVRGSSVRQSVTGIVVNAHPNVARTEYDTLKAILHNCALHGPESQRRGRAEFSDHLAGRIAWVSALNASRGEKLRDAFERISW

SEQ ID NO: 5629 - protein, 427 aa, Arthrobacter sp.
  source 1..427: note = Related to LGIU01000097.1
MARLLARAFLDAPTWQREDLLAAGADLLGARRRWLGPLVRTVLSGHPRRPAGAPRELAAWIERAPAFEEAVARAAAAGTPLAPSHFLLEDAPADTHDLGELARELRLTPGELDWFADTRSWNQRTPQPALRHYRHAWQVRPGRTPRLLEIPGIRLRTVQRRVLDRILTPLPLHGAAHGFVPGRSARTHAAAHTGSDVVIALDLVSFFASVPPGRIFGVLRRAGYPEAVAHTLTGLCTHAVPERVLRAMPDGGTPEERSRLTQALRAPHLPQGAPSSPALANLSLRRLDARLEGWAEAAGATYTRYADDLAFSGPASLARRAHAFVRGVERIVTAEGHRVNPPKTRIRGASVRQQVTGVVVNRHPNVPRKEYDALKAILHNCRVHGPESQRRGRVRFLEHLAGRIAWVASLDPQRGRKLQDAFDAIGW

SEQ ID NO: 5630 - protein, 457 aa, Arthrobacter sp.
  source 1..457: note = Related to NZ_JAFMPX010000005.1
MTNDYKAAQVLAHTPHPTPAIVATALSHAFLAAPDWTVEALVSAGAEVLGARRRWLGPLVRAVVCAYHRKPADALRELAAHIGASEPFAAAVDKAHDQRKPLRLAAYAVAEPELREGTHPVPEVAGLEQLAAVLGVKLGELEWFADTRHLNRLASRSCLQHYRYMWRERPGRTPRLLEIPGLRLRSIQRKVLHGLLAPIPLHNAAHGFVPGRSASSGAALHTGADVLISMDLLSFFANVTAGKVFGALRQSGYPEAVAHRLTGLCTHIVPPRVISSMPPGGSAAERFALTQALRLPHLPQGAPTSPALANLALRRLDSRLQGWAEAAGAKYTRYADDLGFSGGPALARRTERFLRGAKHIAADEGHKLNERKTRVRPRSTRQQVTGIVVNQHLNAPRREFDALKAILHNCMLFGPESQNRADHTDFRAHLLGRITWMESLNSARSVRLRRDFDRISW

SEQ ID NO: 5631 - protein, 488 aa, Subtercola boreus
  source 1..488: note = Related to VFOO01000001.1
MLGATQSVFGVRHRWLPALVREVLVVFRTAPVDAPRELAAVIRRSAALTGALSRAGERGRPLAIAHYPVGEAEHPEPAPAAEPARASASASASAPEPARASASAAEPPPAPSAAEPAPALSGAEPAPAASALVPVPPPALALPLEPPLPPPMPLPRTLPALAALLDVTAGELDWLADTGGWNRRAREGPLHHYRYEWRTRPGRVPRLLEVPNERMRTAQRTLLAEVLGGLPLHDAAHGFVLGRSALTAAGLHTGTDVVITLDLVTFFTRVTAGRVYGTLRQEGVPERVALALTGIATNRVPPRVIGAMPPGGDPGERFALRQALATAHLPQGAPTSPMLANLAIRRLDSRLAGFALAADARYTRYADDLTFSGPLPLRRRADAFLRGVTRIVVDEGHTVNRRKTRVRPAATSQRVTGIVVNERTALPRAEFDRLKAILHNCAEHGAASQNRAGLEDFRAHLLGRISWARALNPVKAERLQREFDRIVW

SEQ ID NO: 5632 - protein, 532 aa, Subtercola boreus
  source 1..532: note = Related to NBXA01000026.1
MRWSADEVDGSRRDPPSPGPPRGTQTDSGTSPQASHRTSSGRTPAQTHRSSAGHRSTIRAPRPTAAAAVLARRPTASAGQVATALALALLAAADWTPEGMLAVLQSVFGRRHRFLPVLVREVRAVYRTAPQDAPRELAAVIRQSAALTDALDRARAAGRPLAIVHHPVSPGSEDHRESALPHAPAALSAPAPSTAAPPPRTLTELAALLDVTPGELDWLADTGGWNRRAPAGPLHHYRYEWRSRPGRVPRLLEVPTERMRAAQRILLHEVFALLPLHGAAHGFVPGRSALTAARLHTGRDVVIALDLVTFFTRVTAGRVYGALRQEGTPERIALALTGLATNRVPARVIGAMPPGGDPDERFALRQALAAAHLPQGAPTSPALANLAIRRVDSRLAGYAEAADAVYTRYADDLTFSGPVALGRRADAFIRGVTRIVEDEGHLVNRQKTRVRPAATSQRVTGIVVNEHTALPRVEFDRLKAILHNCAERGPESQNHDGHSDFRAHLLGRLSWARDLNPSKTERLEREFARIRW

SEQ ID NO: 5633 - protein, 532 aa, Subtercola sp.
  source 1..532: note = Related to PSTT01000018.1
PTPASLAAAGVPSPSSARAAPVSPGSGVLARRPVSTPDTVATALALALLAEGEWAGERMIARAATVFGVRHRWLPRLVRELLAVYRQAPEGSPRELAAVIRRTASFTAALEHATEVGRPLTIVSYPVAADGPPRLSPALSPPSAAVDGIPLVAASNPRDPRHGTAPAALATAAGPAALATATGPAALTPAAPPRGLAGLRTLADLAELLGVTPGELDWLADVGAWNRRASPGPLHHYRYEWRARPGRVPRLLEVPSARMRSAQRTLLHDVFALLPLNDAAHGFVPGRSAVTAARLHTGAAVVVTLDLTTFFATVTAGRIFGALRQAGAGERVALALTGIATNRVPPRVITAMPPGGDPDERAALRRALAAAHLPQGGPSSPALANLALRRLDSRLAGYAGAAGARYTRYADDLTFSGGTDLRRRADAFVVAVRRIVEEENHTVNLRKTRVRPAATSQRVTGIVVNEHTALPRAEFDRLKAILHNCAERGPASENRAGHDDFRAHLLGRLTWARSLNPAKAERLQREFDRIAW

SEQ ID NO: 5634 - protein, 532 aa, Subtercola boreus
  source 1..532: note = Related to NZ_NBXE01000029.1
MRWSADEVDGSDADPSSPGLPRGTQIDSGTTSQAPLRTPSGRAPALQHRSSAGHRTPPPPTPATPASAVLARRPQPSAEAVASALALVLLAPPAAPDWTPTGMLSALQGVFGARHRWLPALVREVRSVYRTPPQDAPRELAAIIRHSQPFLDAVGRAEARGRPLAVLRYPITAEAPAQPPVAPGPTPATPGPIPATPAALAALLGVTPGELDWLADVRAYNRRARPGALHLYRYEWRLRPGRCPRLLEVPTERMRRVQRTLLHEVLALLPVHHAAHGFVTGRSALTGARVHSGSAVVISLDLTTFFARVTAAGVYGSLRRAGFSEAVATTITGLTTNRVPPRVISAMPPGGGPDERFALRQALATAHLPQGAPTSPALANGAIRRLDARLEGYAAAVGARYTRYADDLVFSGPVALQRRAEAFVRGVTRLVDDEGHEVNPRKSRVSPASTSQRVTGIVVNTGSSLPREEFDRLKALLHNCATLGPASQNRAGVPDFRAHLLGRISYSSSVNPLKTRRLIREFNSIDWGVPRE

SEQ ID NO: 5635 - protein, 561 aa, Mycetocola lacteus
  source 1..561: note = Related to RCUY01000005.1
MPADASRRTAHGRLNRSIAPPRCRRSGSFSRRIVMGRPAGHTPAPSLAAVADSLAAAFLAAAHPKPARDRDPAQGSDPTGDREAASGPAPTQNQDAPQGQDSTQGTDLTGDRDPAFTIAWTRSVLIAAGADVLGARRRWLPGLVSAVLAAYPRAPFDRPRELGRWIAQSAELTAAAEQAAAAGRHLVLVRHALYEIPAAHGAGAAGERPASSGAEVLAREPASRRPRTPADLARLLGLDAGELDWFADLRGWNRLAPGTKLHHYRYEWRSRPGRVPRLLEVPGQRLMYLQRQLIAEVYTDLPVHPAAHGFVSGRSAITGAAVHAGSHVVIGMDLTTFFARVTRGQIHAGLCRQGWGEALVPILAGLGTHAVPPAVIRAMPPGGDPGERQALAAALRIPHLPQGAPTSPLLANLAMHRLDERLTGWANAVGARYTRYADDLTFSGDTRLAARSDAFIRGVEAIVTDSGQRINPRKTRVRPRGTSQRVTGIVVNEHPAMDRHAYDRLRAILHNCARTGPEAQNRDRHPHFRLHLLGRINWAIALTPERAPGLWRLWDAIEWTD

SEQ ID NO: 5636 - protein, 478 aa, Mycetocola tolaasinivorans
  source 1..478: note = Related to NZ_RCUX01000009.1
MTPNPGHTPAPSIRAVADSLASAFLDAARVPLDPGSGGEVLGHGAAAREHGWNRPVLIAAGASVLGARRRWLSPLVRAVLDAYPRAPFDRPRELAAWIEASAVLGDACAAATARGQHLVLVRHAVYEPVGAASPLPATPAELAGLLGLDIGELAWFADQRGWNRRAGSARLQHYRYEWRARPGRVPRLLEVPGQRLMRLQRQLVHEVLTALPIHPAAHGFVPGRSARTGAAVHAGSHVVIGMDLTTFFARVGRSEITAALRRAGWGEAVAPVLAALATHAVPEAVIRAMPPGGNPEERFALAQALRLPHLPQGAPTSPMLANLAMRRLDDRLLGWAAAVGARYTRYADDLTFSGDQRLAARSDAFIRGVSGIVADCGQRVNERKTRVRPRGTSQRVTGIVVNAHPAVDRRSYDALRAPLHNCARTGPAAQNRENLPYFREHLRGRIDWVVSLTPKREPALRRLWEAIEWEEPGSAPLR

SEQ ID NO: 5637 - protein, 441 aa, Mycetocola spongiae
  source 1..441: note = Related to NZ_CP080203.1
MISSALAHGFLAASTEADWARAPLIAAGSAVLGARRRWLPALVDDVLRAFPRPPLRGLRELREWIASAPGPIAAVEAAAERGRPLRLARHPVYHEPGAAPGGMPANPAELAALCSIAPGQLEWFADTRLWNRRLSGDQHRLEHYRYRWLERPGRVPRLLEIPGERLRAVQRSVLDCVLAELPVHPAAHGFVPGRDARSGAAAHTGRDVVIGLDLRTFFARVGYPQILRVLRAAGHTEAVATLIAGLSTHAVPPRILREMPPGGSPEERFALRRALAARHLPQGAPTSPALANLVSAGLDRRLAGWAQKFGATYTRYADDLTFSGDRALRSRATRFIRGVDLIIAEEGHALNPRKTRVQPAAISQRVTGIVVNRHPNLPRREYDLLRAILHNCALHGPASQNRAGHPDFRAHLRGRIGWAAALNPDREAALTAAFNRIDWDR

SEQ ID NO: 5638 - protein, 501 aa, Arthrobacter sp.
  source 1..501: note = Related to CP007595.1
MPDSCTAGASLRSAQQRTRTDSQVIGETIAALTTQHGPEHAEPTTASVTAASATLKRTPRPSSSTIASTLAQAFLGSPDWSKPGLVDAGAHVLGARRRWLGPLAAHVLRGYPRPPVDAPRELAAVVLQCEPFLDALAKAAQQRKPIRLANYVLASAVARENLVQGAPRIDTLADLAALLHVNCGELEWFADTKHWNRRAGGTLAHYRYEWRTRPGRLPRLLEIPAPRLRSIQRTVLRELLYPLELHDAAHGFVPGRSAVTGAAQHTGRDVVVNLDLVSFFAKVTAGRVFGTLRQSGFTEAVAHRLTGIATHVVPPRVLSLMPPGGDPAERFALRQALSLPHLPQGAPTSPMLANLSLRRLDARLAGLVEKFDGGYTRYADDLAFSGGRDMARRADAFVRAATVIVKDEGHSVNRLKTRVRPAGVRQSVTNVVVNERTNVPRVDFDRLKATLHNCRVHGPESQNWNGHPDFRGHLLGRISWVAALNPARGARLRQDFDRIQW

SEQ ID NO: 5639 - protein, 454 aa, Arthrobacter alpinus
  source 1..454: note = Related to CP013200.1
MTRAAATLKRTPRPSSSAIAQTLAQAFLASPQWTKAELVAAGAHALGARRRWLGPLAAQVVRGYPRPPLDAPRELGAMIGSCDPFIEATAKALQQRKPILIANYVLAPSVARENRHAGVPQIGTLGELAERLKLSGGELEWFADPKHWNRTAARKLQHYRYEWRTRPGRLPRLLEIPAPRLRALQRTVLRELLYPLELHDAAHGFVPGRSAVTGAAHHMGRDVVLNLDLVTFFAKVTAGRVYGTLRQAGYTEAVSHRLVGIATHVVPPRVLAQMPSGGDATQRFALRQSLSVPHLPQGAPTSPTLANLSLRRLDSRLAGLAEKFDGGYTRYADDLAFSGGQDLAQHADAFLRAATLIIEDQEHSVNQQKTRVRRSGVRQMVTSVVVNERTNVPRPDFDRLKAIIHNCRMHGPQSQNREARSDFRAHLLGRISWVAVLNPARGAKLLQDFHRIQW

SEQ ID NO: 5640 - protein, 504 aa, Arthrobacter stackebrandtii
  source 1..504: note = Related to NZ_JAGIOI010000001.1
MPDPCTAGAALRSAQLRTRTDSRVIGEAIAAMTAQPRARAAGRADPAVAPVTAASATLKRTPRPSPTAIAATLAQAFLSSPDWSKPALMESGAQVLGARRRWLGPLAAQVLRSHPRPPVDAPRELAALVLVSEPFVEALAKSVQQRKPIHLARYVLAAGAARDSQVRGAPRIDTVGALAARLGLGVGELDWFADPRHWNRRADARLQHYRYRWLVRPGRVPRLLEIPRPRLRFLQRAVLRELLHPLPLHDAAHGFVPGRSAVTGAAQHTGRAVVVNLDLASFFAHVTAGRVFGVLRQAGFTEAVAHQLTGLCTHVVPPRILVQMPPGGDPADRLALRQALSLPHLPQGAPTSPTLANLSLRRLDSRLAGLAEKFDGGYTRYADDLAFSGGRDMLRRADALVRAAGTIVEDEGHRLNRLKSRVRPAGTRQAVTSVVVNERTNLARDDFDRLKAIIHNCRVHGPESQNRDSVPEFRSHLLGRISWLSSLNPARGARLRQAFDLITW

SEQ ID NO: 5641 - protein, 533 aa, Arthrobacter psychrolactophilus
  source 1..533: note = Related to NZ_QJVC01000003.1
MVVSGDTVVSVSMGACDGFSDEAGSVFRRPSLPGVTPGHAVLPDPCTSDASLRSAQLGNRTDSQVIGETIAVLNPNIAHITPASATLKRTPRPSTLAVTETLAQAFLAAPQWNKAALMAAGAHVLGARRRWLGPLVSDVLRGYLRAPVDAPRELAARIHHAEPFVEALAKAAQQRKPIRLAHYVLAPAVARENAPRQTPRINNLGDLAHLLELTPGELEWFADTRHWNRMATRKLQHYRYEWRVRPGRLPRLLEVPAPRLRAIQRIILHKLLYLIELHDAAHGFVPGRSAVTGAAQHTGQEVVMNLDLVSFFAKVTAGKVFGALRKAGFPEAVAHRLAGICTHRVPPRILALMPPGGDPAERFALRQALSLPHLPQGSPTSPMLANLSVRRLDSRLAGLSEKFDGVYTRYADDLAFSGGKDLARRADAFVAAVTAIVRDDGHRINRLKTRVRPASVRQSVTSVVVNQRTNPARSDVDRLKAILHNCRTRGPESQNWDGHPDFRGHLLGRISWVATLNPERGAKLLREFHRIQW

SEQ ID NO: 5642 - protein, 461 aa, Paeniglutamicibacter antarcticus
  source 1..461: note = Related to NZ_CZJT01000056.1
MTGSQKPVTPASSVLSRTPRPTDSAVAATLAQAFLNSSRWTSAGLIEAGAQVLGARRRWLGPVVTLVLRSYPRPPVDAPRELGAMILGCEPFAQARAKAAVQRKPLRLAHYVLEPMVARENGQPRVPRLDTLADLAAMLELTGGELEWFADPQQWNRLAVPALQHYRYVWRRRPGRLPRLLEIPAPRLRGIQRTVLRDLLYPLEIHDAAHGFVPGRSAVTGATRHTGQDLVLTLDLVTFFARVTAGKVFGVLRRAGYTEAVAHRLVGLCTHVVPPRVLSAMPPGGSPTERFALRQALSQPHLPQGAPSSPVLANLSLRRLDARLTGLADSFEAVYTRYADDLAFSGGKKLARRSAAFIRFATVTIGEEGHGVNQPKSRLRTAGERQQVTSVVVNERTNAVRSEFDRLKATLHNCWTHGPDSQNRDRHADFRAHLLGRISWMASLNSDRGARLLRDFQRIQW

SEQ ID NO: 5643 - protein, 522 aa, Arthrobacter alpinus
  source 1..522: note = Related to NZ_CP013745.1
MAPCDGFFDEAGSGFWRASLPGATPGYAVLPDRSTSGAALRSAQLGTRTERQVIEETIAAMTTSSIPVTPASATLKRKPRPSTSAIAATLAQAFLNSPQWSKPEITVAGAQVLGARRRWLGPLAAHVLLSYPRPPVDAPRELTATILASEPFIEAVAKAASQYKPILLASYALAPTTARENRQARVPRIDTLAALAEKLHLTLGELEWFSDPQHWNRTAARKLQHYRYVWRSRPGRLPRLLEIPGLRLRNIQRTVLTELLYPLELHDAAHGFVPGRSVVTGAARHTGKEVVVNLDLTTFFAKVTAGRVFGTLRQAGFTESVAHRLTGICTHVVPPRILAQMPPGGDADQRFALRRALSQPHLPQGAPSSPVLANLALRKLDSRLAGLADTFDAGYTRYADDLTFSGGRELARRVNAFIRTATGIIENEGHGVNKLKSRVRPAAVRQVVTSVVVNQRTNINRLDFDRLKATLHNCRRHGPESQNREAHADFRAQLLGRISWVTALNPDRGAKLLRDFHLIAWE

SEQ ID NO: 5644 - protein, 392 aa, Paeniglutamicibacter terrestris
  source 1..392: note = Related to NZ_JAAWVT010000016.1
MYPRPPIDAPRELAATIFLSDPFTEAVAKAAHQRKPLRVANYALLPATARENRQPKIPRLDTLASLAGLLELSYGELEWFSDPQHWNRKAERKLQHYRYEWRQRPGRLPRLLEIPAPRLRNIQRTVLRELLYPIELHDAAHGFVPGRSAGTGAAQHTGQEVVINLDLVTFFAKVPAGRVFGTLRQAGFTESVAHRLTGICTHSVPPRVLSLMPPGGNLTERFALRQALARPHLPQGAPTSPMVANLSLRRLDSRLSGLAEKFDARYTRYADDLAFSGGNELARRTSAFIRTAISIIEAEGHEANRLKTRVRPASVRQLVTSVVVNKHTNVTRSDFDRLKAILHNCLSFGPESQNREAHADFRGYLLGHVSWVAALNPDRGAKLLHDFHRIQW

SEQ ID NO: 5645 - protein, 471 aa, Arthrobacter cryoconiti
  source 1..471: note = Related to NZ_JAJJBU010000018.1
MTTPTPGAAVLARTPNPSPRNVSTALAYAFLAAPTWSEAELAAATTYVVGKRGGTRSAKWHTQLASSVLRAYPRPPLREPRQLAVFIAGAKPFYLAVDRATRLHATLTIAHYVLPPTNVAELKSPLEERSLIPQTLAELAGVLDLTVGELDWFADPLQWNRTARNKRLVHYRHQWRLRPGRTPRLLEIPAPRLREIQRSVLRELLSPLPLHDAAHGFTPGRSPATNAAHHTGRNVVVNVDLTTFFARVTAGKVFGILRQAGFPETVAHRLAGLCTHTVPLGVIAEMPQGGGASGRFAFRQALATPHLPQGAPTSPALANLSLRRLDSRLAGLAASFDADYTRYADDLAFSGGPGFSHRSLAFVSLVHKIVEQEGHTVNDAKTRVRGSGVQQRVTGVVVNAHTNVSRAEFDRLKAILHNCAVHGPAGQNRCGPQGSEHSDFRGHLQGRIAWVRHLNPARAAKLERIFAAIIW

SEQ ID NO: 5646 - protein, 456 aa, Arthrobacter silviterrae
  source 1..456: note = Related to NZ_JAAKZI010000011.1
MKPSQPTAAASVLVRIPHPSANTVATALAHAFLAAGDWSKPALTAAGADILGARRRWLGPLASHVLRNYHRPPADAPRELAAVVLGCPAFGEALAKAATQRRPIKLAHLAVAPAVAQAARVPRLDTVADLAGMLALTPGELEWFADPRHWNRTAGPRLQHYCYQWRSRPGRVPRLLEIPQPRLRTLQRTILRELLAPIPLHDAAHGFVPGRSAVSGAAMHTGADVVVSLDLAAFFAHVSPGKVFGVLRQAGFTEAVAHRLTGLCTHAVPVGVLAEMPPGGDPASRFALRQALAVAHLPQGAPTSPMLANLALRRLDSRLSGWAGAFDAVYSRYADDLAFSGGAELARRADAFIRGAGRIVADEGHSLNGLKTRVHKAGVRQTVTGVVVNERTNIARAEFDQLKAVVHNCAAHGPEGQNRGGHPDFRAHLLGRIAWVSSVHPARGARLRAAFDEISW

SEQ ID NO: 5647 - protein, 459 aa, Arthrobacter sp.
  source 1..459: note = Related to NZ_CP029642.1
MIPAGQAVAPAAAVLARSSRPTPDALASALSHAFLAADDWSKPALMTAGTGILGARRRWLGPLATHVLRSYHRPPTDAPRELAAVVLGSEAFGEALEKAARQRRPITLVRYAAEPAVARAARVPRLDTLAELAEVLDLSVGELEWFSDPGQWNRTASSRRLQHYRYQWRSRPGRVPRLLEIPLPRLRGLQRTVLRELLSPIPLHDAAHGFVSGRSAVSGAALHAGTEVVVNLDLAAFFAHVSPGRVYGVLRQAGFTEAVAHRLTGLCTHAVPVGVIAEMPPGGEPGDRFALRKALATAHLPQGAPTAPMLANLALRRLDSRLSGWAGAFDAVYTRYADDLAFSGGTELSRRADAFVRGAARIVADEGHSLNRLKTRVHRAGVRQSVTGVVVNTRTNVARPEFDRLKAVLHNCLLLGPEGQNRDGHDDFRAHLLGRIAWVTSVNPDRGAKLRAVFDAISW

SEQ ID NO: 5648 - protein, 476 aa, Arthrobacter sp.
  source 1..476: note = Related to NZ_CP012479.1
MKHTPDSTRPGPLADSTPGPTPASAVLGRTPRPSPKTVATALAHAFLAAESWSKPDLVEAGATVLGARRRWLGPLAGHVLASYRRPPADAPRELTAVVLGSAPFAEAVAKADLQCKPIRIARYAVPPAGMGEAAGVPAGVPRLDTLAELAAILGVDAGRLEWFADPKHWNRTTGNPRLQHYRYQWRTRQGRVPRLLEIPHPRLRAVQRTVLRELLAGIPLHASAHGFVPGRSAVSGAARHTGRDVVINLDLAAFFAHVTPGKVYGVLRAAGYPESVAHRLTGLCTHAVPVGVIAEMPPGGSAEDRFALRQALRKAHLPQGAPTSPALANLTLRRLDSRLQGWAGGFDAVYTRYADDLAFSGGPVLARRADAFLKGAARIVADEGHTLNATKTRVHKAGVRQSVTGVVVNRHTNVSRRDFDRLKAVLHNCVVHGPDGQNRDGHPDFRAQLRGRIAWVASVNPGRGARLLADFTLIDW

SEQ ID NO: 5649 - protein, 479 aa, Arthrobacter glacialis
  source 1..479: note = Related to NZ_PPXB01000002.1
MGAPLRSAKRGAQTDRLVIIEAVAAMIPTLSAAVLARNPRPTPQAIATALAHAFLAAEDWSKPSLISAAASVLGARRRWLGPLAEHILGLYHRRPADAPREVVAVVLHSEAFETAVEKAAKARKPIIVAHYVVQPAVAREARVPHLDTLAGLAGLLGLSIGELEWFADPRQWNRTATSKRLQHYRYQWRSRPGKVPRLLEIPQPRLRALQRTVLHELLAPIPLHNAAHGFVPGRSAVSGARAHTGAEVVVNLDLAAFFTHVTPGKVFGVLRQAGFTEAVAHRLTGLCTHAVPVGVLAEMPPGGDPTDRFALRKALALPHLPQGAPTSPMLANLALRRLDSRLSGWAGAFDACYTRYADDLAFSGGSELARRADAFVRGAARIVADEGHSLNRLKTRVHRAGVRQSVTGVVVNQHTNVTRGDYDALKAVLHNCVSLGPEGQNRDGQANFRAHLMGRVAWVSSVNPGRGATLRALFERIVW

SEQ ID NO: 5650 - protein, 460 aa, Arthrobacter sp.
  source 1..460: note = Related to NZ_KI519454.1
MAVATTGAATLARTPRTSPADLATALAHAFLGAESWSKAALVASAAGSLGARRRWLPPLAGHVLAAYHRPPADAPRELAAVVGQCDAFREALAKSARQRKPIRLAHLVPVAGKARDSATDIPRIDTLAELAGRLELSTGELEWFADPGQWNRSARTPRLQHYRYEWRSRPGRVPRLLEIPGTRLRAIQRRILRDLLQPIPLHDAAHGFVPGRSAITGAARHTGNEVVINLDLSTFFARVTPGKIFGVLRQAGYAEAVAHRLTGLCTHAVPARVLAAMPAGGDPGERFAVRQALARAHLPQGAPTSPLLANLALRRLDSRLAGWAAAVGASYTRYADDLAFSGGPDLARGADAFIRGAARIVADEGHDLNRRKTRVRGAATRQSVTGVVVNAHTNISRGDYDRIKAILHHCVLDGPGEQNRSGHPDFQAYLRGRIAWIESLNAARGAQLRAEFDRIQWQTA

SEQ ID NO: 5651 - protein, 454 aa, Arthrobacter sp.
  source 1..454: note = Related to NZ_PJIO01000003.1
MSNNGSAVLARTPHALPMALSTALADAFLAADQWTAPALVQAGNHTIGSQRRWIPTLAAHIIATYPRRPLDAPRELAAVVRRSKPFARALARASRTGKPLPLANYCLDPASARESPLGIPVVDNLGVLSQHLGITPGELEWFADPKHFNRSAAPILQHYRYEWHTRPGRVPRLLEVPAPRLRTLQRTILANLLSPIPLHSAAHGFVPGRSAVSGAAAHAGNLVVINLDLATFFAKVSAGRVFGVLRQAGYAEAVAHRITGLCTHRVPARILSRMPAGGEPTDRFALRQALALPHLPQGAPTSPMLANLAVRRMDSRLSGWAGKFDAGYTRYADDLAFSAGTTLARGSDDFIAGVSRIVTDEGHSLNPRKTRVRGASLRQTVTGVVVNEHPNVTRADFDRLKAILHNCAVLGPELANRQAHADFRSHLLGRIAWVASVNPRRGAQLRADFARIVW

SEQ ID NO: 5652 - protein, 447 aa, Arthrobacter alpinus
  source 1..447: note = Related to CP012677.1
MLARTPHPSPEAVSTALADAFLAAEQWNAEALARAGNHTCGSPRRWITTLAAHIVASYPRPPVDAPRELAAVVRQSKPFTRALARASRTGKPLPLKHYTLDPAVARHSPLDVPDIGNLSELARLLGITPGELEWFADPKHLNRNAAPILAHYRYVWHTRPGRVPRLLEVPAPRLRALQRVVLSQLLCPIPPHPAAHGFVPGRSAVTGAGAHTGKLVVVNLDLATFFAKVTAGRVFGVMRQAGYAEAVAHRLTGLCTHRVPARVLSQMPPGGDPADRFALRQALALPHLPQGAPTSPMLANLAVRRMDSRLAGWARRFDAGYTRYADDLAFSGGRDLARGADAFIAGVGRIVADEGHRLNHRKTRVRGASARQSVTGVVVNAHPNVRRTDIDRLKAILHNCATYGPSSQNLEGHAEFQAQLLGRIAWVAGVNPHRGAQLRAVYRRISW

SEQ ID NO: 5653 - protein, 489 aa, unidentified
  source 1..489: note = Related to JABBNV010000050.1; note = Acidobacteria bacterium
MSTNSTATRRATSSGLPTPSPEGLATALAHSFLAAKSWTAQDLKQSAADILGARRRWLGPLVRGTLAAYHRRPDGASRELASFIATSEPFFEAVSRARKQRKPIRLAHYAILGPLPPRHAIANQPQKTGKIPSVSGLEGLATMLGLEMGELEWFADIGGWNRRATAGSGTAGFTRETGRRYRHSKFQHYSYIWRSREGRAPRLLEAPLPRLKTIQRAVLDTFLAPIPLHPAAHGFVPGRSVVTGAAKHTGSAVIISADLSTFFARVTAGKIYDALRQSGYSEAVAHRLTGICTNAIPASVLNAVPPGGAPEERHALRQALATPHLPQGAPSSPALANIAIRRLDSRLAGWASKMNATYTRYADDLTFSGGPELARRADAFMAGVGRIVKDQGHTLNHRKTRVRRAGVRQTVTGVVVNQHVNTTRRSYDILKATLHNCVRYGPESQNPDSQTSADNAHFRERLAGQIAWVASVNPARGAKLRAKFQQISW

SEQ ID NO: 5654 - protein, 461 aa, Arthrobacter sp.
  source 1..461: note = Related to NZ_JADNYM010000009.1
MMHAPRRIQSEGTRVLARTPHPTTSGVATAVAFAFLAAGEWTKAGLVQSGTELLGVRRRWLPSLAAQVLGWYPRPPVDAVRELAAVVEGCPAFINAVDRAARQRVPIRIARYVLAPGQARQTPFPIPRISSAGDLADLLELTSGELDWFADVKHWNGRAEPRLQHYRYVWRTRSGRTPRLLEIPAPRLRSLQRTVLRSILAPVPLHDAAHGFVSGRSAVTGARLHTGAQMVIALDLTAFFARVTAGKVFGILRQAGYSESVAHLLTGLCSHVVPPRVLSRMPPGGAVDERFALRQALSLPHLPQGAPTSPMLANLAVRRLDSRLSGWASVAGAVYTRYADDLTFSGGKELAGRADAFVRGAARIVGEEGHALNPRKSRVRAAGVRQVVTGIVVNERTNVARSEFDRLKAVLHNCVVHGPAGQNRDGHGDFRAHLLGRIAWLEALNPGRGARLRADFARIRW

SEQ ID NO: 5655 - protein, 451 aa, Arthrobacter pigmenti
  source 1..451: note = Related to NZ_JAATJL010000001.1
MTTTTPGARVLARTPHPSPVAIATALAHAFLATDDWSKNGLLAAGAEVLGARRRWLGPVAAEVLRFYRQPPVDAPRELAAVVVLNDAFRAAVARAKKNGVPIRIAHFAPTPVRAPRGLNDLSDLARLLRLPAGELDWFADTRHWNRRAHSKRLQHYRYEWRSRPGRMPRLLEVPRPRLRELQRTVHREILAGLRVHSAAHGFVSGRSAATGARFHEGARVVINLDLATFFTRVRAGRVYGIFRRAGFAEPVAHALTGLCTHSVPSGIARNAPAGGTAGEWFELRRALVLPHLPQGAPSSPALANLAVRRLDFRLEGWATAAGAVYTRYADDLAFSGGDQLARRADAFVRGATRIIEAEGHLVNAHKTRVRGSSVRQTVTGIVVNERANASRPEYERLKAILHNCVRHGPESQNRSGHHDFRAHLLGRVAWMELLNPARGLKLRESFDRIEW

SEQ ID NO: 5656 - protein, 402 aa, Arthrobacter sp.
  source 1..402: note = Related to NZ_KI915009.1
RWLPRVVAGVLGFYHRPPRDAHRELAAVIELSDTFRAAVERSVEQRRPIRIAHYVVGPGHGAKHAVLPLNDLADLTRLLGLTPDQLDWFSDTRHWNRRASSGSLQHYRYEWRARAGRVPRLLEVPRPRLREVQRKVLSLILSRLAVHDAAHGFVPGRSAATGARPHEGAKVLINLDLSTFFTRVTAGRVYGVLRQEGFPEAVAHTITGLCTHSVPPRLVTAAPSGGRLDERFVLRQALAVPHLPQGAPSSPMLANLAVRRLDRRLTGWAEAAGAVYTRYADDLAFSGGDDLTRRAGAFIRGVRRIVEDEGHFVNARKTRVSGWSVRQSVTGIVVNEHTNVTRSEFDRLKAVLHNCVLHGPGSQNRSGHHDFRSHLLGRIAWVAMLNPARGAKLRETFDRILW

SEQ ID NO: 5657 - protein, 462 aa, Frigoribacterium endophyticum
  source 1..462: note = Related to NZ_JAAOYV010000002.1
MLAAPAWTEAALVAACAAALGPAAELSTTFHHDADPGDGGLRDDGSRDDGPHDDGPPHPWLPGLAHEALRAFPRAPHDEPRLLAEVLHTSGALGRGRARAAAQGASLRIVRVAVVTTPTRAADPRLRRLGSVADLAALLHLTVGELDWFADVRHWNRRHASGPLQHHRYEWRTRPGRTPRLLEVPGHRLRDLQRVALDEVLAAVPLHDAAHGFVPGRSAVTGAAVHTGAEVVVALDLRSFFARVGAGRVYGALRREGLPEAVAHVLTGLTTTSVPPAVLSAMPPGGDPSERAALRRALALPHLAQGAPTSPALANVASRRLDSRLAGWAAAAGARYTRYADDLTFSGGPGVAARSDAFVRGVGRVVADEGHELNPHKTRVRGAATRQTVTGIVVNEHVTVTRTSYDALRALLHNAERTGLEAQNRAGVPEFRAHLEGRIGWVEQLHPARGARLRELLARVPR

SEQ ID NO: 5658 - protein, 457 aa, Frigoribacterium sp.
  source 1..457: note = Related to RKIE01000002.1
MTGAPDAVARGLALALLAVADADWTEPGLVTAASDALGLEPGDVDARWLPGLAHEVLRRFPRPPRDEARLLAVVVDRSGALGRGRERARTERRALRVVHPGVVAPGRTETDDAGAGAPDGRPELRGVGDLAALLGLTIGELEWFADTRLWNRRHPSGPLQHHRYEWRARPGRTPRLLEVPGFRLRDLQRVVLDRVLAGAPVHDAAHGFVPGRSAVTGAAVHQGSEVVVALDLRSFFARVTATQAYGALRREGLPEPVAHLLVGLCTNAVPAAVLSAMPPGGELDERVALRRALAVPHLAQGAPTSPALANLAMRRLDSRLAGWAAAAGARYTRYADDLSFSGGQEVAARADAFVRGVGRIVADEGHELNPHKTRVRGAATRQTVTGIVVNSGTNVTRASYDRLRAMLHNAASTGLEAQDRGGEPDFRAHVLGRIGWVEQLNPARGARLRELLARVPR

SEQ ID NO: 5659 - protein, 456 aa, Frigoribacterium sp.
  source 1..456: note = Related to NZ_LMQR01000001.1
MSVRSPASAAGAHEPDPGPDAVATVLADAFLGAEWSVRGLAAAAGEAIDGSARFWRPLARDLVHALPRAPLDDPRTLAALIRRDPAFTEAVAEARRRGRPLRNVHHVPVTQEARSADPRLLRLGTVADVARLLHLTVGELDWFADPGRWHRRVDGGPLQHHRYEWRSRPGRTPRLLEVPGFRLRDLQRVVLDEVLAAVPLHDAAHGFVPGRSAVTGARRHVGREVVIALDLTSFFARVTAGQVFGSLRREGLPDAVAHVLTGLCTTSVPPGVLSRMPPGGSPEQRFALRHALAVAHLAQGAPTSPSLANVAVRRLDSRLDGYARAAGATYTRYADDLAFSGDGTLAARADAFVRGVGRIVGDEGHLLNQAKTRVRGAATRQVVTGVVVNQGTNTVRSEYDQLRAVLHNAATTGLEAQNRAGHPDFAAQLWGRIGWVEQLHPGRGARLRAAFARVPR

SEQ ID NO: 5660 - protein, 458 aa, Frondihabitans sp.
  source 1..458: note = Related to NZ_CP014619.1
MDESSGSRRSHLVTRPGPPPAPDVATALAGAFLAAEEWSAPSLREAAAACLGSRRRFVGPVVTAVLTAHLRAPRDAPRELAALILRVDGFEDTVRRASRRRPVRIAQLSPTTTVSRVADERRPRVDTVADLARLLGTDVGHLDWFADTKLWNRRAPAGPLHHYRYEWRQRPGRVPRLLEVPGLRLREIQRTVLDELLAPLPLHDAAHGFVAGRGARSGAALHTGREVVIALDLVSFFARVDGRRIYSVLRQAGLPEPVAHSATGLVTHAVPPAVLSAMPPGGTSDERFALRRALAVPHLPQGAPTSPMLANLAVRRLDSRLGGYARAAGATYTRYADDLAFSGDAALAGRVDAFVRGVGRIVSDEGHRLNHAKTRVRRRGVRQTVTGIVVNESTTIGRREYDRLRAILHNCAAYGPSSQNRAGHADFRAHLLGRIGWVESLDPDRGRRLRAEFARIAW

SEQ ID NO: 5661 - protein, 478 aa, Glaciihabitans tibetensis
  source 1..478: note = Related to NZ_PVTL01000004.1
MNARDLDAYTRTVATALAHAFLMADTWMKPALLDAGASVLGARRRWLGPLAREILATYRSRPTDAPRELVAVIRSAPSFVSAIEVSVERQAAIRIIHHPTSPTEARIRVDQVSAELALASLANAHTASANPASAHTPSAHTVTRLDSLVDLAALLDLTQGELDWFADVRLWNRRARPGRLHHYRYEWRQRPGRTPRLLEVPGQRLRAIQRTVLDEVLSPIPLHPAAHGFVAARSAVTGAAVHTGAAVVINLDLTSFFARVTAGRIYGVLRQAGLPEAVAHTLVGLAVHAVPPHILSQMPPGGSPGERFALRKVLAVPHLPQGAATSPALANLAVRRLDSRLAGWADAAGGQYTRYADDLAFSGGPELARRADTAIRGITRIVEDEGHTINPRKTRVRAAIVRQVVTGVVVNKRTNTPRREFDQLRSVLHNAATQGPDSQNRGSHSDFRAHLLGRISWMESVNPSRGPRLRAAFARIEW

SEQ ID NO: 5662 - protein, 442 aa, Agreia pratensis
  source 1..442: note = Related to JADKRN010000004.1
MRQRSVAVGLSHAMLACPEWAFDALVDACGRALGVRPGWLWPLVDGVLGAYRRPPLDAHRELARWIEASDDFQSAFVAAREAGRVITLARLETVAASMAPTSLAVPSIAGLGELADFLEVSPSQLDWLTDTVHWNRRTPRGRLHHYGYDWLVRPGRTPRLLEVPTPRMRRVQRLVLREILGRLPLNDAAHGFVPGRSAATGAAAHVGAQTVITLDLRTFFARVPARRVFSVFRQAGYPEGVAHALTGLCTHAVPPWVGARMPAGGSSENRAALRRAISESHLPQGSPTSPALSNLAVRRLDSRLSGWAEASDATYTRYADDLAFSGVRLRGRAAVAFIAGVERIVRDEGHVLNESKTRIAGRGASQRVTGLVVNDVVAVDRAYFNELKAILHNCAAHGPRGQNRAGHPDFRAHLAGRLAWVESVSPSRGARLRRDWDRIDWS

SEQ ID NO: 5663 - protein, 442 aa, Agreia pratensis
  source 1..442: note = Related to NZ_FXAY01000002.1
MRQRSVAVGLSHAMLACPEWAFDALVDACGRALGVRPGWLWPLVDGVLGAYRRPPLDAHRELALWIEASDDFQSAFVAAREAGRVITLARLETVAASMAPTSLAVPSIAGLGELADFLEVLPSQLDWLTDTVHWNRRTPRGRLHHYGYDWLVRPGRTPRLLEVPTPRMRRVQRLVLREILGRLPLNDAAHGFVPGRSAATGAAAHVGAQTVITLDLRTFFARVPARRVFSVFRQAGYPEGVAHALTGLCTHAVPPWVGARMPAGGSSENRAALRRAISASHLPQGSPTSPALSNLAVRRLDSRLSGWAAASGATYTRYADDLAFSGDGMRGRAAAAFIAGAERIVRDEGHLLNGSKTSIAGRGARQTVTGLVVNDSVAVDRPYFDELKAILHNCAAHGPRSQNRAGHPDFRAHLLGRLAWVESVSPSRGERLRREFDRIDWS

SEQ ID NO: 5664 - protein, 537 aa, Agreia bicolorata
  source 1..537: note = Related to FUYG01000003.1
MAASIREEAAISRTSVPEENNGARRRRRLPLAWGNATDCGRGGWSRQTNTLSGVTPGYNSQPERTTAGTTPRFARSRARTDRSVARGSSHPFQGSVKEHSIAVGLSHAMLAAPEWAFDPLVDACGRALGARPGWLWPLVDGILDVYRRPPRDAHRELARWIEASTAFRGAIEAAREAGRSIALAHLETIPASMGPTPLTVPSIAGLGELADFLGVSPGQLDWLTDTAHFNRRTPRGRLHHYSYDWLVRPGRAPRLLEVPTPRMRRVQRRVLREILTALPLNDAAHGFVPGRSAVTGAAAHAGAETVITLDLQNFFARVPAQRVYSVFRQAGYPEAVAHALTGLCTHAVPPWVGARMPVGGSLEDRLALKQAISGSHLPQGSPTSPALSNLSVRRVDTRLNGWAAASGAAYTRYADDLAFSGEGLRGRAAATFIAGVARIVLDEGHLLNESKTRISGRGARQSVTGLVVNDGVAVDRLYFDELKAILHNCAVHGPHGQNRAQHADFRAHLLGRLAWVESVSPSRGVRLRREFDRIDWS

SEQ ID NO: 5665 - protein, 345 aa, Agreia sp.
  source 1..345: note = Related to LMNF01000001.1
MAPTSAAVPSLDGLGELADFLEVTSPQLDWLTDTAHFNRRTPRGRLHHYSYDWLVRPGRAPRLLEVPTPRMRRVQRRVLRDILGPLPLNDAAHGFVPGRSAISGASAHAGAHTLITLDLSTFFARVPARRVYSVFRQAGYPEAVAHALTGLCTHAVPPWVGARMPSGGSPEDRAALRDAISRSHLPQGSPTSPALSNLTMRRLDSRLTGWAAASGAVYTRYADDLAFSGSDLRGRAATSFISGVDRIVRAEGHVLNRSKTRIAARGARQSVTGLVVNDGPSVDRPTFDELKALLHNCVVHGPASQNRAGHPDFRAHLLGRLNWIASVSQTRGTRLRRDFDRIDWS

SEQ ID NO: 5666 - protein, 451 aa, Agreia sp.
  source 1..451: note = Related to NZ_LR882035.1
MRPGATAQPSATTLAAGLAHAMLACPLWTFDVLVDGCGRALGSRPGWLWPLVERVLSSYHRPPHDATRELARFIAQTRALHDAVEAARADGRTIALQHLETTPARSGENGARGVPRIDGLNQLAEFFAVTPGQLDWLTDTAHYNGRTRRGRLHHYSYDWMRREGRAPRLLEVPSRRMREAQRLVLAEILTPLPLHDAAHGFVPSRSAITGAAAHVGAETLITLDLSTFFARVPARRVFGILRRAAYPEAVAHALTGLCTHAVPSWVLARMPPGGSPEERAALRESLTRSHLPQGSPTSPALSNLSVRGLDGRLDGWAAASGFSYTRYADDLCFSGPHLTHRAAASFIAGAERIVAAEGHRVNRRKTRISGAGSRQSVTGIVVNERLNATREHVDELKAILHNCAVHGQASQNRFGHPEFRAHLEGRITWVAALNPGRGARLRRQFDLIDWG

SEQ ID NO: 5667 - protein, 395 aa, Arthrobacter sp.
  source 1..395: note = Related to NZ_KI914784.1
MLAAYHRPPGGAPRELARFIAQTSAFGAAVARAVEKGVPIPVARYAVGFAAVGTSAGIAADVGALAELLDLTVGELEWFADTGHWNRRARPGPLRHYRYAWRTRTGRVPRLLEVPGPRLKAVQRRVLHQMLGSIPLHDAAHGFVPGRSVATGAGRHLGAEMLISLDLRAFFSSVGASRIHGIFRQAGMPEAVAYTLTGICTAAVPPAVLSRMPDGGSPDERFALRRALAAAHLPQGAPSSPALANLSVRRLDSRLAGWAEATGAVYTRYADDLAFSGSEPLARRADAFVRGVEGIVTSEGHLVNPRKTRVKGASVRQTVTGVVVNSVPNVPRPVFDELKAILHNCVADGPESQNGARGPAHRDFRAHLLGRISWVESLNPARGQRLRDDFDRIQW

SEQ ID NO: 5668 - protein, 432 aa, Rathayibacter sp.
  source 1..432: note = Related to CP047186.1
MQGREVLVETLVHAFLGAEWTADALSAAAVDALGARRRWRGRVVAGVLVAFPHPPLDAPRELARCLDALLPDRAQPGVAHLAPVAARASASSSPVPRIDGWGDLARLLALTPGELEAFADVQHWNRRAPEGPVQHYDHVWRERPGRAPRLLEVPRPRLRAVQRSVLDQLVGLAPVHPAVHGFVPGRSAISGAAVHAGAAMVVTLDLQRFFAQVTAPRVFGVLRAEGLPEGVAHALTGLCTHEVPVAVLRRMPSGGTPEERAALRRSLSLAHLPQGAPTSPALANVALRRLVARLAGYAEAAGARYTRYADDLAFSGGPAFARRADAFARGAARLAAESGWAVNPRKTRLRPASTRQTVTGVVVNAHPNVRRADVDRLHAILHNCAVHGSAGQNRAGVPDFRAHLLGRVAWVAAVNPRRGAALRALFDSITWT

SEQ ID NO: 5669 - protein, 453 aa, Rathayibacter festucae
  source 1..453: note = Related to NZ_CP047180.1
MHGRDAVVEALAHAFLGAEWTPAGLRAAAADSLGARRRWIGPLVTAVLVAFPHPPLDAPRELAQVVAGLLPERAQPVVAHLAPVPARAVPSSSPVPAIDGRDDLARLLGLAPAQLDGFADLGQWNRRTPHGALNPGALQNYDHVWRQRPGRAPRLLEVPRSRLRAVQRSVLDEIVGLAPVHPAAHGFVPGRSAITGAAVHAGSAMLITLDLQRFFAQVTAARVFRLLRGEGLTEAVAFALTGLCTHAVPVAAIHRMPAGGEPEERAALRRSLALAHLPQGAPTSPALANLALRRLDARLTGYAEAAGARYTRYADDLAFSGDARFARRAEAFARGAARIVEDAGYAVNPRKTRLRPASTRQSVTGIVVNAHPAVRRADVDRLRAILHNCAVHGPAGQNRAGVPDLQAHLLGRIAWVSAVHPGRGARLRALFERIPWPEPSGAAPSLDPAGPRP

SEQ ID NO: 5670 - protein, 434 aa, Rathayibacter oskolensis
  source 1..434: note = Related to NZ_FXBM01000004.1
MQGRDVLVETLTHAFLGAEWTRDSLRAAAVDSLGARRRWLGPLATGVLVAFPHPPLDAPRELARCIAGLLPERAQPVVAHLAPVPARALPSSSAVPRIDGRDDLARLLAITPAQLDGFADLGQWNRRAAEGAVQHYDHVWRERPGRVPRLLEIPRARLRAVQRTVLEEVVGLAAVHPAAHGFVPGRSAISGAAVHAGSAMLVTLDLQRFFAQVTAPRVFGLLRAEGLPEAVAYALTGLCTRPVPIAVLRRMPTGGDVEARAALRRSLTLPHLPQGAPTSPALANLALRRLDARLTGYAEAAGARYTRYADDLAFSGDERFARRAEAFARGAARIVEDAGYAVNPQKTRLRPASVRQSVTGVVVNVHPNVRRADVDRLHAILHNCVVHGPSGQNRGAVPDFGAHLLGRIAWVAAVNPARGARLRALFDAIVWPGA

SEQ ID NO: 5671 - protein, 432 aa, Rathayibacter caricis
  source 1..432: note = Related to NZ_PZPL01000001.1
MRGRDALVEALVHAFLGAEWTHDALRAAAADSLGARRRWLGPLVTRVLVAFPHPPVDAPRELGRCIAALLPDKAQPVVAHLAPVAASAAESSSPVPRIDGIADLAALLGLSVDALDGLADSGSWNRRAPEGRLQHYDHVWRERPGRVARLLEVPRGRLRAVQRSALDEIVGLAPVHPAAHGFVPGRSAITGAAEHVGSAVVVTLDLQRFFAQVTAPRVFGLLRREGLPEAVAYTLTGLCTHAVPVAVLRRLPEGGSPEERAGLRRALTLPHLPQGAPTSPALANLALRRLDARLTGYAEAAGARYTRYADDLAFSGDESFARRAEAFARGAQRVVEDAGYAVNPRKTRIRRASVRQSVTGVVVNVRPNVRRADVDRLHAILHNCAVHGPAGQNRAGVGDFRAHLLGRIAWVAAVNPGRGAALRAVFDRIEWG

SEQ ID NO: 5672 - protein, 477 aa, Curtobacterium sp.
  source 1..477: note = Related to NZ_LMMJ01000014.1
MAEPTGVDGAHPFARTADVTIARTTDATTTRRTAVASARTAEIATVLADAFLAAEDWAVDALLAAGTAAVGPHRRFVPMTVLAALRGYPRAPRDAPRELAAFLQSVDGFAEAVRRSAERAPITVASRRATPTEAPPNTGHVPRIDTVADLARLLDLTIGRLEWFADTKQWNRRTHDAVLQHHGYVWRARPGRVPRLLEVPKPRLRAVQRTALDEILTFLPVHDAAHGFVPGRSAVSGAAQHTGRQAVVTLDLAHFFAAVSAPMVYGLLRRGGLPEPVAHTLTGLCIHVVPPRVIAAMPPGGTPEDRAALRRALATPHLPQGAPTSPTLANASVWRLDTRLAGWAASADATYTRYADDLAFSGDDRFAARVDAFVRGVGRIVTDEGHILNASKTRVRRRGVRQSVTGIVVNERPSVGRAEFDRLKAILHNCAEHGPDGQDRVGVPDFRAHLRGRVGWFEQVHPERGARLLAEFQRITW

SEQ ID NO: 5673 - protein, 437 aa, Curtobacterium sp.
  source 1..437: note = Related to LMPO01000009.1
MVAGALADAFLAAEGWHRDELTAAGYDVLGVERTYVGVAVGVALEAYPRAPVDAPRQLAAVLASAPRLVRLHDSRVPLRPVRVLLRRATAVRARPIVASRLLVDTLPELARELDLTAGRLLWLADTKGWNRHRGPTSALHHHRHEWVQRPGRAPRLLEKPMAMLKRTQRTILDELLAAMPVHDAAHGFIAGRGVVSSAAEHVGCPVVLSADLTAFFANVRAATVYGVFRSAGFAEPLAHVLTGICTHRVPPHVLTAMPPGGDPDQRTALRRALTEAHLPQGAPTSPALANLALRHLDVRLAGWAAAVDATYTRYADDLTFSGGDALAARPDAFLRGVDRIVTEQGHTLNARKTRVRRAGVRQSVTGVVVNERTSPGRREVDRLHAILHNCVVHGPASQDRDGHADFRAHLLGRIGWVGQVHPVRGAALMTLFAQIRW

SEQ ID NO: 5674 - protein, 496 aa, Curtobacterium sp.
  source 1..496: note = Related to JALGRO010000013.1
MEFPGEADGARDASTSPGSPRGTQYQQDDTPREARRAPRALPHGGTDRSPGNPTPTPLDVVARALADSFLAADRWNRDDLTAAGYDVLGVERTYVGLAVGIALDAWPRPPVDAPRQFAAVLASDPRLIRLHDSRVPLRPVRVLLRRATAVRAVPRVDSRLLVDTLPELARELDLTVGRLMWLADTRGWNRRPGPSSPLHHHRHEWVHRAGRAPRLLEKPMAMLKRTQRTILDELLVAMPVHDAAHGFVPGRSVVSGAAEHVGRSVVLSADLTSFFASVTAPSVYGVFRSAGFAEPLAHVLTGVCTHRVPPHVLTAMPPGGDADARGALRRALAAAHLPQGAPTSPALANLTLRHLDVRLAGWAAAMGGTYTRYADDLTFSGGDAMAARADAFLRGVDRIVREQGHTLNTRKTRVRRSAVRQSVTGVVVNERTSPGRREVDRLHAVLHNCVVQGPASQDRGGHPDFRAHLLGRIGWVEQVHPGRARRLRDEFARIRW

SEQ ID NO: 5675 - protein, 439 aa, Curtobacterium sp.
  source 1..439: note = Related to MJGI01000025.1
MDVVAGALADAFLTAARWERDGLTAVGYDVLGVERTYVGVAVGVALDAYPRPPVDAPRQLAAVLAGAPRLVRLHEAREPLRPVRVLLRRAAPVQAHPTVASRLLVDTLPELARELDLTVGRLLWLADTRGWNRGPGPTSPLHHHRHEWLQRPGRTPRLLEKPYAMLKRTQRTVLDDLLAVLPVHDAAHGFVAGRSVVSGAAEHVGRPVVLSADLTSFFASVKSPTVFGVFRSAGFAEPLAQVLTGLCTHRVPPHVLTAMPPGGDPDERAALRRALAAPHLPQGAPTSPALANLSLRHLDARLAGWAAAVGGTYTRYADDLTFSGGDALAARPEAFLRGVDRIVTEQGHTLNRRKTRVRRAGVRQSVTGVVVNERTSPGRREVDRLHAVLHNCVEHGPSSQDRGDHADFRAHLLGRIGWVEQVNPGRARRLWAEFARIRW

SEQ ID NO: 5676 - protein, 436 aa, Curtobacterium sp.
  source 1..436: note = Related to MJGP01000013.1
MAQALADAFLAADDWSRDALTAAGYDVLGVERTYVGVAVGTALDAYPRPPVDAPRQLAAVLATAPRLVRLHDSRGPRRPVRVLARQATAVRARPVTDSPLLVDTLPELARALDLTVGRLLWLADTRGWNRRPGASSPLHHVRHEWVARPGRTPRLLEKPMAMLRRTQRTVLDDLLAALPVHDAAHGFVPGRSVVTGAAGHVGRRVVLTADLTSFFATVRAPTVYGVFRAAGYAEPLAHVLTGLCTHRVPVHVLTAMPPGGSIDERRALRDALVEAHLPQGAPTSPALANLALRHLDARLAGWATAAGATYTRYADDLTFSGDDRLAARADAFLRGVERIVADQGHTLNPRKTRVRPAGVRQSVTGVVVNERTAPGRREVDRLKAVLHNCVVHGPASQDRAGHADFRAHLLGRIGWVGQVHPDRAAKLRALFARIEW

SEQ ID NO: 5677 - protein, 494 aa, Curtobacterium pusillum
  source 1..494: note = Related to JACGXP010000002.1
MEFPGEAAGARDAPTSPGSPRGTRYQQDDTPRAGRRAPRATPHGGTDGSSGNPTPLDVVAVALADSFLTAEQWAHDELTAAGYAVVGVERAYVGLAVAAALEAYPRPPVDAPRQLAAVLASSPRLAELHRSREPRRPVRVLARRATAVRSRPETVSRLLVDTLPELARELDLTVGRLLWLADTRGWNRRPGPSSPLHHHRHEWVRRPGRTPRLLEKPMDMLRRTQRTILDELLTALPVHDAAHGFVAGRSVVTGAAAHTGQQVVVSADLTSFFASVSAPTVYGVFRSAGFAEPLAHVLTGICTHRVPPHVLTAMPDGGTPEERAALRQMLAAAHLPQGAPTSPALANTALRHLDARLAGWAAAVDAVYTRYADDLTFSGGHRLARRTDAFLRGVDRIVTEQGHRLNPRKTRVRRRGVRQTVTGVVVNERTSPGRREVDRLHALLHNAAEHGPASQNRAGHPDFRAHLLGRIGWVEQVHPGRARRLREEFTRIVW

SEQ ID NO: 5678 - protein, 494 aa, Curtobacterium herbarum
  source 1..494: note = Related to JAFBBT010000001.1
MEFPGEADGARDASTSPGSPRGTQDQQDHTPREARRAPRARPHGGTDRSPGNPTPLDVVATALADAFLAADAWDVDHLTAAGYDVVGLERAYVGLAVRAALETYPRPPVGAPRQLAAALAGSPPLVRLHDARRDRRPVRVLLRRAVAVQAVPTVSSRLLVDTLPELARELDVTVGRLLWLADTRGWNRRPGPASPLHHHRHEWVHRPGRTPRLLEKPMDLLRRTQRTVLDELLAMLPVHDAAHGFVPGRSVVTGARVHVGQQVVVSADLTTFFASVRAPSVYGVFRSAGLAEPLAHVLTGLCTHRVPVHVLTAMPPGGDADERGALRRLLADSHLPQGAPTSPALANTVLRHLDARLAGWAASVGAAYTRYADDLTFSGGAELARRPDAFLRGVERIVTDQGYRLNAPKTRVRRAGVRQSVTGVVVNERTAPGRREVDRLHAVLHNCVVHGPVSQDRGGHADFRAHLLGRIGWVAQVHPAQAVRLRAEFDRIAW

SEQ ID NO: 5679 - protein, 316 aa, Curtobacterium sp.
  source 1..316: note = Related to QKLJ01000002.1
MLADTRGWNRRPGSASPLHHHRHEWVRRPGRTPRLLEKPLDMLRRTQRTVLDELLAVLPVHDAAHGFVPGRSVVSGATLHVGQRVVITADLTSFFASVRARSVYGVFRAAGFAEPLAHVLTGLCTHRVPTHVLTAMPPGGDVDERAALRRALADAHLPQGAPTSPALANTVLRHLDARLAGWADAAGAVYTRYADDLTFSGDDRLARRADAFLRGVDRIVTDQGLRLNARKTRVRPASVRQSVTGVVVNDRTAPGRREVDRLHAVLHNCAEHGPESQNRSGHPDFRAHLLGRIGWVEQTNPGRADRLRREFVRITW

SEQ ID NO: 5680 - protein, 494 aa, Curtobacterium sp.
  source 1..494: note = Related to NZ_CP017580.1
MEFPGEAADARDASTSPGSPRGTQDQQDDTPRAGRRAPRATPHGGTDGSPGNPTPLTVVAGALADAFLTAEHWGPDDLTAAGWAVVGVERAYVGLAVAAALAAHPRPPVDAPRQLAAVLEASPRLAELHRAREARRPVRVVARRATAVRARPETASRLLVDTLPELARELDLTVGRLLWLADTRSWNRRPGPSSPLHHHRCEWIRRPGRTPRLLEKPMDMLRRTQRTILDELLTALPVHDAAHGFVGGRSVVTGAAAHTGRQIVVTADLTSFFASVTAPTVYGVFRAAGFAEPLAHVLTGVCTHRVPVHVLSAMPDGGSPEERQALRAMLREAHLPQGAPTSPALANTALRHLDARLAGWAASVGAVYTRYADDLTFSGDERLAARPDAFLRGVDRIVTEQGLRLNPSKTRARRRGTRQSVTGVVVNDRTSPGRREVDRLHAILHNAAEHGPESQNRAGHPDFRAHLLGRIGWVEQVHPGRARRLHEEFARITW

SEQ ID NO: 5681 - protein, 494 aa, Curtobacterium sp.
  source 1..494: note = Related to NZ_CP081964.1
MEFPGEAAGARDASTSPGAPRGTQDQQDDTPRAGERAPRATLHGGTDRSSGNPTPLSVVTAALADAFLTAERWEADELTAVGYVVVGVERAYVGLAVAAALEAYPRPPVDAPRRLAAVLAAAPRLVALHRSREDRRPVRVLVRRATAVRARPETASRLLVDTLPELARALDLTVGRLLWLADTRAWNRRSGPSSPLHHHRHEWITRPGRAPRLLEKPMDMLRRTQRTILDELLTMLPVHDAAHGFVPGRSVVTGAAVHTGQQVVVTADLTTFFASVSAPTVYGVFRAAGFAEPLAHVLTGLCTHRVPVHVLSAMPAGGSPEERHALRQALATAHLPQGAPTSPALANTSLRHLDARLAGWAGAVDAVYTRYADDLTFSGGDRLAARPDAFLRGVDRIVTEQGYRLNPSKTRVRRRGVRQSVTGVVVNERPSPGRREVDRLHAVLHNAAVHGPASQNRSGHPEFRAHLLGRIGWVEQVNPGRARRLREEFARIVW

SEQ ID NO: 5682 - protein, 494 aa, Curtobacterium sp.
  source 1..494: note = Related to NZ_CP027869.1
MEFPGEAADARDASTSPGSPRDTQDQHDDTPRAGERAPRATPHGGTDGSPGNPTPLSVVASALADAFLTADRWAVDELTAAGYAVVGVERAYVGRAVSAALDAYPRPPADAPRQLAGVLAANPRLAALHRSREARRPVRVLARRATAVRARPVTDSPLLVDTLPELARALDVTVGRLLWLADTRAWNRHAPAGSPLHHLRHEWVVRPGRVPRLLEKPMDLLRRTQRTVLDGLLTRLPVHDAAHGFVPGRSVVTGAAVHTGQQVVLTADLTTFFATVSAPTVYGVFRSAGFAEPLAHVLTGLCTHRVPPHVLARMPAGGTPEERAALREALAVAHLPQGAPTSPALANTALRHLDARLAGWASAAGGRYTRYADDLTFSGDDRLAARSEAFLRGVERIVADQGHRLNPHKTRVRRRGTRQSVTGVVVNDLPSPGRREVDRLHAVLHNCVVHGPASQDRTGHPDFRAHLLGRIGWVEQVHPGRARRLREEFARIRW

SEQ ID NO: 5683 - protein, 437 aa, Curtobacterium sp.
  source 1..437: note = Related to NZ_CP076544.1
MVATALADAFLAAEGWDTAHLTAAGLDVVGPERAYVGLAVRAALETYPRPPVGAPRQLAAVVARAPALARLHHRRADRRPVRVLQRRAVPVRAVPTVSSRLLVDTLPELARELDLTVGHLLWLADTRGWNRRPGASSPLHHHRHEWVRRPGRTPRLLEKPMDLLRRTQRTLLDELLVHLPVHDAAHGFVAGRSVVTGAAAHTGQEVVVTADLTTFFASVRAPSVYGVLRSAGYAEPLAHVLTGLCTHSVPVHVLRAMPDGGSLDDRAALRRALADAHLPQGAPSSPALANTVLRHLDARLAGWAAASGAVYTRYADDLTFSGGTALAGRVDAFLRGVDRIVTDQGHRLNPAKTRVRRRGVRQSVTGVVVNERTSPGRREVDRLHAVLHNCVEHGPASQDRAGHADFRAHLLGRIGWVEQVHPGRARRLHEEFARIRW

SEQ ID NO: 5684 - protein, 497 aa, Curtobacterium luteum
  source 1..497: note = Related to NZ_CP093378.1
MEFPGEADDARGASSSPGSPRGTQDQQDTTPRAGRRAPRATPHGGTDGSPGNATPLDAIAVALADGFLAADAWDLPTLRAAGFDVVGIERVIVGAAVVAALDAFPRPPTDAPGSLAAVLARTPRLVSEHGRRTRRRPVRVLARPVSPVHAARHVEGPLLVDTLPELARALDLTVGRLLWLADTKGWNRHADPDGPLHHYRHTWTVRPGRTPRLLEAPMHLLRRAQRTVLDELLTTLPVHDAAHGFVPGRSIVTSAARHVGTEVVVTMDLTSFFATVRAPSVYGVFRNAGFAEPVAHVLTGLCVHEVPPHVLRAMPGGGGGSLDERVALRRALAEAHLPQGAPTSPALANLALRHLDARLTGWAVAAGATYTRYADDLTFSGGAALAARVDAFIAGVDRIVRDQGHEVNPHKTRVRRRGVRQAVTGVVVNDRLSPGRAEVDRLHAILHNCVRHGPASQNRDGHPEFRAHLLGRIGWVGQTHPARAARLRAEFDRIDWR

SEQ ID NO: 5685 - protein, 496 aa, Curtobacterium sp.
  source 1..496: note = Related to JAGGPH010000002.1
MGFPGEADGVRGASSSPGQPRGTQEQLTHPPREARRAPRALPHGSTDQSPGNPGPLAEVAQALADAFLTADDWSRPALTAVGYDAIGVERAIVGLAVGAALDAYPRAPSDAPRQLARVLAAAPRLQSAYAARDPRVRPVRILARPVGAVRAGRSVDSPLLVDTVPELARALDLTVGHLLWLADPGGWNRRPDASSALHHYGYAWIPRGGRTPRLIEKPKPLLRRTQRLLLDGLLGALPVHDAAHGFVAGRSAVTGAAEHVGRQVVVTVDLTAFFASVTAGSVFGVFRTAGFAEPVARVLTGLCTARVPVHALRTMPDGGSVEHRFALRQALRLPHLPQGAPSSPVLANLSLRHLDARLAGLAAASGATYTRYADDLTFSGDDHFAGSVDGFLRAVGRIVVEQGHTINQAKTRVRRRGRRQSVTGIVVNERVAPGRAEHDRLKAILHNCAVHGPQGQNRAGHPDFRAHLEGRITWMMQLNPERGARLRAVFERIEWG

SEQ ID NO: 5686 - protein, 499 aa, Frondihabitans sp.
  source 1..499: note = Related to NZ_CP014513.1
MARFRGEADDARRAPSSPGSPRGTQNDQQHTPREARRASRARPHGRIDGSPRNRGHTPLAVVAQALADAFLAAPEWTIPALDEAGFATVGVVRPFVRVTVVTALEAYPRPPRDAPRQLAAVILRSPRVVDLFEARAATNPVRVVSRSVGPVEARADHETASRLLVDTVPALARELDLTVGRLLWLADTRGWNRTAAEGPLHHYRYEWLARPGRTPRLLEKPLHRLKTTQRTILDDLLTALPVHDAAHGFVTGRSAVTGAALHVGQDVVISADLTSFFPSVRAGSVYGVFRDAGFAEPLAHLLTGVCTHRVPVGILSAMPPGGSPDERFALRQRLSAAHLPQGAPTSAALGNLVLRHLDARLAGWAKSAGSVYSRYADDLTFSGGASLASRADAFARGVDRIVADQGYALNPQKTRVRRQGVRQSVTGVVVNERTSAGRREYDLLKATLHNCLRDGPARQNRGGRPDFRAHLAGRVGWFEQCNPERGARLRSLFEQIAWA

SEQ ID NO: 5687 - protein, 512 aa, Curtobacterium sp.
  source 1..512: note = Related to QKTP01000001.1
MRWSPGEADGARAAASSPGLPRGTRIDQEHTPQELGRAPRADAPERHDESSGDHQHADPPPTSRLVAPERSAGLVETAIALADAFLAASAWRPAELSAAGTTTVGRRPGLVEPAVAAVLAVYPRAPRDAPRRLAGVLASDRSFTAAFARLTARRPVRLRVRTVAPVVAAPVAAHVPVVDALPDLAALLGVTTERLLWFADTRGWNRRVPAGSPLHHYEHRWVQRPGRTPRLLEAPLHQLRTMQRVVLDQVLAPLPLSDAVHGFVRGRSALSGAEVHVGHDVVVSADLVSFFAAVPASRVYGIFRRVGYAEPVAHVLTGLCTHVVPDAVLRAMPPGGDLDERWALRQALATPHLPQGAPSSPALANLSLRRLDARLAGWAQAADAVYTRYADDLAFSGDGAIAARPDAFLRGVDRIVADEGHALNPRKTRVRRQGVRQSVTGVVVNAVPGVGRRELDRLRAVLHNCVRYGPASQDRGDHADFRAHLEGRVGWVEQVHPARGATLRAEFERIAW

SEQ ID NO: 5688 - protein, 506 aa, Frondihabitans sp.
  source 1..506: note = Related to NZ_LMNV01000002.1
MQRPPGEAGGTRAVPPSPGLPRGTKIDENTTPREAERASRALPPAPADESFGGRSQHDANADIAHEPPGATLAEVARALADAFHAAPEWSAPSLLAAGSSVVGSRRAFVRVAVGGILESLPRSLPDSPRLLARLILDLPGFVASFRRGTRRTPVRIRSRAIAPTRAVGPGPRVDTVVDLARLLGVTVGRLEWFADTQGWNRLAEEGPLHHYRYKWRVRPGRVPRLLEVPLDRLRTMQRIILDELLTPMPLHDAAHGFVAGRSAITGAAEHTGRDVVIGLDLVSFFASVTAKQIYGLFRRAGLPETVAHLLTGVCTHSVPPRVLRAMPAGGSASARFALRQALSTPHLPQGAPSSPALANLSLQRLDSRLAGWADAFGATYTRYADDLAFSGDASLASMVREFVRGATAIVVDSGHTINAPKTRIRRAGTRQTVTGIVVNATTAPGRREYDRLRAVVHNCVTHGPEGQNREGHPAFRQQLLGRIAWVSQLHPERGARLRREFELIRW

SEQ ID NO: 5689 - protein, 473 aa, Frondihabitans sp.
  source 1..473: note = Related to RJUO01000002.1
MTPREAKRASRTLPPAPADESSGGRLHARGGQPSGASPYEVAVVLADAFAAAPGWDVRSLSAAGTAAFGSGRRFVPLAVLGVLQALPRPILDSPRTTARLIVALPGFVEAVRRSAERAPVVVLSREVVPVAAVGPGPRVDTVADLARLLGVTVGRLEWFADTKGWNRRAPAGPLHHYRYEWVSRPGRTPRLLEVPLGLLKTVQRTVLDELLAPMPLHDAAHGFVPGRSAVTGAALHTGREVVLALDLVSFFAAVSARQVYGLFRRAGLAEPVAHLLAGVCTHAVPVHVLSAMPDGGSSTERFELRRALAAPHLPQGAPSSPALANLSLAGLDRRLDGWARAAEAVYTRYADDLSFSGDGELGGRVPAFLRGVERIVTDEGHTVNARKTRVRRAGVRQTVTGIVVNQTTSPGRTEHDRLKAIVHNCVRYGPASQNRDGHPAFREHLLGRIAWVEQLHPARGARLRAEFDLIRWD

SEQ ID NO: 5690 - protein, 457 aa, Klenkia terrae
  source 1..457: note = Related to NZ_UEXK01000004.1
MKPPGTRTARALAAAFLGSPEWSAPALVEQGRVVLDPAPDWLPAVAAAAVAAHREPPRDAPRELAGFLLGVREELLDARPRLDDDGEPLPRPAEPRVRAWLPTTPRMGRARWPVHPLHDLADVAEMLGTDLDHLSWYADPQGRQRTEPAGHLQLYRRRWLPRPGRVPRLLEVPTPRLRAVQRVLLDRVLAPIPPHPAAHGFVAGRSALTGARQHVGAEELLTLDLAAFFATVRAGRVWATLRSAGYPEPVASLLTGLCTTSATRDDLATMPPGGSEGARAHVRAALATPHLPQGAPTSPQLANLAAHRLDRRLAGLAAAAGAVYTRYADDLTFSGRRGTAALRHRVAVVVADEGFALQPAKTRVRGRGARQAVTGVVVNERPSLPRAELDALRARLTNAVRRGPSAADLAAVDGDRQALRRELAGRGAWVTQVHPVRGERLAALLAAVDFAEPDTDL

SEQ ID NO: 5691 - protein, 484 aa, Klenkia marina
  source 1..484: note = Related to NZ_FMUH01000007.1
MSVRSAHAYAGTTGQVDPHHRTPLFHVKQPPEQRTARALATALLADGPWTVEGLTARGRRALDPAPDWLPALAAATVAAWREPPRDAPGEFARYLSAAREHPPAEPPGYDDEEDLPPPVPEPRVREWLPTATRMGRARWPVHPLHDLSDVAELLATDLDQLRWYADPLDRQRTEPAGHLQLYRRHWLARPGRVPRLVEVPTPRLRRVQRVLLDAVLAPVPPHPAAHGFVAGRSALTGARQHVGAEQLLTMDLAAFFATVRSGRVFATLRSAGYPEPVAALITGLCTTRATRDDLATMPAGGTPGARDHVRAALALPHLPQGAPTSPQLANLAAHRLDRRLAGLAASAGAVYTRYADDLTFSGRRGTAGLRHRVAAVVAEEGFTVQPTKTRVRGRGARQTVTGVVVNDRTSLPRAELDALRARLTNAVRRGPSAADLAAFDGDRHALRRHLAGRVAWVAQVHPARGGRLAGLLAAVDWSGPDTDL

SEQ ID NO: 5692 - protein, 460 aa, Klenkia soli
  source 1..460: note = Related to NZ_FNIR01000011.1
MNQRTPPGTHTARALSAAFLGAPHWTVDALVAHGRRALDPAPDWLAGVAAAAVEAWREPPRDAPREFARFLLAVRTQLAAVPPAYDDEEDLPPRPAEPRVRAWLPAATAMGRTPWPVHPLHDLADVAELLGTDLDHLAWYADPQGRQRHEPAGHLQLYRRRWLARPGRVPRLLEVPTPRLRAVQRVLLDAVLAPIPAHPAAHGFVPGRSALTGARQHVGADVVLTMDLAAFFATVTAGRVWATLRTAGYPEPVATLLTGLCTTRATRDDLATMPGGGTDAARDHARAALARPHLPQGAPTSPQLANLAAHRLDRRLDGLAAAAGAAYTRYADDLSFSGGRGTAALRDRVAGIVVDEGFAVQPAKTRVRGRGARQTVTGVVVNERTSLPRAELDALRARLTNAVRRGPSAADLAAFDGDVHALRRHLTGRVAWVAQVHPARGERLAALLADVDWGRRDTSL

SEQ ID NO: 5693 - protein, 545 aa, Modestobacter sp.
  source 1..545: note = Related to LMQC01000019.1
MARGRGRRTAGRSGSSGDAPGTARRLHHDASGAALRSAQQSAGPTGQVDPRHRTRLFHVNPPTARTTARALADAFLGAREWQVPALVARGRLVLDAEPDWLTDLARAAVTAWRVTPHDAPAELARVLLAVPGVFEPPVPEMVTSGEDGEDDDEDGFLVWAADEEPEGWQGARAAAPGSPRVVRWLPAHTRMGRTPWRVAPLDDLADVAELLATDLDHLAWYADRQGRQRAEPSGRLQLYRRHWRVRPGRVPRLLETPRPRLRTAQRVLLDRVLAPVPPHPAAHGFVTGRSAVTGAQQHVGADVVLTMDLAAFFATVTSGRVYATLRTAGYPEPVADLLTGLLTTRATRDDLATMPPGGSDAARAHVRSALAAPHLPQGAPSSPQLANLCAQRLDRRLAGYAAAAGAVYTRYADDLTFSGGPDVARRVGALRHGVARIVAAEGFALQPAKTRVRGRGARQTVTGIVVNDRTSLPRRELDALRARLTNAVRLGPSVQDLAAFDGDRGALRAHLAGRVAWVAQVHPVRGERLAALLAAVDWDPVDTHL

SEQ ID NO: 5694 - protein, 449 aa, unidentified
  source 1..449: note = Related to CP043652.1; note = Geodermatophilaceae bacterium NBWT11
MNREVARALADAFLGAPAWRVSVLVDRGRAVLSTEPSWLGRAAVAAVTSWPEPPVDAPGELARFLLGVDVGPEDEEARPEPPPRVVRRVPTPTRMGRTRWPVHPLHDLADVAELLGTDLEHLDWYADRQGRQRAEPAGHLQLYRRRWLPRPGRVPRLLEVPTPRLRAVQRLLLDRVLGPVPAHPAAHGFVPGRSAVTGAAQHTGADVVLTLDLAAFFATVTSGRVHATLRTAGYPEPVVALLTGLVTTRATRDDLATMPPGGTDAARHQLRGALAAAHLPQGAPTSPHLANLGAQRLDRRLAGYAAVAGAGYTRYADDLTFSGGPDVARRVRALQHGIERIVADEGFVVHPTKTRVRGRGARQTVTGIVVNRGTSLPRAELDALRARLTNAARRGPSAADLAAFDDDRVALRAHLTGRVAWVAQVHPAKGARLAALLAAVDWDGPDTSL

SEQ ID NO: 5695 - protein, 453 aa, Modestobacter sp.
  source 1..453: note = Related to NZ_JAABOZ010000008.1
MSTDRGQEVARALADAFLGAPVWLPSALLARAELVIGARPPWLAAVAVTAATAYQEPPRDAPGELAGFLAASSALEAGLLAGNPTVTARGRRRRAPVRVVRRLPASTAMGRTRWPVVPLDDLGDLARLLDVDPGHVAWYADGQGRQRLDPPGRLHLYRRAWLPRPGRTPRLLEVPTPRLRRVHRLVLDQVLAPVPAHPAAHGFVPGRSALTGARQHVGAGVVVSMDLLSFFATVHVRRVYWVLRTAGYPEPVASALAGICTVATPVADLRAMPAGGDDQERSALRRALAAPHLPQGSPSAPHLANLCAQRLDRRLAGYAGSVGAVYTRYADDLTFSGRFRAGPLISGVGAVVREEGFRLNVDKTRVRGRGSRQSVTGIVVNERPTVPRPEYDALRAQLFNAARRGPSARDLAEHPDLRAHLTGRVAWVAQLDPERGRRLRALLDRVDWSGPAS

SEQ ID NO: 5696 - protein, 354 aa, unidentified
  source 1..354: note = Related to JACCXW010000487.1; note = Geodermatophilaceae bacterium
MTGRGEQAVASALAGAFLAGDWTASELFERGSTTLGRRPRWLRRVVVEVLSLYREAPVDRPRELATVVLATDGFQTAASPAQRHEGPPLRVVRILVEPTRMVRSRWPVARVDTVTDLADLLELGVGHLTWYADTAGMQRRTRVQALQLYRYRWLDRPGRAPRLLEIPKPRLRRAQRLLLDRIVARVPAHAAAHGFVPGRSARTGATPHVGTDVVIGLDLAGFFASVPAQRIYGILRVAGYPEAVAHIITGLCTTATPIAVLAAMPAGGSADDRYALRRTLTMPHLPQGAPTSPQLANLSAYRLDCRLAGLVAALGATYTRYADDLRCPADPTWRGRPRGSSAASGGSSATRGSG

SEQ ID NO: 5697 - protein, 345 aa, unidentified
  source 1..345: note = Related to JACDAB010000197.1; note = Geodermatophilaceae bacterium
MAGSRWPVATVDDLADLAGLLDLSMGHLGWYADPAGMQRRNRVPALQLYRYRWLDRPGRAPRLLEVLKPRLRRAQRMLLDRIVGLVPAHAAAHGFVAGRSARTGAAPHVGTDVVIGLDLAGFFGSVSAHRIYGILRVAGYPEAVAHIVTGLCTTATPIAVLGTMPPGGPVDDRYALRRALTTPHLPQGAPTSPQLANLSAYRLDCRLAGLAAAVGATYTRYADDLSLSGGPEVARQTARIVGGVRRIVSDEGFRLNEGKTRVQPRAGRQTVTGIVVNERANAARADYDRLRAILHNAARTGAQGQNRGGHRDFRSHLLGRIAWVEALNPARGRRLRADFDRIDWT

SEQ ID NO: 5698 - protein, 443 aa, Pseudokineococcus marinus
  source 1..443: note = Related to JABEMA010000014.1
MTTGPAVAQALADAMLAEGAWDAAALARAAARVVGPRRRWLPALAAEVLATCPRPPRDAPRYLGAVVAGAPSFARAEERAQRRGHPLPVLSRPVVATRAGGSRWPTAPLDDVGDLADLLGLDVGHLDWMADVRGLQRRAPAGPLHLHRYRWVERPGRVPRLLEVPSPRLRRVQRTVLDAVLAGLPAHDAAHGFVPGRGVLSGAREHVGRAVVVRADLTAFFAAVTAGRVFRVLRALGQPEAVAHVLTGLCTTRAPVRVLAAMPPGGRDADRHLLRRWLAEPHLAQGAPTSPHLANLAAHRLDVRLSSYAAACGAVYTRYADDLVLSGGDDVARRAGPLLEGVRRVVREEGYRVNEAKTRVQPRHRRQSVTGVVVNDRPGAGRRETDALRALLHNCVRHGPASQDRDGRGEGFRAHLEGRVSWVEHVSPRRGAALRGELGRIAW

SEQ ID NO: 5699 - protein, 441 aa, Nakamurella deserti
  source 1..441: note = Related to NZ_QCXS01000003.1
MSAETALASALAEAMLAGTWHRRGLIRAMSATLNRTSRRVRWVRPLAVEVLAAYPHPPLDRPRELAGFVGTTPAVQRALGRRRPPKALVRVATPTTTVSRPFPTPRVDHVAQLAEFLAVDPDELVLLADPQSRARRAPSRRIAHYRYHWLDKPAGARLLEAPKPRLKALQRKVLDGLLTPIPVHPAAHGFVPGRSAVTGAAPHVGAAVVVTVDLEHFFAAVRAGRVWGVLRAAGYPEPVAHLLTALTTHASPVATLSAMPPGPDRGRDFRLRRRLATPHLPQGAPTSPQLANLVAFSLDRRLDAYARAAGVTYTRYADDLTFSGGPELSRAAEALLHAVDGIVRAAGYRLNPAKTRIRRSHERQSVTGIVVNRHTTLARPEYDRLRAVLHDCVTNGPEAADRNGHDDFRAHLLGRISWVAALHPARGARLRAAFDAVAWGD

SEQ ID NO: 5700 - protein, 422 aa, Nakamurella silvestris
  source 1..422: note = Related to QXCQ01000133.1
MLAGKWAPKAARKRLGRTLGQQPKWLKRLVREVLTAYPRPPLDRPRELAAFVLRSAALERAHRKSGPLPRPVRRFSTPTSTVLRPFPTPVLDHAGALADLLDLDLDELELLADTALRARRAHDPRIAHYRYHWRMRPGGPRLIEAPKPRLLTVQRRILEEIIGLIPVHPAAHGFVPGRSAVTGAALHVGAGTVVNLDLEHFFAGITAGRVWGVLRAAGFPEPVAHLLTGLTTHATPVAVLSVMPDRPGEARNFRLRRSLGTPHLPQGAPTSPQLANLILYSLDRRLQAYADAAGLRYTRYADDLTFSGPQVRHPDSVVAAVTSMAAAEGFRVNDAKSRVRRHHQRQVVTGIVVNEWTNLARPEYDRLRAVLHDCRVNGPAAANRDGHDDFRAHLQGRVSWAGSLNPGRGAKLAAMFDRIVWD

SEQ ID NO: 5701 - protein, 440 aa, Nakamurella multipartita
  source 1..440: note = Related to NC_013235.1
MTGPADRLATALADAMLAGSWDYQSILDRTRQVIARRPPWLDSLAREVLAAYQRAPADRPRELAAFVVSSAAMARARRSPPRLPTPVVRFSSPTRMIRRPFATPVLHHAGDLADHLGITLEALDAFADTRLRARRARAERIAHYRYRWMHRPGGARLLEAPKRNLRALQRTVLDDILAPIPTHPAAHGFVAGRSAITGAAEHVGAEVVITLDLEHFFASVTPGRIWGLLRAAGYPEPVAHLLVGLTTHATPVATLASMPASADPGRDFRLRRRLAGPHLPQGAPTSPALANLVAFSLDRRLDSYARAAGSRYTRYADDLTFSGDAALARRSAALIAAVKRMIRQEGFTVHPGKTREHHRSRRQVVTGIVVNDRTNIPRADYDRLKAVLHDCRRNGPLAANRDAHPDFRAHLLGRLSWVSALNPDRGARLRAIFDEIRWTS

SEQ ID NO: 5702 - protein, 509 aa, Nakamurella flava
  source 1..509: note = Related to SZZH01000005.1
MSDTPDPGPPPRRSGDDPGGLVRRGGPPRPPSGGPPAPPIRPRRKRPRGRPSPFREDRPGRPDALVDAIAGALLADADDWTASGLIGRVAVVFAGPHDWVPRLVEQVLELYPRPPADRPRELQAVVGVLLNDLLDPAPDDDGDEPTTEIRPVPRPVHWPVASTRTVRRPFATPPLDDAGDLAALLGVDLVQLTALADTRLRGRRARSEQIANYRYQWLDRPSGPRLLEAPRPRLLSAQRVVLHELLDLIPTHPAVHGFVSGRSVVTGAREHVGAETVLTLDLEHFFAAVTAGRIWGVLRSAGYPEPVAHLLAGLTTTATPVRVLTAMPPGPDPGRQFRLRRRLAVPHLPQGAPTSPALANLVAFTLDRRLAAYAAAVGLKYTRYADDLTFSGPFRQRAHVRSFARAVGRIVADERFRINEAKTRWRGRHERQTVTGVVVNEHPAIARDEVDRLRAVLHDCRRSGPAAANRHGHPDFRAHLLGRISWVASVHPARGARLREQFDGIDWTA

SEQ ID NO: 5703 - protein, 444 aa, Nakamurella leprariae
  source 1..444: note = Related to NZ_JAERWK010000005.1
MRSEHAVALADALLTGPWDAGRMVARARLVFAPVPVELAHVVDVVLAAHPTPPVDAPRSLQHLLLGLPLSAPVPVVAEGAPLLPTPRIRVVRRLLFTTSMVGSRFPLPRVDDVAALAERLGLTVGELDWFGDRRGWQRREPRSVLQHYRFRWLSRPGRTPRLLEAPRPRLKALQRQVLDELLAPVAVHPAVHGFVAGRSVLTGAAVHAGRDTVITLDLEQFFAGLTASRVAGVLRSAGYPEAVSWALTTLVCSTVPMAVLRAMPGAEAGGERFRLRRRLAAPHLPQGAPTSPHLANLAAFGMDRRLTALARRFGADYTRYADDLTFSGAPSLGRAADRLIGTVARIATAEGFSINPAKTRVRRAWQRQRVTGVVVNDRPAVARDEVDALRATLFNCVRFGPVSQNRSGVQDFRAHLLGRIAWVASTDARRGERLRALADRIDWN

SEQ ID NO: 5704 - protein, 511 aa, Nakamurella flavida
  source 1..511: note = Related to NZ_JAERWL010000005.1
MAGRSFPRPHARPALVAAASDALLAGPWTAAAMLARLAESIDPVGPWGADLVGAVLAAHPFPPADAPREFMVFIDLALPPDVGVTTWQSVLVPAGEPTGAGHRADEQDEDEQDEDDGEDDDEEDDEEDGGGAFTGAWPALFEPVPGPVVVRRLAASTAMGPRRWPVPAVDYIAALASRLALTTGELLWFADTRGFQRRDTRSELRHYRFAWVERPGRVPRLLEAPRPRLRSIQRRILDGLLAPLPMHPAAHGVTGRSAITGARVHEDAAVVLTMDLESFFSAVTAGRVYGVLRSAGYPEPVAHLLAGVCTLRTPVDVRRRMPTGAAATTSAAWRLGRRLDVPHLPQGSPTSPALANLVAFTLDRRLTDYAARAGWRYTRYADDLTFSLPGGGTGGARAGRAALRLAEAVTGMVASAGFRVNEAKTRIRGAHQRQLVTGLVVNASAAVPRTEYDRLRAVLHRCGTDGPAAQADDHLRFREHLQGRIAYVAASHPGRGARLLAAFDAITWPDD

SEQ ID NO: 5705 - protein, 442 aa, Microlunatus sagamiharensis
  source 1..442: note = Related to NZ_LT629799.1
MTHDPDEGLARGLAWAFLAAETWTRPALVGSAATALGRRPRWLGPVVDVVLQHHRSAPTDRPYALSRFLVRETTLLEHAARARRGRALRIVTVPTVTAATGRRRWPVPDVADLPSLAGLLELPLDQLVWLADARSQQRRAPDGPLHAYRHRWVERPGAVPRLLEAPTPLLRAVQRRVLERILVWVPTHPAAHGFVRGRSAISHARSHEGADEVVCLDLRAFFASVRVARVDGLFRGVGYPEAVAWTLACLCTHQTPVRVLHDMPAGGADDARAWLRAGLRERHLAQGAPTSPALANLACFALDRRLAGLAAATGRAYTRYADDLTFSGAAGGAGRLVSAVRAIVGDEGFALHPAKTRVRSRDQRQVVTGLVVNDRVGVPREYHEQLRAVLHDAGRHGPAVANRVGYPDFRSYLKGRVGWVESVSPQRGRRLRSQLDAIVWPA

SEQ ID NO: 5706 - protein, 443 aa, unidentified
  source 1..443: note = Related to nan
MSRHQDEALARGLAWAFLAAEAWTVPALVDAGATALGRRYRWLPRVAAAVVAAHRSPPTDGPYAFTRFVLQQTSLVEHADRASRRGSVVRVVRVPTLPGAMGVRRWPVPELPDLPALADALELPLDQLVWVADTHGLQRRTPDGPFHVYRHRWVERPGAAPRLLEVPTPLLRAVLRRVLDRILVWVPVHPAVHGFVRGRSAVTHAANHVGAESVVCLDLRAFFASITVNRVNGLFRGLGYPEPVAWALACLCTHPTPRVALAGMPGGGSASSRAWLRAGLRSRHLPQGAPTSPALANLAGFTLDRRLAGLAAATGLTYSRYADDLTFSGPRVDQGRFVSLVGAVVRDEGFALNPPKTRIRSAQQRQEVTGLVVNDRVNVPRAYHDQLRAVLHDATRNGPAAANRQAHPDFRSHLEGRVGWVESVNPVRGRRLRAQLEAVVWPA

SEQ ID NO: 5707 - protein, 443 aa, Microlunatus antarcticus
  source 1..443: note = Related to JACHZG010000001.1
MSHRPDEGLARGLAWAFLAADRWTAPALVDAAGTALGHRYRWMSALVRQVLENHRFAPTDRPYELSRFLLGRTALVEHAERAAQRGRALRVVRISTVAGVMGERRWPVPEVPDLPALADLLELPLEQLDWVVDARGLSRRTPDGPFHLHRHRWVERPGAVPRLLESPTPLLRAVLRRVLDRVLVWVPVHPAAHGFVRGRSAVTHARTHVGAASVVCLDLRSFFTSITVGRVNGLFRGLGYPEAVAWALACLCTHQTPVAVLGRMPPGGSEAARAWLRSSLRARHLPQGAPTSPALANLACFTLDRRLAGLAATAGLTYSRYADDLTFSGPRGSAHRLVASVGSIVRDEGFDLNPAKTRVRGTGERQEVTGLVVNERLNVTRAYHDQLRAVLHDATRNGPSAANRADHPDFRSHLEGRVGWVESVNPVRGRRLRAQLDAIVWPG

SEQ ID NO: 5708 - protein, 448 aa, Microlunatus phosphovorus
  source 1..448: note = Related to AP012204.1
MVMRIDPDEGIARGLAWALLAAAEWDKAALTSALGHALGRRHRWIPKVVTEVLAAYPRAPIDRPHELTGFLRTGTSLVHSLARARRQGRAVRLQHIPMVTGTMGLRHWPVPEIDDLGGLALLLELPLEQLIWAADTQGRQRATRSGPLHLYRHTWRPRPGAAPRLLESPTPLLRAVLRRVLDRILVWVPVHPAAHGFVPGRSAPSNARAHVGADVVICLDLRTFFTSITAARVNGLFRVMGYPEPVAWTLAALCTHQTPAHVLAAMPAGGDSTVRHRQRAELRVRHLPQGSPTSPALANLAAHGLDRRLAGLADRLGLTYTRYADDLTFSGSLGNGIGVPRLVGVIGEIVRNEGFVLNTSKTRVRHTGERHEITGLVTNQQLSVPRAYHDQLRAVLHDAVMHGPAVANRAGLPNFRDHLAGRVGWVESVNPVRGRRLRAQFDAIAWPD

SEQ ID NO: 5709 - protein, 448 aa, Friedmanniella luteola
  source 1..448: note = Related to LT629749.1
MPVKRRDPTAHVARALAWSFLAAPDWTEAALRRSAWVTLGRRHRWVSALAGSAVATYRTAPLGRPHELAGLLAGSAVLTTALHRAARRGTPVRVRVLPTTPAAMGRRRWPVPEVDDGPALARLLQVPDEQLSWLADVQGRQRRTPAGPHHLYRYRWVARPGTVPRLLEAPTPLLRHVLRRLLDEVLVWVPAHPAAHGFVRGRSVLSHARRHVGADLVLGLDLRHFFAAVTAARVAGLWTLLGYPEGVVTLLTGLTTHRTPVHVLTAMPPGGDVSGRHLLRARLRAAHLPQGAASSPALANLACFTLDHRLSGYAAALGATYSRYADDLTFSGPRDLPAARLVRSVTTVVAEEGFAVNPTKTRVQRSSARQQVTGLVVNAGLGIPREDEDRLRAVLHDAVRRGPQAANRDGVPDFRAHLEGRVGWVTSVNPVRGARLRRQLEAVVWPPR

SEQ ID NO: 5710 - protein, 446 aa, Microlunatus capsulatus
  source 1..446: note = Related to JAGIOB010000001.1
MRRADPVAHVARALAWAFLAAPAWTEPELRRSAWTTLGRRHRWVTPLVRLALVVHRTAPTGQPAELARLLAGTDELPAALHRAARRGAPVRVRVVPAVPARTASPRWPVPEVAGAPDLARLLGVPLEQLDWLADAQGRQRRTPAGPLHLYRYRWVERPGAVPRLLEAPTPLLRHVLRRLLDEVLVWVPAHPAAHGFVRGRSALSHARLHVGAAQVVSLDLRHFFAAVTAARVRGLWTLVGYPEGVTALLTGLTTHRTPVHVLTAMPPGGDASARHLLRARLRAPHLPQGAASSPALANLACARLDRRLAGYAAALGATYSRYADDLTISGPADLAAPRLVRAVSAVVVEEGFAVNPAKTRVQRSSARQQVTGVVVNARTSVPREEEDRLRAVLHDAVRNGPDAANRAAVPDFRAHLEGRVGWVSAVNPVRGARLRRQLDAVVWPGR

SEQ ID NO: 5711 - protein, 468 aa, Microlunatus kandeliicorticis
  source 1..468: note = Related to JACGWT010000003.1
MPVHTRRDGDDGTRRESHRPRGVPVTLAPDDGLARGIAWGLLAAEDWTADALQAAVTRTLGRPCEWAGRVVGPVLAAYREPPTDRPDELARFLLLATPLTEIAHAVRQEHEPLRVRVLAPVPGRMGRRRWPVPDLPDLVALARLLEVPLDQLDWLADTARLQRRSPPGPYQAFEHRWRSRPHAAPRLLEAPGPLLRAVQRRILDRILAWVPVHPAAHGFVGGRSAITNAARHVGAPTVVALDLRSFFSTITAARVGGLYRTMGLPEAVVRVLTGLSTHATPGWVLSGMPAGGDPSERHRLRATLRSRHLPQGSPTSPALANLACFSLDHRLQRYAETAGLVYSRYADDLTFSGPVARPAALLATVSTIIVAEGFVVHPGKSRVRRTGERQTVTGIVTNRRPGIARSDRDRLRAVLHDARRHGPEAANRERHPHFREHLHGRITWVESVSPVQGRRLRAQYEAIVWPER

SEQ ID NO: 5712 - protein, 448 aa, Microlunatus soli
  source 1..448: note = Related to NZ_LT629772.1
MSSKTVQDDLARRLGYRMLAVEWDRDHLLIGCRRALGSAPPWLGPVIDAVLQQYPVKPSGRHHELTALIASTEEFQDAVFVSRSGRHWQIRSLPVGDLDPDELRMATSRWPVPTLGTEAALADLLRVDLPVLLWLADPKRMLRRRPDGGLQPYRYRWLERHGRTPRLLEIPGPLLRHVQRRLLERVIDRIPPHPAAYGFVRGGGPHRNAAQHVGADWVINFDLRSFFAGVRTGRVAGIFTAAGYPASVVALLAGLVSRPTPEFVLRGMPDGGDPSDRALLRARLRAAHLPQGSPSSPAIANLVAFNLDCRLNRLAKNAGFGYTRYADDLTFSGSGPRPAAGFVPLVRKIIIDEGFAPNDRKLRIRGRGQRQLVTGIVVNQHTNLRRRDHDRLRAVLHDAIRNGPDAANRDHHPDFRAHLEGRVGWAEQLNPTRGARLRRQLELISWPS

SEQ ID NO: 5713 - protein, 447 aa, Microlunatus endophyticus
  source 1..447: note = Related to NZ_BMMZ01000006.1
MTPEEDLALRLAYVFLSTSWRRADLTDAAIASLGGEPAWLGGLVSRLLGSIRERPADRPYDLARVIMGQQVYLDGLDRDHHQDTVWRVRSFPVGGLVAETERMAVPDWPVPRLGTERALADLLRVDLPVLLWLADPRGYLRRADDGLQPYRYRWIRRPGRTPRLIEAPGPLLRYVQRRLLDRVLVGIPVHPAAYGFARGRNAVRAARRHVGSDWVINFDLVSFFNGIRESRVRGIVRVAGYPEPVARLMAAIMTTATPVRTLQRMPDDGPDDDRAVLRSVLRTAHLPQGAPTSPAIANLACYRLDVRLAGLAESLGLRYTRYADDLAFSGHGTRPGRRFFRLVTEIVTDDGYCLNDHKQRLQTRRGRQTVTGIVVNDRANLRRSEYDRLRAVLHDAMINGPEHANRNGYPAFREHLDGRIGWVEQLNPARGARLRRQFELITWPEDR

SEQ ID NO: 5714 - protein, 443 aa, unidentified
  source 1..443: note = Related to JADJPO010000003.1; note = Kineosporiaceae bacterium
MRLSDSTLARALAMAFLDGDWEFDPLLDRAAQVLGGRRRWVRRLVKDLLAAFPRTPRDAPSALAGWIGAHPSLIEAAARARDAARPLRVAAIHPGHTEMGRRRWPVATLDDLADLAELLDLDQAHLAWFADQQHRARRAPDGPLHHYRRRWISRSGRTPRLLEVPLPRLRALQRTLTHEVLAHIPTHPAAHGFVRGRGAVTGAQQHVGRDAVLSLDLSAFFASVSAARVRAIWRAAGYPEPVADALTGVVTTLAPVRMLTAMPPGGPPEARALLRAWLRASHLPQGAPTSPALANLAAHRLDARLAGYAAAAGWCYTRYADDLTISGGPEMVRRTDAVVAALSRIVTEEGFRVNPTKTRLRTASQRQLVTGIVVNRRPGPGRSEYDQLKALLHNASRTGGQAQNRDGHPAFAAHVRGRIAWVAQLHPERGARLLATWHEVDWS

SEQ ID NO: 5715 - protein, 482 aa, Kineosporia corallincola
  source 1..482: note = Related to JAHBAY010000005.1
MPRSAPRCYARALHDRSHPDATVMTSDRVRTLARGLGNAFLGAEAWATRPMAEAAVSVVGVGGRRRWPRKLAREVLAAYPRPPADRPRELARFIENSPVLWAALNRSAPPGRAPVLRARRIPPTPVRMADRRPWPVPELHDLADLAALLDLDPAHLDWFADVKGLQRRAAPGPLHHYRYRWTTPGSGRPRLLEAPRPRLRSVQRTLLDEVLALIPVHPAAHGFVPGRSAVTGARRHTGAAVVISLDLAAFFAHLNGGRVYGVFRTAGYAQPVAHALTGLCVHRTPVAVIAAMPPARPGSTPEAVSARPGLRRLLAGAHLPQGAPTSPALANLCVMALDRRLSGLAAATGLTYTRYADDLTFSGDLEPRAAQRVTEAVGRIVRSEGLALQPAKTRVRERSRRQEVTGIVVNEHSNLPRTEYDRLRAILHNAARSDPAVQNREQHADFRAHLLGRIAWATQLNPARGQKLRAQFERIVWPGEQP

SEQ ID NO: 5716 - protein, 447 aa, Kineosporia babensis
  source 1..447: note = Related to NZ_JAJOMB010000003.1
MSDPRTRVLARALGNAFLTAPEWALRPLTDNAATVLGGRRRWTRRLAREVLDAYPRPPADRPRELAAFIQASPILFTAVLRSVETGRPLRVIRMPPAPVQMNTRRPWPVPKIDSIQDLARLLDLETAQLDWFADVKGLQRRAAPGPLHHYRYAWASTASKRPRLLEAPLPRLRSRQRTLLEQILARIPTHPAAHGFVPGRSAVTGAEPHAGAAVVIGLDLAAFFASIQVGQVYGIFRAAGYAEPVAHVLTGLCTTRTPVRVISNMPATSDVESRVRLRRLLAGGHLPQGAPTSPALANLCALGLDRRLNGLAAAVGMTYTRYADDLTFSAGEEVNARRLITAVDEIVRSEGFALQSAKTRIRRDFQRQEVTGIVVNAHPNLNRREYDELKAILHNALRHGPEGQNRAGHRDFRAHLLGRIAWVAQLNPERGRKLRETFEAITWPSLS

SEQ ID NO: 5717 - protein, 453 aa, Motilibacter aurantiacus
  source 1..453: note = Related to JAANNO010000010.1
MSRRTTREAGLANALALSFLAGAWSVDGLEQRGTTVLGDRPRWLRRLVRLVTDAYPRPPVDRPRELAAYVLAAPPLRRAAYSAARRGHRLPAPRAWLAVPTAMAPTRMAPSRWQVPAIDDVGALADLLDLEMGQLEWLADARGLLRRAPQGPLHHYRYRWQPKAGGARLLEAPLPRLRRLQRTLLDTVLARVPVHPAAHGYVPGRSAVTNAAAHVGAAVVVSLDLEAFFSSLSAGRAYGVLRTAGYPEPVAHLLTALCTNAVPVHVLRGLPDSVPVDVRFRLRRALATPHLPQGAPTSPTLANLCAHALDRRLAGYAAAAGVTYTRYADDLTFSGGPGLLRAAPALVTAVRRIAAAEGHRVNVAKTRVRSSAQRQVVTGLVVNERLNLPRGEYDRLKAVVHDAVRHGPAAANRHGHRDFRAHLEGRVAWLEAVHPERGARLRAQLARVAWPVS

SEQ ID NO: 5718 - protein, 443 aa, Nakamurella panacisegetis
  source 1..443: note = Related to NZ_LT629710.1
MRARDRLAAALADGMLAGDWAGAPMRAQGALVLGERHAWIRRLVREVLEFYPEPPADRPRELARLIGRTRTMEELERRARRRRRRLPIPQHRVTTPTTTVRRPFPVVSINDATALAECLGLSVPDLLWFADTKGLQRRAASVGLHHYRSTWVGTRSGSRLLEAPRPRLKEVQRQILQQLLAPIPVHEAAHGFVAGRSAVTGARPHVDAATVISLDLESFFSSVSGRRIYGLFRMAGFPEPVAHLLTGLCTQATPVDVLRRMPSGHPAAFRLRRKLAEPHLPQGAPTSPHLANLAAFGLDRRLAAYASRIGARYTRYADDLTFSGPDLRRRSRGVVAAVARIVAEEGFALNTTKTRVRGQDDRQTVTGVVVNRHPTVSRAEYDTLRAILHNCVRFGPESQNRLLHTDFRSHLRGRVAWVAALDPERGRRLLATYSQIDFSPSGT

SEQ ID NO: 5719 - protein, 441 aa, Nakamurella sp.
  source 1..441: note = Related to NZ_CP060298.1
MPDGRARLAIALADAFLAGAWTSDGLRTQGQLVLGARHAWLRRLAREVIKAYPEPPSDRPRELFAFVLQTQAMAQVERRAARPGGGFPLPLHRLTAPTSMIRHPFPVTSLDHAGDLAALLGVSMEELLWFGDTNGLQRRARSDRLQHYRSTWVPSVSGGRLLEAPLSRLKAIQRQILAQILTPIPIHDAAHGFVVGRSARTGAAPHVGTGLLISLDLESFFASITGSRIYGVLRAAGYPEPVAHLLTGLCATATPVRVLAEMPGTAAPSAFRLRRRLAEPHLPQGAPTSPQLANLCAFAIDRRLSAYASAIGAVYTRYADDLTFSGDTLVVRQRGVVAAVARIVAEEGFRLHIDKTRTRGRDARQQVTGVVVNASTTVPRRDYDTLRAILHNCVTHGPSTQNRVEHNDFRAHLRGRISWVASLDAGRGRKLLATFEQIDWT

SEQ ID NO: 5720 - protein, 441 aa, Kineococcus siccus
  source 1..441: note = Related to JAAALN010000029.1
MSEALVASALAAALLDGPWDAAALTTRATAALGGRRRAWVAGVVADVLAAHPRPPLDAPRSFTTELARHPALARAVHAAERRGRPLRPAHLEPVPSSMGRRRWPVPVLDGVADLAALLDLDLAELDWFADPRGLQRRASGTALHHYTSRWVAKRGTPRLIEAPKPRLRHLQRIVLHAVLDVVDVHDLAHGFVPGRSAVTGARRHTGADVVVRMDLSAFFASVGAARVYGEFRRLGYPEAVAHLLTGLCTHRTPLTVLRTLPAGGRAEDRFRLRQWLSAAHLPQGAPTSPALANLVAGPLDRRLAGLADSMGLRCTRYADDVTFSGGPQLRSGAGRLVRCVTAIAAEEGFVVNGDKTRVRGAEQRQVVTGIVVNERTSVPRDEFDRLKALLHNAVRSGPALQNRRGHPDFRAHLAGRVSWVEAVSPAKGRRLRATYDRIAWG

SEQ ID NO: 5721 - protein, 439 aa, Paenibacillus sp.
  source 1..439: note = Related to JALDAT010000072.1
MSAAVAAALAAAFLDAPWEAPQLAAAGRWALGLRRAAWLDRLAADVVAQHPRPPCDAPRALTALLVAHPELASAQAVARRRGRPLRVRHLVAVPAAMGRARWPVPPLGGAADLAALLEVSPGELDWFADVRGWQRRAEGTALHHYRASWVAKRGAPRLLEAPKPRLRALQRRLLREVLGAVPAPPVVHGFVPGRSAVTGAREHCGAAVVVRVDLTAFFASVDAARTYRAFRSLGYPEAVAHLLTGLTTHATPARDLRGMPPGGDADERFALRHRLAAAHLPQGAPTSPALANLCARSLDRRLAGLAAALGARVTRYADDVTFSGGEELAAGAQRLVRCVTRVAADEGFTVNPAKTTVRGRGERQLVTGVVVNERPNPVRSEFDRLKAVLHRCAVHGPASVEAPGGVDLRSHLAGRVGWVEALSPSRGRRLRESFDAIAW

SEQ ID NO: 5722 - protein, 439 aa, Kineococcus aurantiacus
  source 1..439: note = Related to JACCBB010000001.1
MAEPDAVAAALAAAFLDGPWTADALTARAREAVGVPRARWVARLAGEVTGRFGTPPLDAPRELRAAVAGSPAYAGARDAARRAGRPLRVAHLATGTTRMGRNRFSVPPLDTVDDLAAFCGLDPAQLDWFADVHRFQVRAGGSALHHYRARWVAKRGAPRLLEAPKPRLKAVQRKVLHEVLDRFPVHDAAHGFVPGRSPVTGAWDHVLARTVVRFDLEGFFASVPAARVHGTFRSTGYPEPVAHLLTGLVTHVTPLRDLRAMPDGGSAEARHRLRRNLSHAHLPQGAPTSPALANLCARGLDARLDGLARVLGATFTRYADDLTFSSTTGLDPVRLHRAVRAVVADEGFTLNPAKTRVRGAGSRQVVTGLVVNERPNVPREEFDRLKAVLHNCVRHGPTSQDREGHRDFRAHLLARVARVESVNPAKGRRLRRSFEQIAW

SEQ ID NO: 5723 - protein, 448 aa, unidentified
  source 1..448: note = Related to JAFAOY010000834.1; note = Solirubrobacterales bacterium
MYDARGRAFLGRCLADAFLAGVWNERALVDRAGRALDRRPRWVRAVAREVLAAYPRPPSDRPRELARLIELALRERPAPEGDSEPPRVRRWLVPEPAMGRRRWPVPEIASLGALAGFLQVSDGELAWLADARGLERTVENERLRHYRYGALPRPGRPVRVIERPKHRLKSIQRRVLHELLDWIPVHEAAHGFTRGRSVRTHARAHTGRFVVVRFDLEDFFASVRAARVYGIFRTAGYPESVAYALTVLTTNVVPATVWHELPRPVAPRLLGAHHHLGRRLATPHLPQGAPTSPALANLAAFRLDRRLDGLAKSLEISYSRYADDLTFSGDARLVRAAATVRRAVTQIAREEGFTVNESKSMLATRAGRQRVCGVVVNEHLNTPRREYDVLRAILHNSSRYGPQTQNRAAIPNFRAHLLGRISWIESVNPRRGDKLRRHFASITWQEDS

SEQ ID NO: 5724 - protein, 448 aa, unidentified
  source 1..448: note = Related to JAFARL010000184.1; note = Solirubrobacterales bacterium
MYDVRARAYLARCLADAFLAGVWTERAMVDRAGRALDPRPRWVRAVAREVLAVYHRPPADRPRELARFIGLVLADRSAPEDAPNPPQVRRWLIPEPAMGRRRWPVPEIASVGDLASFLGVSDGELAWLADARGLERMVKDERLRHYRYATLPRAGRPVRVIERPKHRLKAIQRRLLHEVLDWIPAHEASHGFTRGRSVRTHAGGHTGRFVVVRLDLADFFASITAGRVYGIFRTAGYPESVAHALTALMTNVIPAVLWHTLPRPAIPRQIAAHHHLGRQLATPHLPQGAPTSPALANLAAFRLDRRLTGLAGSLEISYSRYADDLTFSGPTQLVRRAGTLRRAVAQIAREEGFTVNDDKSMLATRAGRQRVCGVVVNQHLNVPRREYDLLKAVLHNSAIHGPQTQNREGVVNFEAHLLGRITWVESLNPTRGDKLRRQFAKIVWHDDP

SEQ ID NO: 5725 - protein, 449 aa, unidentified
  source 1..449: note = Related to JACCUP010000282.1; note = Thermoleophilaceae bacterium
MLSAPMYDHLTRASLSRCLADAFLAGAWNENRLAGRAGQALAPRRGWIGPLVREVLAVYHRPPADRPRELTRFIALQLEQMPPSDLDPPRVRRWFVAELAMGRRRWPVPDLASAGALAGWLEVAPGHLDWLADARGLERTTATERLRNYRYSWLPRAAGPPRLIERPKARLKAIQRRLLHEILDWIPAHESAHGFTRGRSVRSHAAAHTGRYVVVGLDLKDFFASVVAGRVFGIFRTAGYPEPVAHVLTALTTNAVPVEEWASVPRPRDPGLVGAHHRLGRRLATPHLPQGAPTSPALANLVAFALDRRLAALARATGVTYTRYADDLTFSGPASLLRGADRFRSSVADIAREEGFRVNERKSTLMTRAGRQRVCGVVVNQRLNVARTEYDELKAILHNAARSGPSSQNRHAVADFRAHLLGRIAWVESLHPGRGERLRARFEVIDWDR

SEQ ID NO: 5726 - protein, 450 aa, unidentified
  source 1..450: note = Related to JACCUX010000400.1; note = Solirubrobacterales bacterium
MDRRTRAYRSLSPCLADAFLAGPWDPAALATRAGLVLEPRPPWIGLLVRNVLAAYERRPADRPRELARYIALQLERVDADTAGPRPRVRRWLLAELAMVRRPWPVPELASVGAVANHLEVSDRHLAWLADVRGLERTGSDEKLRHYRYGWLPRHGGPPRVIERPKARLKSIQRRVLHEILDWIPAHDAAHGFTRGRSARSNAAAHTRRPVVMALDLEDFFASVRAPRVYGIFRTAGYPEPVAHTLTGLCTNAVPIEEWAAVPHPTASPLAQAHHRLGRRLATPHLPQGAPTSPALANLAAFTLDRRLTGLALALDATYTRYADDLTFSGSSRLLDRGGQIRATIATIAREEGFAVNTRKSVVTTRAARQQVCGIVVNDRLNVTRHEYDELKAIIHNAARRGPSGENRAGLSDFRAHLLGRIAWIESLHPARGARLRSQFTRIVWDRQGAA

SEQ ID NO: 5727 - protein, 476 aa, Patulibacter minatonensis
  source 1..476: note = Related to NZ_KI912613.1
MRRGPAPLGTPPGDLAQAAAAALLAGAWTERAMLRRLQQAVRPLGPRLPARLVASVLALHRTPPADAPRALAQEIDDLVRGHAPRGGWPPNARVRRRYAPPTAMRGARWPVAPLPTVAALGRLVGERDPGALAWLADVRGLEREVPDERLRAYRYTHHPRTGGPPRVLERPKARLKEVQRTLLREVLAPIPPHDAACGFVAGRSVLDHAARHVGRTVVVQLDLEDFFAQVTAGRVFGILRAAGYPEPVAHAIVGLTTNVVPYGFWARIPRPDGPREIERHHRLGRRLATPHLPQGAPTSPALANLAAFRLDRRLDGLARSLGLTYSRYADDLALSGGRHLARRAYELERTIAAIAADEGFRVNPQKTRVRAREGRQTVCGIVVNERPAVARRDVDRLRALLHEAEVAGPRAADRGGMGPAFEAHVRGRVAWVAQVHPARGARLREQLRRVDWSALRDTGDAGVHRSSPPGDRPFTS

SEQ ID NO: 5728 - protein, 456 aa, Conexibacter woesei
  source 1..456: note = Related to NZ_AUKG01000002.1
MPPPPDQPQPLRSDAAAALADAFLAGAWTRPGMIQRGHDALGVEAVPGLRWLRREVDRVLAAYAHPPRDRPRELAAFVAATIDARRAAPFPPKHRLVAPGAMAGRRPWPAIPELDTAGDLADWLALSHGELAWFADVQSRERRADDRRLRHYTYAWSARPGAPVRFLEQPKARLKAIQRRILHKLLVHVPAHDAAYGFVPGRDVLQHARRHAGAAAVLRFDVRDFFVSLPAGRVYGIFRLAGYPEAVAHALTGLTTNAVPPGAWADVPAPADPALHRQHVLLGRRLAAPHLPQGAPTSPLLANLCAFTLDRRMAALAVKLGATYTRYADDLVLSGDRALARHAQRTTQTVRAIVRGQGLRLNETKTTIMVAAQRQRVTGIVVNDHPNIARDEYDRLRAILHNAARAADPHAENRAHVPDFRAHLRGRIAWVEHVNPQRGAKLRARFEQIAWPASPR

SEQ ID NO: 5729 - protein, 444 aa, unidentified
  source 1..444: note = Related to JAEMSV010000041.1; note = Solirubrobacteraceae bacterium
MTSDLQTVAGALASAFLRGVWNERRLVARGERMIGQRPVWLTPLVRRVLEGYHRPPADRPRELQAFIRVSLRDITGRARLAKRVEMRHWSPTPTVMVDRRWRVPILHTVGDLGALLGLDPGALMWLADARGLERFAPEERLRNYRYTWVPRTTGAPRLLEAPKARLKVAQRDVLRRILCWVPPHDAAYGFIRGRSARDHAARHTGREVVLSFDLMDFFAGVPARRVYGIYRLAGYPEPVAHCLTALCTNQIPRTVSNDILGRPDPAYALLRRRLGTPHLPQGAPTSPALANLVAHALDRRLTGLAAALGGTYTRYADDLVISGDAQLARRIGVAQRAVAEIAADEGFVIRPAKTRRMSRADRQAVCGIVVNARTNIPRRDYDRLKAILHDAVRHGPDAANRDGIADFRAHLAGRVAWVTSLNPDRGAKLRTTFDAIVWDPRPQT

SEQ ID NO: 5730 - protein, 419 aa, unidentified
  source 1..419: note = Related to nan
MLTRREVSEVLAVAFLSGEWHFEELQRRARRALGRRAWLRPLAIEVVDAYRRPPLDRRRELVAYIEHAIPRRVRLPPRILRQPTFHPAMGFARWPVPRIDTVGDLAAFLGLEVGELEWFADVRGLERVVDDERLRHYRYTRLPRASGPPRVLEAPKPRLKALQRRLLREVLAFVPVHPAAHGFVGGRSARTHAATHVGRRVVVRVDLEDFFAGVTAARVFGIFRACGYPEGVAHVLTGLCTNAVPAGESVAGHWRLSRRLAAPHLPQGAPTSPALANLAAFALDRRLSGLAAAVGARYSRYADDLVFSSDTHLRTPVAAIGGIARDEGFQVNAGKTRVMGRGRRQTVTGVVVNAHPNVPRVEYERLKATLHRAAHDGPAGLDPTVLLGRIAWVESLNPARGAKLRTAFGHIAWTPLENG

SEQ ID NO: 5731 - protein, 403 aa, Solirubrobacter pauli
  source 1..403: note = Related to NZ_RBIL01000001.1
MASSLSRRETARVLAGSFLGGEWELEAMAKRAGRALGRRVWHRRVAERTLRAYRHPPRDRPRELADFVFTLLDDVRLPPRLLREPVFHTEMAPGRWPVPRIDTLGDLADRLELEPGQLGWLADVRGLERTSTGKLRNYTYVRVPRRSGPPRVLERPKARLKEIQRWILRELLAWIPTHDAAHGFVKGRSAHTHAALHVGRKVVVRLDLEDFFAAVSAARVYGVFRTAGYPEAVAHTLTGLCTNVVPADESVPGHFRLARRLATPHLPQGAPTSPALANLAAHALDRRLTGLAREIGATYSRYADDLVLSADHHLRTPHAAVTELARDEGFTVNRGKTRTMGRGSRQVVTGIVVNAHPNVPRAEYDRLKAIIHRGDYDREHVLGRIAWIAAINPARAAKLRSSM

SEQ ID NO: 5732 - protein, 461 aa, unidentified
  source 1..461: note = Related to QHCD01000081.1; note = Pseudonocardiales bacterium
MNRDAAGHRATAADVRALIPVLRPSLRSVAGSLADALLDGEWEADAMVSRVTAALDRPGRWVRQLVRITRLSFPVAPHDSPESLRRVILAGPPLPQVAAADALAGRPLPTLARRPLPARVVALQAGLPRWDGVGDLAAYLGLTVGELAWFADTRGYEARVRAETLRHYRYRLLQKRIGGCRLIESPKWQLREIQRRILHEVLDQLPVHDAAHGFRPGRSVIGYVEPHAGRRVVIHLDLRDFFARVGAGRVWSVFRWAGYPDAVAHVLTGLCTNVSPTAVRSDVRRTGALRLAAACGTVHLPAGAPTSPALANLCAYALDRRLAGLARRVSMRYTRYADDLAFSGGRSLLWGTDALIDRIAAIAAAEGFPVNSQKTAVLTASRRQRLAGVVVNDHPNLDRREFDALRATLHNCVHSGPSSQNRGSHQDFRAHLTGRVSWACLLNPAKGARLERLLEQIDWAR

SEQ ID NO: 5733 - protein, 454 aa, unidentified
  source 1..454: note = Related to CADCTB010000222.1; note = Acidimicrobiales bacterium
MTRESAAVTVARGLAHAFLAGDWDPPAMASRGREAVETRRVWVRHLADAARHAYPDAPRDRPRELATFLSVCPPLTKAIAAARRRSEEPPTIRNWLVAETAMGPAPWPVANLHTLRDLQDLIGMSTATLNWFADTRGLERTVADERLRHYRYHWAPKRNGGARLIEAPKPVLKHLQRVLLREILEPVPVHPAAHGFRRDRSALSHANGHIQRNVVIRVDLEDFFASVRAGRVYGIFRGCGYPEPVAHVLTALTTNAVPRAVSAQTGAPSVVESTAAFRRLAGHLAHPHLPQGAPTSPALANLAAFGLDRRLAGLASAAGLTYTRYADDLAFSSIDPRSEGQNRRLVEWITGIAEDEGFRVNVAKTSVRHAGQRQRLAGVVVNERANVERRQYDLLKATLHNAARHGPAGQNRTGHPAFRDHLRGRISWVNQLNPARGERLLATFAQIDWDSADR

SEQ ID NO: 5734 - protein, 324 aa, unidentified
  source 1..324: note = Related to JAFMRN010000002.1; note = Solirubrobacterales bacterium
MPAWNVAAIDSLPELAERLELSLEQLQWLADVRGLERSVNSERLRNDRYRLLPRASGVPRVLEIPKGRLKEVQRWVLREILNQIPTHPAAHGFVRGSSVRTHAEVHSGQAMVLGLDLKDFFASVRRAQVKAIFRAAGFETEVARTLAGLCTNTTPRHVGASRLLATPHLPQGAPSSPALANLAAFALDRRLSGLAYAHDLLYSRYADDLTFSGPMPGRGRRRFLVALATEIARDEGFAINERKTAMHPAGGRQQVCGVVVNARPNVPRRDYDRLKATLHNLAAAGPVDRSEAAALAGRIAWVASLNPARGAKLREKYAKIEWSE

SEQ ID NO: 5735 - protein, 440 aa, Euzebya tangerina
  source 1..440: note = Related to NZ_PPDK01000002.1
MRIIVAAFLDGSWEPTAMAARAHHDLGLLTVRREIDFGGTEPYVWLHRAADLVADTFVAPPRSELRAMRVLVAEHAAPAILPLLDHPIAGPHTGTALVSSAMSEPRWPVVHLDTVGDVAAALGLLPTQLSWFADVASLEQSVTDERLRHYRYRWVAKSGSGQRLVEAPKQTLRRVQRWVLRRVLHNIPVHPATHGFVPGRSVHTYVGPHVGRRVVVSLDLRNFFTSVAAGRVFGIFRVAGYADSVAHTLTGLMTNAVPADILRGHPDAPRALRFPHLPQGAPTSPALANLAAFSLDRRLSGLATAMDLRYTRYADDLAFSSAGGLSRRARRRLVVTVEEIARAEGFDVNRAKTRAATAGRQQRLAGRVVNAVDNAPRRDYDRLRAVLHDASINGPVAANREGHPAFEAHLRGRIHWVASDSPARQRRLWQLFDQIDWSEG

SEQ ID NO: 5736 - protein, 436 aa, Nocardioides hwasunensis
  source 1..436: note = Related to NZ_JACXYY010000008.1
MRPELARALAAGFLAGEWTRAGLTASGAVVLGRRPRWLAPLVRQTLDLYPRPPGDRPRELATNLARLPAAEKAALAGPQVHPVAETHMIANRWRLPELDRLADLASYLRVTDGELDWFADPRHLARLTVQPPLQHYRVSHRVAASGGIRVLEAPKPRLRAIQRRLLDELASRIPPHDAARGFRPGGSVRAYAAPHAGRSVVLRMDLEAFFASVTVSRVYGIWRTAGYPEPVAHALAGLVTSVLPLASWRAIPTPVDEGLLDAHWRLGRRLARPHLPQGAPTSPAMANLAAYHLDVRLSALARSWGGRYTRYADDLAFSGATGWGTGTSRLLDAVERIVVDEGFRLNPRKTGVMPRAGRQSLGGLVVNERPRVSRADVDRLKAILHNCRVHGPSSQNRDDHPAFEEHLRGRVAWVAQHDRLRGARLLAMHAEIDWSR

SEQ ID NO: 5737 - protein, 436 aa, Nocardioides exalbidus
  source 1..436: note = Related to NZ_FNRT01000002.1
MRPELARALAAGFVAGEWTRPGLEASGAVVLGRRPRWLAPLVRQVLELYPRAPVDRPRELATNIASRPAAAKALRARAVVLPIAETRMLANRWRLPVLDDLGDLAAFLGTSPAELDWFADPRRLARLTKQAPLQHYRVSHLVAASGGIRVLEAPKPRLKAIQRRLLHEVASLVPPHDAARGFRPGGSVRSYAAPHAGRSVVLHLDLEAFFASVTVSRVYGIWRSAGYPEPVAHALAGLVTAVLPLAAWRAIPAPADDGLLDAHWRLGRRLAAPHLPQGAPTSPAMANLAAFGLDVRLTALARSWGGRYTRYADDLAFSGERGWGTGTSRLIDAVERIVVDEGFRLNPRKTGVMPRAGRQALAGLVVNERPRVSRRDVDLLRAILHNCLVHGPSSQNRDDLPAFEEHLRGRIAWVAQHDTLRGARLLAVHREIDWSR

SEQ ID NO: 5738 - protein, 349 aa, Nocardioides lijunqiniae
  source 1..349: note = Related to NZ_JACJGN010000045.1
MLTNRWRLPELHDPADLAELVGITTSELDWFADPRRLARSAGDVPLQHYRVGHRTAASGGIRVLEAPKPRLRRIQRQILDEVASLIPPHDAARGFRPGGSVRSYAAPHAGRPVVIRLDLEAFFASVTVARVYGIWRSAGYPEPVAHLLAGLVTSVLPRSAWRGVPRPADERLLDAHWRLGRRLAASHLPQGAPTSPAMANLAAFGLDVRLTALARSWGGRYTRYADDLAFSGAAGWGSGTSRLLDAVETIVRDEGFTLNARKTGVMPRGGRQTLGGLVVNERPRVSRHDVDLLRAILHNCHRHGPSSQNRHDVPAFEEHLRGRIAWVAQHDPVRGARLLAVHESVDWSR

SEQ ID NO: 5739 - protein, 436 aa, Nocardioides sp.
  source 1..436: note = Related to NZ_CP053660.1
MRADLARALAAGFLAGEWTRPGLVESGSVVLGRRPRWLAPLARQTIDLYPRPPHDRPRELAASISARPAAAKAAGVRPLVQPVSPTRMMTNRWRLPVLDGLGDLADLLGLTSSELDWFADPRHLARTAADGRLQHYLVSHRVAASGGIRVLEAPKRRLKGIQRVLLDEVASLIPPHDAARGFRPGGSVRSYAAPHAGRPVVVRLDLEAFFASVTVSRIYGLWRSAGYPEPVAHCLAGLTTTVLPHAAWRAVPRPADDDLLDAHWRLGRRLAAPHLPQGAPTSPAMANLAAFGLDVRLTALAESWGGRYTRYADDLAFSGARSWGTGTSRLLEVIEEIVRDEGFRLNTRKTGVMPRAGRQALGGLVVNEQPRVARREVDLLRAILHNCRRHGPSTQNRDGVPAYEQHLRGRIAWVAQHDPVRGARLLTEHEAIDWTR

SEQ ID NO: 5740 - protein, 436 aa, Nocardioides cavernae
  source 1..436: note = Related to NZ_JAFBCA010000001.1
MRSDLARALAAAFLAGEWTQPGLVASGTTVLGRRARWLPPLVRQTLALYPRAPVDRPRELAANLASRPAAAKALRAVPLVRPVVATQMLTNRWRLPVLDDLADVASFLHLSASDLDWFADPRHLARSASDVPLQHYRVSHRVASSGAIRVLEAPKPRLKAVQRRLLHELAALIPPHDAARGFRPGGSVRSYAAPHADRSVVLRLDLEAFFASVTVSRVYGIWRTAGYPEPVAHCLAGLVTSVLPLSAWRAVPTPADDGMLDAHWRLGRRLAAPHLPQGAPTSPAMANLAAFRLDVRLTALARSWGGRYTRYADDLAFSGERGWGTGTSRLIDAIGSIVADEGFRLNARKTGVMPRAGRQTLGGLVVNERPKVARHQVDLLRAILHNCHRHGPSTQNHDDVPAFEEHLRGRIAWVAQHDPVRGRRLQAVHDTIDWSR

SEQ ID NO: 5741 - protein, 436 aa, Nocardioides sp.
  source 1..436: note = Related to NZ_CP022296.1
MRVDLARALAAGFLDGEWTQQGLLASGTAVLGRRPQWLAPLARQTLALYPRAPVDRPRELATNISSRPAAARARSAAPQVQPVVATRMLGNRWRLPVLDGLGDVADFLGVSASELDWFADPRHLARGTAGVPLQHYRVSHRVAASGAIRVLEAPKARLKVIQRRLLREIASMIPPHDAACGFRPGGSVRAYAAPHADRSVVLRLDLEAFFASVTVSRVYGIWRTAGYPEPVAHCLAGLVTSVLPRSTWRAVPQPRDDRLLDAHWRLGRRLAAPHLPQGAPTSPAMANLAAFRLDVRLTALARSWGGRYTRYADDLAFSGAAGWGSGTSRLIDAVETVVRDEGFRLNPRKTGVMPRAGRQSLGGLVVNDSPRVARHQVDLLRAILHNCHRFGPSTQNRDDVPAFEDHLRGRIAWVAQHDPVRGARLQAVHDAIDWSR

SEQ ID NO: 5742 - protein, 436 aa, Nocardioides sp.
  source 1..436: note = Related to JABJQY010000002.1
MRDDLARALASGFLAGEWTQDALVASGTVVLGRRHPWLPPLVRRVLTAYPRPPADRPRELAAVIAALPAAARARNAAPVVHPVAETRMLTNRWRLPVLDGLDDVAAFLRLEPSELDWFADPRRLARSASDVPLQHYRVSHRVTPSGAIRVLEAPKPRLKALQRRVLTEVASLIPPHDAATGFRPGGSIRRYTAPHAGRSIVLRLDLEAFFATVSVSRVYGIWRTAGYPEPVAHCLAGLVTCVLPRSAWRAVPRPADERLLDAHWRLGRRLAAPHLPQGAPTSPAMANLAAFRLDVRLSALARSWGGGYTRYADDLAFSGDAGWGTGTSRLLDAVEAIVRDEGFRLNQRKTGVMPRAGRQVLGGLVVNEHPRVARHQVDLLRAILHNCRRFGPSSQNRDDVPAFEDHLRGRIAWVAQHDPVRGARLQAVHDAVDWSR

SEQ ID NO: 5743 - protein, 436 aa, Nocardioides sp.
  source 1..436: note = Related to NZ_CP087710.1
MSPDLARALAAAFLGGEWTEPGLVASGAGLLGRRPAWLRPLARQTLALYPRPPLDRPRELATNVASRPAAARAGAAAPLAQPVAQTRMVANRWRLPELDTLADLAGFLGLTATELDWFSDPRRLARDASAVPLQHYRISHRPAPSGAIRVLEAPKPRLKALQRRLLRELAGRIPPHDAARGFRPGGSVRSYAAPHAGRSVVLRLDLEAFFASVTVSRVYGIWRSAGYPEPVAHALAGLVTTVLPRAAWRSVPRPADDSLLDAHWRLGRRLAAPHLPQGAPTSPAMANLAAFGLDVRLTALARSWGGRYTRYADDLAFSGERGWGTGTSRLLDAVEVVVRDEGFRLNPRKTGVMPRAGRQRLAGLVVNDAPRVAREEVDLLRAILHNCARFGPSTQNRAGVVAFEDHLRGRIVWVAQHDPVRGARLLEAHRAVDWSR

SEQ ID NO: 5744 - protein, 436 aa, Nocardioides sp.
  source 1..436: note = Related to JAKJHZ010000001.1
MRPDLARALSSAFLAGEWTRAGMVESGAVVVGRRARWLGPLARQVLELYPRAPLDRPRELATNLARCPAATRALASGPMVHPVAVTRMMTNRWRLPVLHDLDDLATLLDLDQAALAWFADPRHLARGATEAPLQHYRVSHRPAPSGAIRVLEAPKPRLKRIQRRLLDELAGRIPPHEAARGFRPGGSVASYAAPHAGRPVVLRLDLEAFFASVTVSRVYGTWRSAGYPEPVAHALAGLVTTVLPASAWRAVPTPSADHLLDAHWRLGRRLALPHLPQGAPTSPAVANLAAFGLDVRLTALAASWGGRYTRYADDLAFSGDRGWGRGTSRLIDAIETVVRDEGFRLNARKTGVMPRAGRQRLAGLVVNDRPRVARSEVDLLRAILHNCRRHGPSSQNRDDLQAWEAHLRGRIAWVAQHDPARGARLQEVHDAIDWSR

SEQ ID NO: 5745 - protein, 436 aa, Nocardioides alpinus
  source 1..436: note = Related to FOKC01000001.1
MRADLARALASGFLADEWTQPALVASGRTVLGRRPAWLTPLVRQVLELYPRAPADRPRELAANIAACPAATRAGQAGPVVHPVARTQMVANRWRLPVLDRLDDVATFLDVSHTDLDWFADPRRLARSASDAPLQHYRVSHRPAPSGAVRVLEAPKPRLKVIQRRLLDEVAGLIPPHEAARGFRSGGSVRSYAAPHAGRPLVLRLDLEAFFASVTVSRVYGIWRTAGYPEPVAHCLAGLVTCVLPRSAWRAVPAPTDDGLLDAHWRLGRRLAAPHLPQGAPTSPAMANLAAFRLDVRLTALAQSWGGRYTRYADDLAFSGDAGWGRGTSRLIDAIGLIVRDEGFGLNARKTGVMPRAGRQRLAGLVVNDEPRVARGEVDLLRAILHNCRTHGPSSQNRDDVPAWEEHLRGRIAWVAQHDPVRGARLRAVHDAVDWSR

SEQ ID NO: 5746 - protein, 436 aa, Nocardioides luteus
  source 1..436: note = Related to NZ_JZDQ02000022.1
MRADLARALAAGFLAGEWTRNGLVASGAVVLGRRTAWLRTLATQALELYPRPPHDRPRELAVILRSLPAAEKAVAVGPVTQPVAPTRMVTNRWALPQLDDLASVAAFLDVTAAELDWFADPRRWARAAEEPRLQHYRVSHRTAPSGAIRVLEAPKPRLRAIQRLLLDQVVSRIPPHDAARGFRPGGSVRSYAVPHAGRPIVLRLDLEAFFASVSVSRVYGIWRTAGYPEPVAHCLAGLTTCVLPRSAWRAVPRPGEDELLDAHWRLGRRLAAPHLPQGAPTSPALANLTAYGLDVRLTALARSWGGRYTRYADDLAFSGEAGWGHGTSRLLDAIEEIVRDEGFRLNPRKTGVMPRGGRQRLAGLVVNERPRVPREEVDLLRAILHNCRRHGPSTQNRDQVPAFEEHLRGRVSWVAQHDPVRGARLLAELDAIDWSR

SEQ ID NO: 5747 - protein, 436 aa, Nocardioides lianchengensis
  source 1..436: note = Related to FMZM01000021.1
MRDDLARALAAGFLAGDWTATGLRASGAGVLGRRPRWLAPLVQQTLDLYPRPPHDRPRELATNLAGLPAAAKALRTRPVAQPVAPTRMLANRWRLPVLDDLGDLADLLGVTATELDWFADPRHLARSAADVPLQHYRVSHRIAPSGAVRVLEAPKPRLKAVQRLLLDEVLSRVPPHDAARGFRPGGSVASYAAPHAGRPVVVRLDLEAFFASVTVSRVYGIWRTAGYPEPVAHRLAGLVTAVLPRSAWRAVPRPAGDGLLDAHWRLGRRLAAPHLPQGAPTSPAVANLAAFRLDVRLSALARSWGGRYTRYADDLAFSGATGWGTGTSRLLDAIEEIVRDEGFRLNARKTGVMPRAGRQTLGGLVVNDRPRVARAEVDRLRAILHNCRRSGASSQNRDGVPAWEQHLRGRIAWVAQHDPVRGARLLAEHDAVDWSR

SEQ ID NO: 5748 - protein, 434 aa, Nocardioides salarius
  source 1..434: note = Related to JAFBBZ010000001.1
MRDDLAHALAAGLLAGSWTQRGLVASGAEVLGSRRRWLDRLARHTLELYPRPPLDRPRELARIVAAFVDADAAARPATRPVVGTRMLTNRWGLPTLHDLNDLAGWLGLTSSELEWYADPRRLARTTSQGRLQHYRVSHRVASSGAIRVLEAPKLELKGIQRRLLDEVLSSVPPHEAARGFRPGGSVRTYALPHAGRPVVLRLDLESFFASVTVARVYGIWRSAGYPEPVAHRLSGLVTSVLPLSLWRSVPRPADDALLDAHWRLGRRLAAPHLPQGAPTSPALANLAAFRLDVRLSALAASWGGRYTRYADDLAFSGGRSWGTGTSRLLDAIEGVVRDEGFRLNQRKTGVMPRGGRQVLGGLVVNERPRVSRAEVDRLRAILHNCLTHGPSTQNRERHPAFAQHLRGRITWVAQHDPVRGARLLAQHDAVDWSR

SEQ ID NO: 5749 - protein, 436 aa, Nocardioides aquaticus
  source 1..436: note = Related to NZ_CP075371.1
MRADLARALAAAFLAGEWTQSAMVQGGAVVLGSRRRWLTPLARQVLDLYPRPPLDRPRELATLISTRPAVARTGNARPVVQPVVATRMVRNPWRLPALDDLGDLAHHLGVEGSELAWFADPRRWARGTSEGRLQHYRVSHRVAPSGAIRVLEAPKPRVRRIQRSLLDDLVSRVPLHDAARGFRTGGSVRSYAAPHAGRPVVLRLDLEAFFASVTVARVYGIWRSAGYPEPVAHCLAGLTTSVLPRSVWQAVPGPADDGLREAHWRLGRRLAAPHLPQGAPTSPALANLAAYRLDVRLAALARSWGGRYTRYADDLAFSGERDWGDGTARLIAAIDVVARDEGFRLNPRKTAVMRRGDRQRLGGLVVNRRPHVGRTEVDLLRAILHNCRRHGPSSQNREGHPAFEEHLRGRVAWVAHHDPARGARLRAALDAVDWTR

SEQ ID NO: 5750 - protein, 349 aa, Nocardioides kribbensis
  source 1..349: note = Related to NZ_JADCLL010000001.1
MLTNRWRLPVLHDLADLAALLELDAGELDWFADPKHWARTAGEAPLQHYRVSHRVAASGGIRVLEAPKPRLRRLQRRLLDEALGLVPPHDAARGFRAGGSVGSHAAPHAGRPVVLRLDLESFFASVTVGRVHGIWRTAGYPEPVAHALAGLTTAVLPLAAWRGVPRPADPGLLDAHWRLGRRLAAPHLPQGAPTSPATANLAAFGLDVRLTALAAAWGGRYTRYADDLAFSGDAGWGRGTSRLLDAVEEIVRDEGFRLNPRKTAVMPRAGRQSLAGLVVNDRPRVARHEVDLLRAILHNCRRHGPSTQNRDQVPAFAEHLRGRIAWVAQHDPARGARLLAEHGAIDWTR

SEQ ID NO: 5751 - protein, 436 aa, Nocardioides litoris
  source 1..436: note = Related to NZ_VDMR01000001.1
MREDLARALAAGFLAGAWDRDGLLASGRGVLGRRPAWLRPLVRDVLLHYPRPPHDRPRELATVIGAFLAADRSYADAPAHRPLAPTRMLANRWGVPALHDLADLADLLDLDTGELDWFADPKRWARRTSEPRLQHYRVSHRVVATGAVRVLEAPKHRLKVLQRRLLDEVLAVVPPHDAARGFRPGGSVRRHAAPHADRSVVVRLDLESFFASVTVGRVFGTWRTVGYPEPVAHALAGLTTTVLPHAAWRAVPRPAPEHLLDAHWRLGRRLAAPHLPQGAPTSPALANLAAYRLDVRLSALARAWGGRYTRYADDLAFSGDRGWGRGTSRLLDAIEEVVVDEGFRVHPRKTAVMPRAGRQVLGGLVVNDRPRVPRAEVDRLRAILHNCRLHGPASQDRDGHPAFAAHLRGRIAWVAQHDPARGERLLAAWESVDWTR

SEQ ID NO: 5752 - protein, 436 aa, Nocardioides zeae
  source 1..436: note = Related to JAAGXA010000003.1
MRPEVAAALGAGFLGGEWTEDGLLASGARVIGRRPQWLRQLAAQVVAAYPDAPRDRPRELAAAVASLPAAAKARRTRALRWTPTPTAMGRNRWALPVLDGLDDLAALLDVTQAELDWFADPKRWAREAAVAPLQHYRVAHRVASSGAIRVLEAPKPRLKRIQRLLLDEVLDRIPPHDAARGFRPGGSVARYAAPHAGRATVLHLDLEAFFASVTVGRVYGVWRTAGYPEPVAHLLAGLTTTVLPRAAWRTLPRPADPGLHDAHWRLGRRLAAPHLPQGAPTSPALANLAAYRLDLRLTALAEAWGGRYTRYADDLALSSDRGWGAGTSRLVTAVTEVVRDEGFRLNPLKTAVMRRGERQHLAGLVVNEHPRVARAEVDRLRAILHNCRVHGPSTQNRAAVPAFAEHLRGRVAWVAQHDPARGERLLEAWRAVDWER

SEQ ID NO: 5753 - protein, 436 aa, Nocardioides dongxiaopingii
  source 1..436: note = Related to NZ_SZVU01000003.1
MRPDLARALAAGLLAGEWTPAGLVESGSTVLGRRRRWLTPLARQALELYPRPPHDRPRELAAVLAGLPAAGRAAADRPVSRPLSGTRMLANPWRLPALDGLDDLARHLDLTPGELDWFADPRRLARRTSEPRLQHYRVSHRVAPSGAIRVLEAPKPRTKALQRLLLDDVVSRIAPHDAARGFRRGGSVGSYAAPHAGRPVVLRLDLESFFASVTVARVYGIWRSAGYPEPVAHALAGLTTTVLPHAAWRAIPRPASPRLLDAHWRLGRRLAAPHLPQGAPTSPALANLAAYRLDVRLTALARTWGGRYTRYADDLALSGDRGWGTGTSRLLDAVETVVRDEGFRLNPRKTAVMPRGGRQTLGGLVVNQQPRVSRAEVDTLRAVVHNCRRHGPSTQNREERPAFAEHLRGRIAWVAQHDPARGARLLADYDTIDWSR

SEQ ID NO: 5754 - protein, 436 aa, Antricoccus suffuscus
  source 1..436: note = Related to NZ_PVUE01000003.1
MRKDLATALAGAFLSGEWTSSGLFDSAVPVVQGPTPWLPALIRQILAVYPAAPLDRSRELAVVIGSRPAAGGAKSARPIAWPAATTQMTSNPWHLPALHGLGDLAEMLDLGATELAWFTDPRHWARSTTDRRLRHYRVTTKVAASGAVRVLEAPKYRLKSHQRRFLTEILDRIPAHDAAHGFRAGRSVASYAAPHGGQPVVVRMDLEGFFASITAGRVYGILRSAGYPEPVAHALTGLATTVLPRAEWNAISPPANPDLREAHWRLGRRLAGPHLPQGAPTSPALANLAAHRLDVRLSALASSWGGRYTRYADDLALSGGIGWRGDVSRLVALVGDIVRDEGFRLNDRKTAVLPAHSRQVLGGLVVNERPHVSRAEVDLLRAVLHNCRRDGPSTQNRAGVPDFEGHLRGRIAWVAQHDPARGARLRALFDAIDWSF

SEQ ID NO: 5755 - protein, 436 aa, Leekyejoonella antrihumi
  source 1..436: note = Related to NZ_VCQV01000003.1
MRADLARALAGGFLAAEWTRPGLVDGGAVVLGRRVRWMPALTRQVLALYPRPPLDRPRELAAIISTRPAAAQAGRARPMAHPLAPVRMVSNPWRLVVLHDLAEVGSLLGLSQPELAWFSDPRHWSRTAQQVPLQHYRISSRTAPSGAIRVLEAPKRHLKAIQRQLLQEIVGRIPPHEATHGFRVGRSVGSYAAPHAGRAVVIRSDLEGFFASVTVGRVYGVLRTAGYPEPVAHCLAGLMTTVLPLSAWRKIPRPTDPVLLDAHWRLGRRLAAPHLPQGAPTSPALANLAAYRMDIRLDALALSWGGQYTRYADDIAMSGDRGWGPAADRILGIVAEIARTEGFRLNARKTGVLPQAGRQVLGGLVVNDRPHVSRAEVDVLRATLHNCIRHGPSTQNRQNRTAFEQYLQGRIAWVAQHDRDRGARLRTQFDAIDWTR

SEQ ID NO: 5756 - protein, 438 aa, Sciscionella marina
  source 1..438: note = Related to NZ_KB905425.1
MRSELASAFAGAFLSGEWTESGLWGSGARVLGRDAVWLPALVREVLGLYACAPHDRPRELAAVIAMQEAAQGRDAEHAVPCRWPVSPTRMLRNPWHLPVLHSLEDLAGLLGLTTAELAWFSDPKRLARTAADPRLRHYRVTTRRAPSGAIRVLEAPKYQLKALQRRLLADLLGAIPPHAAAHGFRAGRSVATFAGPHAGKALVLRCDLEGFFASVTVGRVYGLFRTAGYPEPVAHALAGLTTTVLPASVWRKVPRPADPGLLDAHWRLGRRLAQAHLPQGAPTSPMLANLVAHRLDARCAGLAEAWGWNYTRYADDLAFSCAGGRRAGAAALLRMVERIVGEEGFRLNARKTAVQGSSARQSLGGLVVNEHVRVPRVELDRLRAILHNCARYGPSTQNRSGHADFAAHLSGRIAWVANHDPVRGARLRAGFEALDWSR

SEQ ID NO: 5757 - protein, 450 aa, Geodermatophilus nigrescens
  source 1..450: note = Related to NZ_FQVX01000001.1
MTTPRQAAATASGIATALLAGPWRRREAVRRVAVALGHARAPRWVGALVGEVLDAYRDAPADRPRELAAFLASTRGWAQGQAGDVAPRVVRREPVPTRVVRPRPDLTEVPDLAALARLLDVDQGELAWFADTRGLERTAPEEALRHYRWRVVERPGGVRLLAAPKPRLREIQRRLLRHLVAPVPPHPAAHGCVPGHSVRTAAAPHAGADTVLALDLESFFASVPAGRVWGVLQGVAGLTEPVAHAVTGLVTTVVPLAVWRRVPVPEDGAARDRHARLGRRLAVPHLPQGAPTSPALANLVCARLDRRLAGLAASAGAVYTRYVDDLFLSGPPALRRPAFAARVAAIAADEGFRVHPGKTRSAGRGRRQTVLGAVVNVRPTLPRAERDALRALLHNCAVSGWASQVRDRDPATFREHVLGRVAWASSMDPVLGARLRVLAERIDWDAPGTA

SEQ ID NO: 5758 - protein, 448 aa, Geodermatophilus normandii
  source 1..448: note = Related to NZ_QGTX01000001.1
MTASRRTAATASGVATALLAGPWRRRDAVRRVAVALGYARAPRWVGTLVGEVLLTYREAPADRPRELAAFLTTTAGWERGWSAGEVRPRVHRREPVPTRVVRRRPGVREVSDLAALARLLDVDQGELAWFADVRGLERTAPDEALRHYRWRVLERPGGVRLVAAPKPRLREAQRRLLRHLLAPLPVHDAAHGCVPGRSVRTAAAPHAGAAVVLSMDLESFFAGVPAGRVWGVLQGVAGLTEPVAHAVTGLATTVVPAAVWRRVPVGTDPDRHARLGRRLAAPHLPVGAPTSPALANLVCARLDRRLAGLAASAGAVYTRYVDDLTFSGGPGLRRDRFAARVAAVAADEGLRVNPAKTRTMGTGHRQQVLGAVVNVRPTLPRPERDALRALLHNCAVHGWRSQVRDRDPATFRDHVLGRVAWAASVDPVLGARLRELAARIDWDVPGTA

SEQ ID NO: 5759 - protein, 449 aa, Geodermatophilus telluris
  source 1..449: note = Related to NZ_FMZF01000002.1
MTRPRQAAATASGIATALLAGPWRRRDAVRRVAVALGQARAARWVGTLVAEVLAAYRDAPADRPRELAAFVRTTEGWARGQAADVRPRVVRRQPVPTRTVRVRAPVADLPDLAALARLLDVDQGELAWLTDVRSWERTADAPLRHYRWRTVPRPAGGVRLLAAPKPRLREAQRRVLRHVLAPLPVHPAAHGCVRGRSVRTAALPHAGADVVLGMDLEGFFAGIPAGRVWGLLQGVAGLTEPVAHALTGLATTVVPVAVWRRVPVPADPAGRDRHHRLGRRLAVPHLPQGAPTSPALANLVCARLDRRLAGLAAASGAVYTRYVDDLTFSGGAALRRDRFADRVTAVAADEGFRVHPGKTRTAGSGRRQQVLGAVVNVRPTLPRPERDALRALLHNCAVHGWASQVRDADPATFRDAVLGRVAWASSVDPVLGARLHALAERVDWSAAPS

SEQ ID NO: 5760 - protein, 444 aa, Blastococcus endophyticus
  source 1..444: note = Related to NZ_JABGCI010000002.1
MTTHRQDAVTAAGVATALLAGRWRRREMVRRVAVALDRARAPRWVGTLVGEVLVAYREAPADRPRELAAFVPTTEGWSRGRTALPRPRVARWQPVAVSVLRRPFPVAELPDAAALARLLDLDLGELLWFADPRGLERTSGEPLRHYRWHAVPHGSGMRLLAAPKPRLREIQRRLLRHVLAPVPLHAAAHGCVPGRSVRTAAAPHAGADVVLGMDLEAFFPSVAAARVWGLLQGTVGLTEPVAHLVTGLVTTVLPAAVWRRVPVPPGAGSADRHRRLGRRLAVPHLPQGAPTSPALANLVCFRLDRRLAGLAAAAGGRYTRYVDDLTFGGGRALAADRFAARVAAIAADEGFRVNDAKTRAVGAARRQEVLGAVVNARPTLPRPERDALRALLHNCTTRGWRTQVRDRDPATFRDHVLGRVAWASSVDPALGARLQAMAARVDWS

SEQ ID NO: 5761 - protein, 433 aa, Geodermatophilus sp.
  source 1..433: note = Related to NZ_SPQN01000061.1
MTASGIATALLAGPWSRRTMVRRVSVALGFARAPRWVGALVDEVLAAYVSAPADRPRELAAFVTTTQAWQRMGALRRVVHRRPVATSVVRHRFGVPPLPDAAALARLLDLDQGELAWFADVRGLERTAGEPLRHYRWHAVERRGGLRLLAEPKPRLKEIQRRLLRHVLVPVPVHDAAHGCVPGRSVRTAAAPHAGSAVVLGMDLEAFFASVTAPRIWGLLQGTVGLTEPVAHLVTGLVTTSVPTSVWRALPLPDGTDARERHRRLGQRLAAPHLPQGAPTSPALANLVCYRLDRRLAGLASAFGARYTRYVDDLTFSGDRRIETGRLAALVTGIAAEEGFRINPAKTRVAGAGSRQRVLGAVVNTRPTLPRPERDALRALLHNCARHGWASQTREHDPATFREHVLGRVAWAASLDPVFGARLHALARRVDWS

SEQ ID NO: 5762 - protein, 347 aa, Geodermatophilus obscurus
  source 1..347: note = Related to FRDM01000010.1
MVAADDGPPGRGRPRLRTRPALARLLDLDQADLAWFADVRVLERTVDEPLRHYRWHAVERRGRLRLLAEPKPRLKEAQRRLLRHVLAPIPVHDAAHGCVLGRSVRTAAAPQAGRALVLGMDLEAFFASVSAPRVWGLLQGTAGLTEPVAHLVTALGTTTAPVSVWRALPLPGGVEARERHRRLAAPHLPQGAPTSPALANLVCFRLDRRLAGLAASCGARYTRYVDDLTFSGDRRIRGDRLAALVTEVAAEEGFRVDPAKTRVAGAGSRQRVLGAVVNARPTLPRPERDALRALLHNCARHGWATQTRGHDPATFREHVLGRVAWAAALDPVLGERLHALAARIDWS

SEQ ID NO: 5763 - protein, 390 aa, Geodermatophilus africanus
  source 1..390: note = Related to NZ_FNOT01000011.1
MLAAYAAAPVDRPRELTLFVQRTQGWERMGSPPRVVHRQPRATAVARDRFGVAPLADAAALARLLDLDHGELAWFADVRGLERTVGEPLRHYRWHAVERRGGVRLLAEPKARLEEVQRPLLRHVLARVPVHDAAHGCVPGRSVRTAAAPHTSRAVVLGMDLEAFFASVTAPRVWGLLQGTVGLTEPVAHLLTGLVTTTAPAGVWRALPVPSGAGARERHRRLGERLTTLHLPQGAPTSPALANLVCFRLDRRLAGLAATVGARYTRYVDDLTFSGDRRLRADQCASLVTEVAAEEGFRVNPAKTRVAGADSRQQVLGAVVNTRPTLPRPERDALRALLHNCARHGWTGQTRGHDPATFSEHVLGRVAWAGSLDPVFGERLHALAARIDWS

SEQ ID NO: 5764 - protein, 473 aa, Blastococcus colisei
  source 1..473: note = Related to NZ_VFQE01000001.1
MTAPSERRAAGTAAGIATALLAGRWRRPEMVRRTAVALGRDRAPRWVGTLVGEVLDAYRDPPVDRPRELAGFVRTTAGWARGWTVVPQPRITRWQPARTDVVHRPYGVAALPDLTALARLLDVDAGELAWFADTHRLERTVAEPLRHYRWTTDGDRLLAAPKSRLKEIQRRLLRYVIGPLRVHGAAHGCVPGRSVRTAVTPHTGAAQVLQMDLESFFASIAAERVHGLLRSVGGLPEPVALAVTGLVTTVVPRSTWRRVPVPDDVDRHHRLGRRLAGPHLPQGAPTSPALANLVCFRLDRRLGGLAASFGAAYTRYVDDLTFSGGRGIDQGPFERLAGEIVVEEGFRLNRSKTRSTSSAGRQSVLGTVVNVRPTLPRTERDALRALLHNCATRGWASQVRDRDPATFRDHVLGRVAWASSIDPAFGARLRARAALIDWSRPDEGACGRTPADRPSDGTLPPPDDDGGARCGER

SEQ ID NO: 5765 - protein, 451 aa, Blastococcus sp.
  source 1..451: note = Related to FOND01000013.1
MTAPGGRRAAGTAAGIATALLAGRWQRREMVRRTAVALGLPRAPRWVGTLVGEVLAAYRDPPVDRPRELAGFVRATAGWARGWAAVPQPRIVRWQPVPTALVRRRHGVAGLPDLAALARLLDVDAGELAWFADTHRLERTVGERLRHYRWTTAGDRLLAVPKPRLKEVQRRLLRHVVGPLGVHDAAHGCVPGRSVRTAVSPHAGADQLLQLDLESFFAGIAAERVHGLLRSVGGLPEPVARTVTGLVTTVVPRSVWRQLPVPDDAGRHERLGRRLAVPHLPQGAPTSPALANLVCFRLDRRLDGLAASFGAVYTRYVDDLTFSGDRGIDRGRFEQLAGEIVREEGFRPNRAKTRSTTSAGRQSVLGTVVNVRPTLPRPERDALRALLHNCATHGWRTQVRDHDPATFRDHVLGRVAWASSIDPVLGARLRAQAERIDWSSGPDGTAAPAPA

SEQ ID NO: 5766 - protein, 456 aa, Modestobacter roseus
  source 1..456: note = Related to NZ_VLKF01000001.1
MTAPSGRRAATTAAGIAVALLGSRWRRREMVRATAVALGYARAPRWVGTLVGEVLVAYRDAPVDRPRELAAFVRTTAGWQRGWTRVPQPRVARWQPTVTEVAFRRHGVTELPDLAALARLLDLDTGELAWFADAHRLERTVREPLRHYRWRTVGSRLVAAPKPRLKEAQRRLLRHVVGPLPVHGAAHGCVPGRSVRTAVAPHAGAAVVLQLDLEAFFPSIAAERVQALLQTVGGLPEPVAHAVTGLVTTVVPRSVWAAVPVPAGPDRDRDRHHRVGRRLAVPHLPQGAPTSPALANLVAFRLDRRLAGLAASFGAQYTRYVDDLTFSGDRALDRGRFASLVGAVVAEEGFRLNAAKTRSTTSAGRQSVLGAVVNVHPTLPRTDRDALRALLHNCAVHGWRSQVRDHDPATFRDHVLGRVAWAASIDPAFGVRARRLADRIDWTAHPVRSPEGPGHD

SEQ ID NO: 5767 - protein, 449 aa, Modestobacter caceresii
  source 1..449: note = Related to NZ_JPMX01000077.1
MTAERQAAATAAAIATALLAGPWRRREMVRRVAVALGQARARTWVGTLVGEVQTVYPTAPVDRPRELARVVRTTQGWERGQSHRPLARAVRWEPVPTALAWRRWPVADLPDQAAVARLLDVDAGELAWFADARRLERTAGEALRHYRWRVVQRPAGVRLLAAPKPRLKEAQRRLLRHVLDRVPAHDAAHGCVPGRSVRTAVAPHAGSAVVLRMDLEAFFASVAAGRVHGLLLGVAGLPEPVAHVLTGLMTTVLPTEVWRRIPPPDGIEARERHRRLEQRLTVPHLPQGAPTSPALANLVCHRLDRRLAGLAAASGGTYTRYVDDLTFSGDRRIARDRFADLVTDVVTDEGFRVNAAKTSATSAARRQAVLGTVVNDHPTLPRPERDALRALLHNCAVHGWTTQTRGRDPGTFRDHVLGRVAWAASVDPAFGARLHRLADRIDWTAPAHS

SEQ ID NO: 5768 - protein, 444 aa, Modestobacter excelsi
  source 1..444: note = Related to NZ_SJEX01000063.1
MAAVTASGLATALLAGPWRRRDMVRRVAVALGQARAATWVGTMVGEVQTGYPQAPVDRPRELARFLRTTRGWARGQDTTPPPPVLRWEPQPTRLAWSRAPVADLPDQAAVARLLDVDPGELAWFADARGLERTVGEPLRHYRWQVVPRPHGVRLLAAPKPRLKEAQRRLLRHVLARVPVHDAAHGCVPGRSVRTAVAPHAGSPVVLRMDLEAFFASIAAERVHGLLLGPAGLPEPVAHVLASLVTTVAPAQVWRQVSLPTGIEARERHRRLGRQLAVPHLPQGAPTSPALANLVCFRLDRRLAGLAASCGARYTRYVDDLTFSGGTALGRDRFADLVTRVVADEGFRVNAAKTAATSAARRQSVLGAVVNTRPTLPRRERDALRALLHNCATSGWPGQTRGREPATSRDHVLGRVAWAASLDPAFGARLHALAERIDWSAEPAG

SEQ ID NO: 5769 - protein, 400 aa, Modestobacter muralis
  source 1..400: note = Related to JAAGWH010000033.1
MVGEVQTVHPRPPVDRPRELSRVVRATQGFARGHASLPLPRVVRRNPVPTALAWERYPVTDLPDQAAVARLLDLDAGELAWFADTRGLERTAGEALRHYRWHAVDRPHGVRLLAAPKPRLKEAQRRLLRHVLAPVPVHEAAHGCVPGRSVRTAVAPHTGSAVVLRMDLEAFFAGIPAGRVHGLLLGPAGLPEPVAHVVTGLVTTVVPAQVWRALPVPPDVDARDRHHRLGRRLAVAHLPQGAPTSPALANLVCFRLDRRLSALAASSGARYTRYVDDLTFSGGRSVGGDRFAALVAEVVADEGFRVNAAKTSAVGAGRRQSVLGAVVNVHPALPRRERDALRALLHNCATHGWAGQTRGRDPDTFRDHVLGRVAWAGSLDPVFGARLTALAERIDWAAAD

SEQ ID NO: 5770 - protein, 450 aa, Blastococcus xanthinilyticus
  source 1..450: note = Related to NZ_VNHW01000003.1
MTAGRRAEVTANGIATALLAGAWRRPQMVRRVAVALGYARAPRWVGTLVTEVLAAYWHPPADRPRELALFVRTTASWARGTASGPPPGVVRWEPVPTSVVRPRLPGVELSDLGALARLLDLDQGELAWFADARRLERTAPEPLRHYRWRIVDRPTGVRLLAAPKPRLKEIQRRLLRHVLDPVPVHGAAHGCVRGRSVRTAATPHAGAAVVLRMDLEHFFASVPAPRVHGLLLGQAGLPEPVAHAVTGLVTTVLPAAVWRRIPLPDDVRARERHRRLGARLAVPHLPQGAPSSPAMANLVCFRLDRRLAALADAFGATYTRYVDDLTFSGGARVGRGRLAGLVGEIARDEGFRVNTAKTRAISSARRQDVLGVVVNDHPALPRRERDALRALLHNCATHGWATQLRGRAPASFRDHVLGRVAWAAAVDPGFGARLHALADRIDWSRPLGSA

SEQ ID NO: 5771 - protein, 442 aa, unidentified
  source 1..442: note = Related to QHCB01000177.1; note = Pseudonocardiales bacterium
MNPREQVANGLATAMLGGAWSREPMRARIARALGRPRAPRWAGALVGQVLGAYRDAPADRPRELAAYVQTTPAWQLAWEHRRPPRIVRWAPTPTVMVARPWPVIELDDLGALARLLAIDQGELAWFADVRSIERRSGQPLRHYRWRALPKRGGVRLVAAPKPRLKEIQRRLLRHVLTQIPVHPAAHGCVPGRSVRTAVDPHAGAAIVIRADVEGFFSSISAGRIWGLLRMAGLPEPVAHTITGLVTTVVPTQVWRAVPRPTGALLLDAHLRMGERLATPHLPQGAPTSPVLANLAAFSLDRRLTGLAGAFGGQYTRYVDDLTFSGGPSLRNARSRFVELVDDIVRSDRLRLNERKTVVLGAAGRQQLLGAVINDHPTVARHERDALRALLHNCATRGWQTQTRGLEADEFRATLLGRISWIGGLDPSFGARLRRSFDAVDWS

SEQ ID NO: 5772 - protein, 425 aa, unidentified
  source 1..425: note = Related to JAFKEJ010000505.1; note = Actinomycetia bacterium
MTTRSDQQRQVADGLATALLAGPWTVPLMTRRVRTALGLRGRQPWVVGLVAEVADAYRDPPVDRPRELAAYLRATGSWRLAPVPRVVAWTPVPTSMGPMPWPVTALPDLGALARLLDIDQGELAWFADVRGLERRCAPPLRHYRWREIPGRSGPRLVAAPKPRLKEIQRRLLRHVLEPIPVHDAAHGAVATRSVRTAVAPHAGATVVLRADLVAFFPSIPAERAWGLLRTAGLPEAVAHTVTGLLTTVAPIEVSTDPRLRHPHVPQGAPSSPRLANVVAFSLDRRLAGLAARFGARYTRYVDDLTFSGGASLRTARSRFVALVEEIVRDEGFEVNERKTVVLGESGRQQVLGAVVNAHPALPRPERDALRATLHNCVVHGWASQARGRPRDEFRAHLLGRVAWVGSLHPGHGRRLRELADRIDWN

SEQ ID NO: 5773 - protein, 425 aa, Jatrophihabitans endophyticus
  source 1..425: note = Related to NZ_FQVU01000005.1
MTGAGPAGPLADGLATALLAGPWTRPAMRTRGRDALGAARTPVWLGRTVDAVLTAYPQPPADRPRELAAFLLATAEFAKLARRRPPPRVVSWSPVPTDVMVRPWPVELLPDHAALAGLLDVDQGELAWFADVRGLERSSPEPLRHYRWRTVAKPGGVRVLAAPKPRLKEIQRRLLRHVFDAVPVHPAAHGGVRRRSVLTASAPHAAQPVVVRVDLVSFFASVRAGRVWRLLRTAGVPEGVAHTVTGLVTTVAPLPFRALDPRLRTPHLPQGAPTSPALANLIAFSLDRRLTGLAARFDASYTRYADDLVFSGGRGLGAARFLDRVGEIVRDEGFRVHDGKTAVLGRSGRQQVLGVVLNHHPAVPRRERDALRALLHNCATTGWRAQARDRDDFPAHVLGRIAWVQSLDPVHGRRLRAAYDAVDWS

SEQ ID NO: 5774 - protein, 444 aa, Actinoplanes abujensis
  source 1..444: note = Related to BOMC01000025.1
MTTTAHRRRAAALRAGRRRHDRDSSGHAAAGTVADALLTTDWQTGKMQIAVRRVTAGRKGWARQFVQFVRRAYPRAPYDRPRELRLFLQARGGIPRDVVARHRLVSATRVVRMRWNTPGLGDLADLAAFLDLDGDALDWFADRREINRHARDERLRHYRYVWLPHRLIEAPKPRLRDLQRLVLDRILARVPVHDGVHGFVPGRGVHTFARTHTGRDVLVSMDLRAFFTSVTAARIYGLFRGIGYPEPVAHTLTALTTTRTPVAVLRSAPDPHLAALLRRPHLPQGAPTSPALANLCAYRLDRRLSGLAGRFGVTYGRYADDLAFSGTLSAPHVTRLTALTGRIADEEGFRLHPHKTRVRTRSQRQALTGLVVNTRPAVPREDYDRLRAILHNAATHGLAEANRDGHADFAAHLAGRVAWMSHHHPARAAKLHHLLAQALRDQPR

SEQ ID NO: 5775 - protein, 409 aa, Actinoplanes bogorensis
  source 1..409: note = Related to JAHKKG010000005.1
MVAGAVADALLTTTWHKDQMLAAVRTVTAARPPWARRLVAVVLHAYPQPPADRPRELRRFLLHLTRRAHVRRRLVTPARTVHMRWGAPAIDSLADFLGLDGDELDWFADRREINRHARDERLRHYRYAWLTHRLIEAPKPRLRDLQRRVLDDILSAVPVHEGVHGFVRGRGVHSFARAHAGCDVLISLDLRAFFSSITAARIYGLFRGIGYPEPVAHTLTALTTTRTPAHVLRAAPDPHLAALLRQPHLPQGAPTSPALANLCAYRLDRRLAALATRFGVTYGRYADDLAFSGRLGRTETDHLIALVDGIAAEEGFRVHPGKTEVRRRSQRQALTGLVVNERPAVPREDYDRLRAILHNAATHGMAEANRDGHADFAAHLTGRVAWMSHHHPSRAAKLKTLLDRALATP

SEQ ID NO: 5776 - protein, 443 aa, Actinoplanes sp.
  source 1..443: note = Related to NZ_JAHWFK010000003.1
MSTAAHRRRDAALRAALRRHDRESSGHAAPPQVAGALADALLTTDWRPAQMQAVVRAVVAGRAPWARRLVVAVWRAYPRAPVDRPRELRQFLINRALARRAVIRRRIVAPTRVVRMRWGAPALGDLAELAAFLGLDGDALDWFADRRELNRHARDERLRHYRYVWRPHRLIEAPKPRMRDLQRRLLDRILSVVPVHDSAHGFVPGRGTHTFARAHTGADVLVRLDLRAFFPSITAARIYGLFRGLGYPEPVAHTLTALTTTRTPAHVLREAPDPHLAALLRQPHLPQGAPTSPALANLCAFRLDRRLSALAGRFGVTYGRYADDLAFSGTLTNARADRLVELTGRIAAEEGFRVHPGKTRIRRRSQRQELTGLVVNERPAVPRKEYDRLRAVLHNAARHGLAEANRDGHADFAAHLAGRVAWMSHRHPTRAAKLHELLARALT

SEQ ID NO: 5777 - protein, 470 aa, Actinoplanes atraurantiacus
  source 1..470: note = Related to NZ_OBDY01000014.1
MTTAAHRRRASALRAARRRHDRESSGHAAARTPKGAHRQSPWQVAGALADALLTTSWRPEDMVATVGSVVAGRPAWARRLVGAVLLAYPRAPADRPRELRHFLAGLEGRPRVAVRRAVVRHRPVVPVRVVRMRWGAPGVDGLAGLAAFLDLDGDALDWFADRREINRHARDERLRHYRYTWLTHRLIEAPKPRMRALQRQLLDQILSRVPVHPSVHGFVPGRDAHTFARAHAGASVLVSMDLRAFFSSITAARIHGLFLGIGYPEPVAHALTALTTTRTPARILRAASDPYLAALLRQPHLPQGAPTSPALANLCAFRLDRRLSGLAGRFGLTYGRYADDLAFSGTLADGRVARLVALAGQIAREEGFRAHPGKTRVRRRSQRQELTGLVVNDRPAVPREDYDRLRAILHNAATQGLAAANRDGHPDFAAHLAGRVAWMSHHHPSRAAKLKDLLDRVRSSGPEVSVERRS

SEQ ID NO: 5778 - protein, 418 aa, Actinoplanes ianthinogenes
  source 1..418: note = Related to AP023356.1
MLTVDWQPERMTAVVRTVVRGRARWARRLVDAVLRAYPRAPADRPRELCRFLTNRGGIPRTRVRRRLMTPTRVVRMRWGAPPINDLAELAAFLGVDGDALDWFADRREINRQARDEKLRHFRYAWLPHRLIEAPKPRLRTMQRRLLDRILSRVPVHDSVHGFVPGRGTHTFARAHAGQAVLISLDLRAFFSSITAARIYGLFRGIGYPEPVAHALTALTTTRTPARVLRAAPDPHLAALLRQPHLPQGAPTSPALANLCAFRLDRRLSGLAGRFGLTYGRYADDLAFSGTLDSTGIARLVTLAGQITGEEGFRIHPGKTRVRRQSQRQSLTGLVVNAHPAASRKDYDTLRAILHNAAVHGLAAANRDNHPDFAAHLAGRVAWMSHHHPSRAAKLHQLLARTAGDQPRGPSSVSNSRSS

SEQ ID NO: 5779 - protein, 461 aa, Actinoplanes sp.
  source 1..461: note = Related to NZ_JOJL01000057.1
MTTAAHRRRASALRAARRRHDRDSSGHAATSTWYGPHRQRPFRVAGALADALLTTDWRPEQMTAAVRSVAAGRAVWAVRLVKAVLLAYPRLPADRPRELRQFLANLPPTPRTTVRQAVIRHRLAVPTRVVRMRWGAPGIGDLAELAAFLGLDDDALDWFADRREINRHARDEKLRHYRYAWRPHRLIEAPKPRLRALQRQLLDQILSAVPVHDHVHGFVPGRGPHTFARAHAGNAVLVSMDLRAFFSSITAARIYGLFRGIGYPEPVAHALTALTTTRTPAPVLRDAPDPYLAALLRQPHLPQGAPTSPALANLCAFRLDRRLSGLAGRFGLNYARYADDLAFSGTLNTSGVDKFSTLAGRIVHEEGFRIHPRKTRIRRRSQRQALTGLVVNTLPAAPREDYDRLRAILHDAATHGLAEANRDGHPEFAAHLAGRVAWMSHRHPSRAAKLHRLLDQALAKP

SEQ ID NO: 5780 - protein, 458 aa, Actinoplanes tereljensis
  source 1..458: note = Related to NZ_BOMY01000054.1
MTTAPHRRRTSALRAARRRHDRESSGHAAPAAQVAGALADALLTTSWQPDDMVAVVRSVAGGRPIRARRLVEAVLQAYPRAPADRPRELRRFLAALPTKPRTTVRRAVIRHRLAVPTQVVHLRWNAPALSDLADLADFFGLDGDALDWFADRREINRKANDQKLRHYRYGWLPHRLIEAPKPRLRALQRRLLDRILSAVPVHDRVHGFVPGRGTHTFAQLHAGAPVLVSMDLRAFFSSITAARIYGLFRGIGYPEPAAHALTALTTTRTPARVLRAAPDPYLAALLRRPHLPQGAPTSPALANLCAFRLDRRLTGLADRFGLTYARYADDLAFSGTLSRTRIDRLVTLATQIVHEEGFRTHPGKTRVRTSSQRQSLTGLVVNANPAVPREDYDRLRAILHNAATHGLADANRDGHPDFAAHLAGRVAWMSQAHPSRAAKLNALLERALGPEVPRPGRR

SEQ ID NO: 5781 - protein, 464 aa, Actinoplanes sp.
  source 1..464: note = Related to NZ_RJAC01000023.1
MSTAAHRRRASALRAVRRRHDRESSGHAAIRTWNRKRLAPARRWYSPRRQPSSSVASALADALLTTNWRRPHMLSAVRVVAPARARRLVDAVLQAYPRAPVDRPRELSRFLAGFGVPRAVIRRRLVAPARVVRMRWKAPRIDDLAGLAAFLELDGGALDWFADRRELNRQARDERLRHYRYAWLSHRLIEAPKPRLRALQRRVLDEILATIPVHDAVHGFVPGRGTHTFAERHAGQDVLLTMDLRAFFSSITAARIYGLFLGAGYPETVAHALTALTTTRTPARVLRSAPDPDLAAVLRRPHLPQGAPTSPALANLCAFRLDRRLTGLAERFGLTYARYADDLAFSGTGPVDRLTPLVAHIATEEGFRVRPDKTKVRHRSQRQSLTGLVVNERPAVARADYDRLRAILHDAATHGLDAANRDGHPDFLAHLTGRVAWASHDHPSRATKLRRLLNQVQSSHIVGR

SEQ ID NO: 5782 - protein, 410 aa, Actinoplanes ovalisporus
  source 1..410: note = Related to JAENHP010000015.1
MVAGALADALLTTTWQPEEMEAAVRSVAAVPEAWARRLVRTVLSAYPRNPADRPRELRRFLTARRAYIRHRLVTPTHAVRMRWNAPPINDLAELAAFLELDGDALDWYADRREINRHARDERLRHYRYAWLPHRLIEAPKPLLRDLQRRLLDDVLATAPVHEHAHGFVPGRGTHTFARVHAGRDVLVSMDLRAFFSSITAARIYGLFRGIGYPEPVAHALTALTTTRTPAHVLRAAPDPHLAALLRRPHLPQGAPTSPALANLCAYRLDRRLTGLADRFGLTYARYADDLAFSGTLTHAQVERLVALTTSIAAEEGFRVHPHKTRFRTQAQRQSVTGLVVNDRPAVPREEYDRLRAILHNAATHGLAEANRDGHADFAAHLTGRVAWMSHHHPSRAAKLQDLLVRALSAP

SEQ ID NO: 5783 - protein, 426 aa, Actinoplanes sp.
  source 1..426: note = Related to NZ_QHHV01000069.1
MATALADALLTTSWRRKAMIGAGRALLGRPTRWVPRVVDAVAAAYRDAPADRPRELARFVAEIIRTTPGARRQSRRTVIRHRLVAPTRTVRMRWKTPRIDDLAALADFLAVDGDLLDWFADRREINRHARDEPLRHYRYQWLPHRLIEAPKPRLRAIQRRLLDHVLAAIPVHERAHGFVAGRGVHTFAGSHAGRAVLVSMDLRAFFSSITAPRVYAMFRQAGYPEPVAHALTALTTTRTPARVLRGAPDTTRAAMLRQPHLPQGAPTSPALANLCAFRLDRRLTGLADRFGLHYSRYADDLAFSGTLGERRTLDLISYVRGIAAEEGFRAHPDKTRVRRRADRQLLAGLVVNSRPAVPREEYDGLRAILHNAGRHGLAAANRDGHPDFAAHLAGRVAWMAHQHPARAAKLHNLLRAALTAPTTAGS

SEQ ID NO: 5784 - protein, 393 aa, Actinoplanes auranticolor
  source 1..393: note = Related to BOQL01000058.1
MVFGRRARWVRPAVDAVLRAYREAPGDRPRELAGFLAASGRLGAHRTVVRHRLVAPTRTTRMRWPAPAIDDLGALADFLSLDGDMMDWFADRREINRYARDERLRHYRYTWLPHRLIEAPKPMLRDLQRRLLAEVLAGMPVHERVHGFVPGRGVHTFAASHTGQEVLVSLDLRAFFSSITAARVYAVFRQAGYPEPVAHTLTALTTTRTPAHVLRDAPDATRAALLRRPHLPQGAPTSPALANLCAFRLDRRLTGLADRFGLHYSRYADDLAFSGTVGDRRVGDLISYVRAIVTEEGFRTHPGKTRVRRQGDRQLLAGLVVNARPAVAREDYDRLRAVLHNAGRHGLAAANREGHPDFAAHLAGRVAWMAHRHPTRAAKLHSLLRSAVAADRQ

SEQ ID NO: 5785 - protein, 442 aa, Actinoplanes friuliensis
  source 1..442: note = Related to NC_022657.1
MTTAAHRRRLAALRARTRRHDRVSSGHAAAAAPRVATALADAFLSTRWRRKAMVKAGAAVLGRERRWVDRAVVKVLRAYRIAPADRPRELAGFLEGITRPAVIRRRRVTPVQVVRMRWHAPPINDLGELAAFLDVDGDLLDWFADRREINRHARDERLRHYRYRWLPHRLIEAPKPHLLALQRRLLDEVLARVPVHERAHGFVPGRGVHTFAASHAGQAVVVRLDLRAFFSTVTAARIYGIFRSAGYPEPVAHALTALTTTRTPARVLRDAPDPRLAALLRRPHLPQGAPTSPALANLCAFRLDRRLTGLAGRFGLHYSRYADDLAFSGPDHPHNLIPYVHSIAVDEGFEINPAKTRVRGQADRQLLAGLVVNSSPAVPREDYDRLRATLHNAATHGLAEANRDGHADFAAQLAGRVAWVSHRHPARARKLQELLSAALAKP

SEQ ID NO: 5786 - protein, 427 aa, Couchioplanes caeruleus
  source 1..427: note = Related to NZ_RJKL01000001.1
MSAALADALLTSRWRPGPLQRTGTAVLGGRPPWLRIAVVAVLRAYRHAPADRPRELAAFLSCLERSGRPLVRRHPIRLRRATPVRIVRMRWDTPRIDDLAALADFLGVDGDHLDWYADRRHLNRHARDERLRHYRYAWLPHRLIEAPKPRLRALQRRLLDDLLGRLPVHPHAHGFVPGRGVHTFAAPHAGQKLVIGLDLTAFFSSITAARIHGLFRTAGYPEPVAHTLTALTTTATPAAVLRGRTDPHRAALLRRPHLPQGAPTSPALANLVAYRLDRRLTGLADRFGLHYTRYADDLAFSGTLGRGEPAHLIAAVHTIAADEGFRVHPRKTRVRGRGDRQRLAGLVVNERPAASREDYDRLRAVLHDAARRGPLVANREGHDDFPAYLRGRVAWVSHRHPARAAKLHRMLAVALAGPAAPPTVTTP

SEQ ID NO: 5787 - protein, 447 aa, Actinoplanes sp.
  source 1..447: note = Related to CP005929.1
MFCPPGTGGSLDRSLTFAGHANLGAVRQAVNSALAEAFLACGWRDGPARPALDRLTRAGAEVLGGRPWWLRPLAAEVLRAHRNPPLDRPRELAAFLGRRVAGSRPIMVRRAVPVRTVRMRWPTPRIDDLAALADFLGLTGEELDWFADRREINRHARAEQLRHYRYRWLPHRLIEAPKPRLRALHRRLLDDLLGRLPVHDAAHGFVPGRSVHTFAAPHAGRALVIRADLATFFSSITAPRIFGLFRTAGYPEPVAHALTGLTTTRTPAAVLRGHGYDTARMLRQPHLPQGAPTSPALANLVAFRLDRRLAGLAARFDLTYTRYADDLAFSGPRTDPRRFLDALRTVVADEGFRLHPAKTRVRGRADRQSLAGLVVNEHPAVPRTDYDRLRAILHDAARHGLATANRDGHPDFAAYLTGRVAWIAHHHPTRAAKLHRMLAAALNPPPP

SEQ ID NO: 5788 - protein, 393 aa, Actinoplanes sp.
  source 1..393: note = Related to NZ_LOJP01000001.1
MVVAGLVRAGAEVLGARPWWLRPVVARVLRAYPHPPLDRPRELAAFLDRRVQPHPVVVRRAAPARVVRMRWDTPQLNDLGALADFLEVSGDELDWFADRKEINRHARDERLRHYRYVWLPHRLIEAPKPRLRALQRRLLDELLGRIPVHPAAHGFVPGRSVHTYAAPHAGQRMVVRADLAAFFSSITAQRSYGLFRLAGYPEPVAHALTALTTTRTPIDVLRGRPGSTRTLLREGHLPQGAPCSPALANLVAFRLDRRLTGLAARFGLTYTRYADDLAFSGPRALNLDALAAVVKDEGFRLHPAKTRIRGRGDQQRLAGLVVNEHPAVPRGEYDHLRAILHDAARRGLEAANREGKADFRAYLMGRVAWVSHRHPGRAAKLDRLLKDALRRGD

SEQ ID NO: 5789 - protein, 393 aa, Actinoplanes humidus
  source 1..393: note = Related to NZ_BOMN01000001.1
MLGRLVRAGGEVLGGRPWWLRPVVAGVLRAYRDAPADRPRELAGFLSGRVQSHPVVVRRAVPVRVVRMRWDTPRIDDLGVLAGFLGLAGDELDWFADRKEINRHARDQRLRHYRYRWLPHRLIEAPKPRLRAVQRRLLDGVLGRIPVHPAAHGFVPGRGVHTFAVPHSGQPMVVRVDLASFFSSVTAPRIYGLFRTAGYPEPVAHALTALTTTRTPADILGGKYLPLLRHAHLPQGAPSSPALANLVAYRLDRRLSGLAARFGMTYTRYADDLAFSGPRVSAPRLLAALEAVVKDEGFQLRHAKTRVRGQGDRQVLAGLVVNERPAVARVEYDRLRAVLHDAARRGLDEANRDGHADFSAYLKGWVAWVSHRHPGRAAKLDRLLAATLGEDRA

SEQ ID NO: 5790 - protein, 460 aa, Virgisporangium ochraceum
  source 1..460: note = Related to NZ_BOPH01000102.1
MSTAAHRRRASALRAGRRRHDGASSGHAATRRQAPRRVASALADAFLTVAWRRAELLAVGRTVLAARPRWLGPVVTAVLRAYRDPPVDRPRELAAFVAGATGPAGQRVGAAVVRERRMVPTRTQRMRWGTPAIDDLAALADFLDLDGDHLDWFADRRELNRHARDERLRHYRYTWLPHRLIEAPKPRLRAVQRHLLDTVVGLLPVHGSVHGFVPGRGVHTFAAAHAGKPTVVRLDLRAFFTTVTAGRVYGVFRTAGYPEPVAHTLTALTTTRTPAAVLRTAPDRAAAGARAALLRQPHLPQGAPTSPALANLCAYRLDRRLAGLAVRFGVGYTRYADDLAFSGDLTARQAGHLVTHVTAVATAEGFGTNPAKTRVRGRADRQQLAGLVVNAAPAVPRAEYDLLRAILHDAARNGLAAANRDGHPDFAAHLAGRVAWVGHRHPARAAKLRRLLADVGAPRT

SEQ ID NO: 5791 - protein, 407 aa, Virgisporangium aurantiacum
  source 1..407: note = Related to NZ_BOPG01000148.1
MLWQRSELLAVGHTVLGARPRWLGPVVTAVLRAYRQPPADRPRELAAFVAAVTGPAGTRVQAAVIRERRFVATRVGRMRWATPAVDDLGALADFLDVDGDRLDWFADRRELNRHARDQQLRHYRYLWRPHRLIEAPKPRLRALQRHLLDTIVGLLPVHESVHGFVAGRGVHTFAAAHAGKPTVLRLDLRAFFTSVTAARVYGLLRTAGYPEPVAHALTALTTTRTPVDILRDAPNRAHAALLRQPHLPQGAPTSPALANLCTFRLDRRLAGLAGRFGADYTRYADDLAFSGDLGGRQAQHLITQVTAIATAEGFGVNTAKTRVRGQADQQRLAGLVVNAAPAVPRAEYDRLRAILHDAAQHGIDAANRDGHPDFAAHLAGRIAWVAHRHPTRASKLQRLLSAAVPAP

SEQ ID NO: 5792 - protein, 328 aa, Pseudosporangium sp.
  source 1..328: note = Related to NZ_JADMLH010000017.1
MRWDTPRIDDLAALAGFLGFDADELDWYADRKELNRHARDERLRHYRYTWLGRRLIEAPKPRLRAVQRRLLDDVLGRLPVHPAAHGFVPGRGPHTFAAAHAGQPVVVRLDLAAFFSTITAGRVYGLLRTAGYPEPVAHTLTALVTTRTPAAVLRNAPDWRTAALLRHPHLPQGAPTSPALANLLAYRLDRRLSGLAARFDATYTRYADDLAFSGPLTGGVAGRLVAAATTVVAAEGFRVHPGKTRIRGRADRQLLTGLVVNDRPAVPRAEYDHLRAVLHDAARNGLAAADRDGRADFAAYLRGRVAWVAHAHPSRAAKLHRLLAAALS

SEQ ID NO: 5793 - protein, 438 aa, Dactylosporangium aurantiacum
  source 1..438: note = Related to NZ_JNYJ01000032.1
MSTAAHRRRASALRATLRRHDRDSSGHAARAVAGALADAFLTVDWARGPLLEVGREVLGRRPRWLGPVVTAVLRAYREAPADRPRELAELISAPGRQPIRVRRATATRTVRQRWDSPRVDDLAALAEFLAVTPDELDWFADRRGLNRRHPDPRVRHYAYTWIGDRLIEAPKSRLKALQRRVLDELLGPLPVHPFAHGFVPGRSVHTFAAPHAGQVTVVRIDLRGYFSSVTAGRVYGLWRTAGYPEPVAHALTALCTTATPHAVSRRVEHRTPHLPQGAPTSPALANLVTFRLDRRLAGLAARFGATYSRYADDLAFSGPLRQPARLVAAVTAVAAEEGFRVNPAKTRVRGRGDQQRLAGLVVNDRPAVPRADYDRLRAVLHHAARDGLDAANRDGHPDFAAHLTGLVAWAAHGHPTRAARLHGLLRAAGINRRTATPP

SEQ ID NO: 5794 - protein, 353 aa, Dactylosporangium vinaceum
  source 1..353: note = Related to NZ_CP061913.1
MELAEFIAAHLPARLPVRIVVRRAVPTRTVRMRWDTPVLDDLAALAELLELDGDRLDWLADRREMNRKTLREPLRHYRYTWMGRRLIEAPKPLLRGLQRRLLDEVLGRIPVHPAAHGFVPGRSVHTFAAPHTGRDVVVRIDLAHFFASISVQRVYGLFRSVGYPEPVAHALAALCTTSTPSDIARGSIALRTPHLPQGAPTSPALANLCTFRLDRRLTGLALSFGATYTRYADDLAFSGSFNADHVIAAVRQIVAGEGFRVNPAKTRVRGRGDRQRLAGLVVNERPGVAREEYDRLRAILHAAARDGLDAANRDDHPDFRNHLLGRIAWVGHGSPARAAKLRELFGLVAATGL

SEQ ID NO: 5795 - protein, 434 aa, Dactylosporangium sucinum
  source 1..434: note = Related to NZ_BMPI01000004.1
MSTAQHRRPDAALRAGQGRHDRVSSGHAALADAFLATPAWERAALLGAGYEVLGRRPRWLGPVVTAVLGAYREPPADRPRELAAFVAALGRVPFRARVAVRRAVPTRVVRMRWDTPRLDDLAALAEFLEVDGDHLDWYADRREINRLAADGALRHYRYTWLATRLIEAPKPRLRTLQRRLLDEVLGRIPVHPAAHGFVPGRDVRTFTAVHLGKSTVVRLDLSAFFASMTVSRVYGLFRGAGYPEPVAHTLAALCTTRTPPDVVRDAPSFLLAAQLRQPHLPQGAPSSPALANLIAFRLDRRLAGLADRFGADYSRYADDLAFSGAFDAPRLVAAATDVVVDEGFRVHPMKTRIRGRADRQQLAGLVVNEHAAVPRTEYDLLRAMLHTAARDGLAAANRAGHPDFRAYLAGRIAWVGRDHPSRAAKLARLFTALP

SEQ ID NO: 5796 - protein, 310 aa, Micromonospora sp.
  source 1..310: note = Related to NZ_JAGGJO010000001.1
MVRRPTRHEPPRHRPPPAPLPLPVDRGRPADRGTEVPAARPATPAPHRGPRPHPGPPAAHGFVPGRSAHTFAGIHTAQPVVVRIDLLAFFTHIPATRVHGLFRTAGYPESVAHTLTGLCTNRTPHPVLRRAPTELPHRAARLAALRTGHLPQGAPTSPALANLCAYRLDRRLTGLADAFAITYSRYADDLAFSGDLTTRRIDDLIADVTDIARDEGFQVHPAKTRVRGRADRQLLAGLVVNQHPATPRDEYDQLRAILHNAARTGLAAQNRTGHPDFAQYLIGRVTWISHHHPARAAKLAALLAHALAAP

SEQ ID NO: 5797 - protein, 442 aa, Micromonospora sp.
  source 1..442: note = Related to WBKT01000007.1
MLWPAVVRVTGVPQQARRDPRRHRPDTGTAYRPINSAVQSRGTPAGTPVVPRQRDPALHGSLHRATRTGDTDDGLRSLRCSHGGVSRADQAGLPCGVRSRSLRGNSGKDHSPRHHTTGAKSRLRALQRRLLAEVLGRIPVHLAAHGFVPGRSAHTFAAAHAAQPVVVRIDPLGFFTHIPATRVHGLFRTAGYPEPVAHTLTGLCTTRTPHPVLRRAPTGLPHRATRLAALGTGHLPQGAPTSPALANLCAYRLDRRLTGLADAFETTYTRYADDLAFSGNLTTRRIHTRSPPSPTSPAKRASESTQPRPASVGAPTGNSSPDSSSTTTPPHHATNTTSSAPSSTTPPAPASPPSTGPTTPTSLHTSSDEFSESAITTRHAQPNSPRCWPKLLRHRRLTRRGSFAGSRQGHVGRPKRGLSRTYTCSADLRQASTATRLCDPLT

SEQ ID NO: 5798 - protein, 537 aa, Micromonospora orduensis
  source 1..537: note = Related to VDFY01000230.1
MPGAAPFIGRGLTPRIHRHATCIADTHGGPRSLRCSHGGVSRADQAAPPRGVRSRSLRGNPGDAILTSAPHHRCVGTLREPVHPYDRASSGHAATPTGLPVNTIHALATALADAFLAGAGWRRGDLVDQGGLVLGVRRRWLWPVADAALVAYLHPPTDRPRELATFLSTLDPLRAAVTAARQHRRPIVIRARPVTPTRTVRRPWHTPVIDTVGDLAAMLDLSIEHLDWYADRRAMNRRAPAHRLHHYHNRWTDRGRLIEAPKSRLRALQRRLLAEVLGPIPVHPTAHGFVPGRSAHTFAATHAAQPVVVRIDLLAFFTHIPATRVYGLFRTAGYPEPVAHTLTGLCTTRTPHPVLRRAPTDLAHRAARLAALRTGHLPQGAPTSPALANRCAYRLDRRLTGLADAFEITYTRYADDLAFSGDLTTRRIDDLIAAVTDIARGEGFQVHPAKTRVRGQADRQLLAGLVVNHHPATPRDEYDQLRAILHNAARTGLAAQNRTGHPDFAQYLIGRVTWVGHHHPARAAKLATLLAQALAAP

SEQ ID NO: 5799 - protein, 459 aa, Micromonospora globbae
  source 1..459: note = Related to NZ_RAQQ01000031.1
MTTVRALTTALADAFLADGDWHRPDLVNRGGLVLGVRRRWLWPIADAVLVAYPHPPRDRPRDLAAFLATLEPLRGAVTAARQHGRPIVIRARPVAPIRTVRHPWHTPVIDDIGALAAMLDLSIEHLDWYADRRAMNRRATDQRLHHYGYRWTNRGRLIEAPKPRLRALQRQLLAEVLGPIPVHPAAHGFVPGRSAHTFAAAHAGQPVVVRIDLLAFFTHIPASRVYGLLRIAGYPEPVAHTLTGLCTTRTPHTVLRQAPADLPHRSARLAALRAGHLPQGAPTSPALANLCAYRLDRRLTGLADAFALTYTRYADDLAFSGDLTNQRTSDLTAAVTTIARDEGFRIHPDKIRVRGQADQQLLAGLVVNHRPAAPRDEYDRLRAILHNAARTGLDAQNHTGHPAFAEHLTGRVAWIAHHHPTRAANLARLLDQALNPPDGRSTTATRQAPAQLDVGEAAT

SEQ ID NO: 5800 - protein, 533 aa, Micromonospora craterilacus
  source 1..533: note = Related to POTY01000051.1
MAAEDIPVAANGSASRPATAERAATGVRLGWLGCTDGSVSRADQAAPPGGARSRSLRGNPGDATLTQAPHHRCVGTLREPVHPHGRASSGRAAPIRWAAVTTVHALATALADAFLAEDSWRRPDLVHRGGLVLGVRRRWLWPVADAVLVAYPRPPRDRPRELAAFLTTLDPLRDAISAARWQGRPIVIRTRPVAATRTVRRPWHTPLIDDVGALAALLRLSVEHLDWYADRRAMNRRASDQRLHHYRCRWTDRGRLIEAPKPRLGALQRRLLAEVLGPIPVHPAAHGFVPGRSAHTFAAAHAGQPVVVRVDLLAFFSSVPATRVYGLFRTAGHPEAVAHALTGLCTTRTPSSVLRQAPSDLPHRSARLAALRAGHLPQGAPTSPALANLCAYRLDRRLAGLADAYGATYTRYADDLAFSGDLSASSLITAVSEIVRDEGFRIHPDKTRVRGQGDRQLLAGLVVNGRPATPRDDYDRLRALLHNAARTGLDAQNRTGHPAFADHLAGRVAWIGHQHPARAAKLAALLAEALAAR

SEQ ID NO: 5801 - protein, 444 aa, Asanoa ferruginea
  source 1..444: note = Related to NZ_QUMQ01000001.1
MTSARSLAVALADAFLADGEWRRPALADRGGLVLGVRRRWLVPVADAVLTAYPRRPSDRPRELAAFVAGLEPLREAVRRPILISSRQVVATRTITHRWHTPVLDHLGDLAAQLGLSIEHLDWYADRRAMNRRAADPRLHHYRYRWAGTRLIEAPKPRLRDLQRRLLTDVFGRIPVHDAAHGFVPSRSASTFATAHSGQPIVVRVDLLAFFATVTAARVYGLLRTAGYPEPVAHALTGICTIRTPANVLRMAPPHLIERPARIAALRAGHLPQGAPTSPVLANLCAFRLDRRLTGLAGAFGVSYRRYADDLAFSGGISGQRLDDLLVAVADVVRDEGFRVHPTKTRIRGRGDRQLLAGLVVNERPAVPRDEYDRLRAILHNAARTGLAAQNRGGHPAFAEHLAGRVAWVGRASPHRAAKLASLLDAALATAANPAHPHQRDIVDM

SEQ ID NO: 5802 - protein, 435 aa, Asanoa iriomotensis
  source 1..435: note = Related to NZ_BONC01000044.1
MTDARGLAVALADAFLADGEWRRPALADRGGQVLGVRRRWLVPVADAVVTAYPRRPSDRPRELAAFVSGLGPLREAVRRAATPIVVRSRPVVATRTVSHRWSTPVVDDLGGLAAVLGLTIEQLDWYADRRLLNRRAADDRLRHYRSRWVGGRLIEAPKPRLRALQRRLLTEVLGPVPVHGAAHGFVPARSAATFAAAHAGRPVVVRVDLLAFFATIGAGRVYGLLRTAGYPEPVAHALTGLCTIRTPASVLRLAPHDLVDRPVRLAALRAGHLPQGAPTSPALANLCAFRLDRRLSGLAGAFGLTYGRYADDLAFSGELPGRRLDDLLVAVAEVVRAEGFRVHPAKTRVRRRGDRQVLAGLVVNERPLVPREEYDRLRAILHNAALTGLAAQNRTGHPAFAEHLAGRIAWVGQGSPHRAAKLAALLDAALSTDPR

SEQ ID NO: 5803 - protein, 439 aa, Micromonospora coriariae
  source 1..439: note = Related to NZ_LT607412.1
MTTVGSLAVALADAFLAADRWLRGDLVASGGRVLGVRRRWLWPVADAALAAYPRAPRDRPRELAAFLANLALLAEVVGAARQRGHTVAVRARPVTPTRTVRRPWSTPVLDDLADLARLLDVTPDQLDWYADRRAMNRRADDQRLHHYRYRWTVAGRLIEAPKPRLCALHRRLLAEVLGPLPVHPAAHGFVPGRSAHTFAAAHAGRAVVVRIDLAAFFGSVPARRVYGLFRTAGYPEPVAHTLTAICTTRTPAAVLRAAPVDLPDRVWRLAALRGGHLPQGAPTSPALANLCAFRLDRRLTGLAAAFDVDYQRYADDLAFSGELPPRRVADLLAAVTEVVRDEGFRVHTRKTRVRGRADRQLLAGLVVNERPAVPRVEYDRLRAILHNAARTGLAAQNHAGHPAFAEHLAGRVAWVGHTHPGRAAKLAALLAAALASPQT

SEQ ID NO: 5804 - protein, 458 aa, Polymorphospora rubra
  source 1..458: note = Related to NZ_AP023359.1
MLSGVGGEEPPGRPGERVAAALADAFLAGDWGRDGLLGRGALVVGVRARWLRRVAAEVLGAYPRVPADRPRELAGFVAASPVYRAAWHSARRRGRRLRVRARPVTATRTVRRPWPTPVVDDLAALAALLGLTPEELDWYADRRSINRHARDERLRHYRYTWLGGRLIEAPKPRLRALQRRLLAEVLGPVPVHPAVHGFVSGRSAHTFAAAHAGRPTVVRVDLVSFFATVSAPRIFGLLRLAGYPEPVAHTLTALCVTRTPAGVLRAAPAGLPDRPYRLALLRGPHLPQGAPTSPALANLCGFRLDRRLAGLAAAFGATYTRYADDLAFSGDLPPRRAAALVDRVTAVVAGEGFRVRPDKTRIRGRADRQLLAGLVVNTAPGVPRDEYDRLRALLHNAARTGLAAQNRAGHPDFEAHLAGRIGWVGRDRPARAAKLRALFEAARLRPDDGSPGAHAAAP

SEQ ID NO: 5805 - protein, 410 aa, unidentified
  source 1..410: note = Related to JADGGF010000365.1; note = Micromonosporaceae bacterium
MLGYAPQWTDGVVDEVLTYPRPPADRPRELARFIARLRAFRSHVAGAPGASPEAAPVRVVHRVVTPTVTVRQPFHTPRLDSVADVADWLGLSIVELEWFADVREINRQATDRRLRHYTYRWLNGRLIEAPKPRLRSLQRKVLDELLGPIPVHPAVHGFVSGRSPHTFAAPHAGQRMVIRLDVMSFFASVTAARVYGLLRAAGFPEPVAHVLTGLCTTRTPPDVLRRAPARVPNRDLRLALLRAPHLPQGAPTSPALANLCGFRLDRRLAGLAQSNGLRYTRYADDLAFSGFTSQPQRFIDIVRSIVADEGFRLNEAKTRLRGAADRQLLAGLVVNAAPAAPRDEYDALRALLHNAIYTGLDEQNRDGHPDFVAHLAGRIAWVGHRHPTRAAKLHALFQRALSGPPPEATA

SEQ ID NO: 5806 - protein, 446 aa, unidentified
  source 1..446: note = Related to JAHBSN010000079.1; note = Actinomycetia bacterium
MTRGRTLAVDAADALAGAFLAGEWDPPAMARRAQRALGDRRGWTLELARVVRAGFPERPADRPRELAGFIGRCEVFHRAVQDPDRPMRVRVWMAPPTEMGPARWPVAPLPDVAALATWLGVTVDHLAWFADRRSLERHVDDERLRHYRRRWLAKPDGTARLLEAPKEELKDLQRQVLHQILDRIPAHDAAHGFRPNRSVRTSAAVHRGQEVVVRLDLEAFFTSVDVGRVYGIFRLAGYPEPVAHTLAALCVTVTPGAVLRSAPPVPDSLVDARRRLLHRLRSPHLAQGSPTSPALANLVAFRLDRRLAGLAAALDARYTRYADDLVLSGGRNLVRSAGPILHLVERIARSEGFTVHDRKTRVLTSAQRQRITGLVVNGGVNVARPDYDRLRAVLHDAALHGPEAANREGHPDFQAHLQGRVAWVGAGNPGRAHKLARAFAAIDWDA

SEQ ID NO: 5807 - protein, 453 aa, unidentified
  source 1..453: note = Related to JAFAZI010000149.1; note = Frankiaceae bacterium
MSTSRASVANALAAALLDGEWKSVTTLAGRGARALGVSQRRLGAVAGDVLAAYREPPLDRRRELSSYLLELPSFHVLWEGPGRPPIVQRHRLPLADMGRARWPVPTIATSLELASWAEEDLSVLDWYADVRSLERSAAPKLRHYDREWRYNRRGGVRLLERPRSRIKGLQRRVLREMLDVVPAHGAAHGFVAGRSVVSFVTPHVGRDVVVRLDLTACFASITAPRVFGVFRMLGYPEAVAHTLTGLSTTVVPRDVLRSAPQALRNEDLDARRWLLTRLAEPHLPQGSPTSPALANLVLFHLDARLSGLAAAAGASYSRYADDLAFSLDGTDAVRRAKRLVASARSVVADERLRLNDAKTSITRRSQRQVLCGVVVNDKPAVERRRRESLRAALHNIRQHGPESQNRAGHEDFRAHLLGEIAWVSAVNPDHGERLRSEFAQITWSELGPGASQP

SEQ ID NO: 5808 - protein, 336 aa, Amycolatopsis dendrobii
  source 1..336: note = Related to JACGZW010000002.1
MPVWRWQVARWTTFDECAAALDLTPGELSWFADERGWHRRSGPVLRHYSYRWIPTATGGARLIERPKPRLAEVQRRIRRQVLDALPVHEAAHGFRRGRSIHTCARPHAGQDVVVRLDLAGFFPTVSASRVRSLLDLAGYPKAVAAAIAGILTTRTPVDVLRSAPARSAMLSHLAGTHLPQGAPSSPSVANAVTHHLDRRLSGLAAVLGANYTRYADDLAFSGDASLPLHRLLPGVRRIVTDEGFRLRDDKTSVKPAYRQQRVAGLVVNAAPAVARAEYDELRAVLHNCARTGPAQQNRAGHPDFRAHLMGRIAWISATNAARGTKLRGLFDRIDWS

SEQ ID NO: 5809 - protein, 350 aa, Amycolatopsis sulphurea
  source 1..350: note = Related to NZ_PDJK01000002.1
MNGERVTSASLLGPMPVWRWPVARWTTFDECAAALDLPPGELSWFADTRGWNRRAPARLRHHCHHWIPTASGGARLIERPKPRLAELQRRVRRHVLDALPVHEAAHGFRGGRSIHTCAQPHAGQEMVVRMGLEGFFPAVSATRVRALLELAGYPPAVRAALAGILTTRTPVDVLRAAPVRARSLGRLAGTHLPQGAPSSPSVANAVTHHLDRRLSGLAASLGVNYTRYADDLAFSGDAGLPLHRLLPGVRRIVTDEGFRLRDDKTSVTPAYRQQRVAGLVVNATPAAARAQYDELRAVLHNCAKTGPAPQNRAGHPDFRAHLRGRIAWISATNPARGAKLTDLFHRIEWD

SEQ ID NO: 5810 - protein, 369 aa, Amycolatopsis sp.
  source 1..369: note = Related to NZ_CP080519.1
MNGERVTPASPTNPANPAEHTKPFGPQEPSLLDPLPPIWRWQVPHWPTFESCAAALDLTPGELSWFSDPRHWNDRANHTLRHYHHRWIPTSTGGLRLIERPKPRLAELQRRIRRHVLTALPVHDAAHGFHPGRSILTCAQPHAGQDKVIRMDLEHFFPTVSARRIRSLLELAGYPPAVAQALAGILTTTTPPVVLKNAPRKVRDQLKKPHLPQGAPSSPAVANAVTNRLDRRLSGLAQKLGANYTRYADDLAFSGEATLPLHRLFPGVRRIVEDEGFRLRDDKTSVAAKHQRQRVAGLVVNTKPAAQRTYYDDLRATLHNCATTGPQAQNHAGHPDFQAHLRGRIAWISATSAPRGVKLKELFDRIDWS

SEQ ID NO: 5811 - protein, 362 aa, Amycolatopsis saalfeldensis
  source 1..362: note = Related to NZ_FOEF01000001.1
MNGESVTSASLLQPWPVWRWPVSRWASFDECAGALDLMPGELGWFADARSWNRRANPVLRHYSYRWIPTASGGIRLIERPKPRLAELQRRVRRHVLDALPVHEAAHGFRTGRSILTCAQPHAGQQLVVRMDLEAFFPTVSARRIRALLELAGYPAAVSAALAGILTTATPADVLREAPAGRRGPVRARLLNSLAATHLPQGAPSSPSVANAVTHHLDRRLAGLARTLGARYTRYADDLAFSGDAGLPLHRLLPGVRLIVTGEGFRLREDKTSVAAAHQQQRVAGLVVNSAPAATRASYDELRAVLHNCARTGPAAQNRAGHPDFRAHLLGRIGWIAATSRARGEKLKALFDRIDWHAETAGD

SEQ ID NO: 5812 - protein, 355 aa, Amycolatopsis keratiniphila
  source 1..355: note = Related to NC_021252.1
MTGERVTPASLLGPMPVWRFQVARWTTFDECAAALDLTPGELSWFADAKGWNRRAAEPVRHYTYRWIPTASGGVRLIERPKPRLAELQRRIVRHVVDALPVHEAAHGFRRGRSPLSCAAPHAGRETVVRMDLEGFFPTVSARRISALLALAGYPPAVAEALAGVLTTAVPPAVLATVPGGRRDPARTRLLSNLAATHLPQGAPSSPSVANAVTHHLDRRLGGLARALGATYTRYADDLAFSGDSLPLHRLLPGVRRIVTDEGFRLRDDKTSIAGAHQRQRVAGLVVNSAPAATRADYDALRALLHNCARTGPETQNRSGHPDFRAHLLGRIGWIAASSERRAAKLRDLFGGITWP

SEQ ID NO: 5813 - protein, 357 aa, Amycolatopsis nigrescens
  source 1..357: note = Related to NZ_ARVW01000001.1
MNGEKVTSASPLGPLPVWRWPVARWTTFDECAAALDLTPDELSWFADAKSWNRRAAGPLRHYRYRWIPTASGGIRLIEQPKPRLAELQRRLRRHVLDALPVHEAAHGFRPGRSAMTCAAPHAGRDLVVRMDLEGFFPTVSARRLRSLLLLAGYPEAVAGALAGMLTTAAPVDVLTAAPDGRRDSARTRLLNNLAATHLPQGAPSSPAVANAVTHHLDRRLAGLANVLGARYTRYADDLVFSGDTGLPLHRLLPGVRAIARDEGFRIRDSKTSVTAAHQRQRVAGLVVNSSPAIARAEYDELRALLHNCARTGPGVQNRHGHPDFRAHLLGRIGWAGASSPARAAKLREMFDRISWTG

SEQ ID NO: 5814 - protein, 349 aa, Amycolatopsis xylanica
  source 1..349: note = Related to NZ_FNON01000006.1
MLDPVWRWPVARWETFTDCARALDLTEGELSWFADARTWNRRADAPLRHYTYRWIPTASGGIRLLERPKPRLAELQRRVVRHVVNALPVHDAAHGFRAGRSALTCAAPHAGQALVVRMDLEGFFPSVSARRVRSLLLLAGYPEAVALALAGVLTTAAPVDVITGAPDGTRDASRVRLLNNLARTHLPQGAPSSPSVANAVTHHLDRRLAGLARVLGATYTRYADDLAFSGPAELPLHRLLPGVREIVRAEGFRLRDNKTSVAAAQHRQRVAGLVVNSAPAAARADYDDLRALLHNCARTCPAAQNRYGHPDFRAYLLGRIGWIGTGHPARAARLRALFDRVEWPDTLPG

SEQ ID NO: 5815 - protein, 357 aa, Amycolatopsis acidiphila
  source 1..357: note = Related to CP090063.1
MNGEKVTSVSPLGPRPVWRSPVPRWTTFDDCAAALDLTPGELAWFADARSWNRRAGTALRHYRYRWLATAGAGIRLLEQPKPRLAELQRRVCRHVVGALPVHEAAHGFRRGRSAITCAAPHAGRALVVRMDLEGFFPAVSARRVRSLLELAGYPAAVAAALAGILTTAAPVDVLAAAPDGRRDPARTRLLNNLASTHLPQGSPSAPAVANAVTHHLDRRLAGLARTLGVRYTRYADDLAFSGDATLPLHRLLPGVRLIVRDEGFRLRESKTSVTGTHQRQRIAGLVVNSSPAAARPDYDALKALLHNRVRTGPQPQNRLCHPDFRAYLLGRIGWIAASHPRRGEKLRALFDRISWQG

SEQ ID NO: 5816 - protein, 620 aa, Amycolatopsis antarctica
  source 1..620: note = Related to NZ_NKYE01000001.1
MNGSGPDGARDDVPRDFVSRDCAPRDEVSGGEVSGGEASGGAASGTLPAATDAAPDAATAAADAAAADADADADADAATDAAAATAAAATDAAAAATAAAATDADAATAAAADADVAADDEPGHDMDELAPGPAHAEHPGGAPEPAEPVEPAELIERGDWPALIQRSRDRARTRWRSNAGRSVAAALAGPWQRDALADRLTEEAGHSADAAAELANRLVELNPSPPFGGERHLARLIADLPPLPAPAPVAPFRITGGTAEPQAGLSVAAREWRWDVPRWNTVGECAEALDLTVGELDWFADRGTWNRRAACPLRHYRYRWIPTSSGGVRLLEQPKPRLAELQRRITRHVLSRLPVHEAAHGFRPGRSAFTCAAPHAGSARLVRFDLEGFFAAVAPGRIRSLLGRAGYPRAVAGALAGVLTTAAPVDVLSAAPRASDDAVRHRLLRGLAAAHLPQGAPSSPAVANAVTAGLDVRLEALARALDARYTRYADDLAFSGDSTLPLHRLLPGVRRIVMDEGFLLRKGKTSVTFAHQRQRVAGLVVNSAPAVPREEYDALRALLHNCLRTGPAAQNVHGHHDFRAHVLGRISWVGATHPGRAGRLRTVFDRISWHETDVTGSRHG

SEQ ID NO: 5817 - protein, 434 aa, Prauserella cavernicola
  source 1..434: note = Related to NZ_JAENJH010000016.1
MSAVERRVAARRRQAEELAAIALAGLWEQTELASRLEGHSRLDGDDARLLAQRLLETFPGGSPSVAGFVDALRRYPPLPVRTLPGSAVVPVEPWPVWRWDVPRWRTVRECAQALDLTEGELYWFADARGWNRRARASLRHYRYRWVPTRSGGVRLLEQPKPRLAELQRRVVRHVLAALPVHDAAHGFRKGRSAATCAGPHARRDLVVRLDLEGFFAAVPATRLQGLLALAGYPAGVAQLLAGLLATETPADVLSAAPRAGDALVRRRLLEHLARPHLPQGAPSSPSAANAVACHLDVRLAGLARVLGATYTRYADDLAFSGDARLALHRLLPGVRRIASDEGFRLRDTKTSVAGAHQRQRVAGLVVNTAPAAPREDYDALRATLHNCVRTGPAAQNRHGHPDFRTHLLGRIAWVGSTHPGRAAKLRALYDRITW

SEQ ID NO: 5818 - protein, 355 aa, Prauserella flavalba
  source 1..355: note = Related to NZ_MASU01000002.1
MRTLPDSRAVPVEPEPVWRWDVARWRTVEECAHALDLTEGELYWFADARGWNRRAGTALRHYRYRWVPTRSGGVRLLEQPKPRLAELQRRAVRHVLGALPVHDAAHGFRRGRSAATCAAPHASKDLVVRLDLEGFFAAVSAARLRGLLRLAGYPDGVATLLAGLLTTSTPVDVLAAAPRSRDDAVRRRLLHRLAAPHLPQGAPSSPSAANAVAYHLDVRLAGLAGVLGAAYTRYADDLAFSGDARLPLHRLLPGVRLIAREEGFRLRDSKTSIAAAHQRQRVAGLVVNAAPAAPRAEYDALRAILHNCARTGPQAQNRHGHPDFRAQLLGRIAWIGSTHPGRAARLRALFERITW

SEQ ID NO: 5819 - protein, 457 aa, Prauserella muralis
  source 1..457: note = Related to VIVS01000002.1
MPRVSEPGDDEAADVGDWRQRGRARRRRRTVERRRQAHQLALLALEGPWDRADLTARLVRGSRLDDDDARHLTARLHERFPDAPPDDPGRVAAAILALPPLPVRTLPGSVEAPVEPMPVWRWPVPHWRTLGDCAEALDVDVGELQWFADTRGWNRRAGAALRHYRYRWVPTRSGGVRLLEQPKPRLAELQRRVTRHVLAALPVHDAAHGFRPGRSAATCAEPHAGRSFVVRLDLEGFFAAVSAARVRALLRLAGYPPAVAAAVAGLLTTTAPADVLSAAPNTRDRESRRRLLRRLAAPHLPQGAPSSPAVANTVAQRLDLRLAGLAAALGARYTRYADDLVFSGDADLPLHRLLPGVRLITGDEGFPLRDSKTSVAAAHQRQRVAGLVVNASPAVPREDYDALRAILHNCVRTGPAAQNRDGHPDFRAHLLGRIAWVGATHPRRAARLRALFARISW

SEQ ID NO: 5820 - protein, 415 aa, Amycolatopsis sp.
  source 1..415: note = Related to NZ_CP059997.1
MALHRATVALDGPWEPAAVADRLATTSIDFEAAQELAARLFALCPSRPFGPRQLANLLRSLPEPAPAEPSAPDLPSEAAPREWRWGVPRWETPAEVARALDLTVGELEWFADLGGWNRRAPLPVRHYRCRWLPGGRRLVEAPKPRLAELQRRIRRHVLDRIPVHDAAHGFRPGRSPLTCARPHAGRALVVRMDLEGFFAAVSGYRVRRMLCHSGYPDQVAAVVAGLLTTRAPVDVLGEPDRGDPARWRLARNLAAEHLPQGAPSSPAVANALAYGLDRRLAGLAGTLGATYTRYADDLAFSGDADLPLHRLLPGVRRIAREEGFRVREDKTGVAAAHQRQRIAGLVVNSAPAVARAEYDELRALLHNCARTGPAAQNRDGRPDFAAYLLGRIGWASTGNPARAAKLKEMFGRIPW

SEQ ID NO: 5821 - protein, 358 aa, Amycolatopsis anabasis
  source 1..358: note = Related to NZ_VTHK01000003.1
MPEHARLRPAPPPEPPAPRPWRWGVPRWATPAECARALDLTPGELDWFADLGGWNRRAGRPLRHYRYRWVPTRTGGARLLESPKPRLAELQRRVVRHVVARFPLHEAVHGFRTGRSPVTCAAQHSGRDVVVRMDLEGFFTTVSGRRVRALLAAAGYPPRVAAVLAGLLTTATPADVLADAPAGRDPALRWRQVRGLAGPHLPQGAPSSPAVANAAAHRLDVRLAGLARVLGVAYTRYADDLAFSGDAAVPVHRLVPGVRRIAREEGFRIREAKTSVTGAHQRQRVAGLVVNSAPAVSRREYDALRALLHNCVRTGPRAQNRDGHPDFRAHLLGRIGWAGTGNPRRAARLRALFDRIAW

SEQ ID NO: 5822 - protein, 409 aa, Crossiella cryophila
  source 1..409: note = Related to NZ_JACHMH010000001.1
MTSADLLHLARTALDGAWTRPALATRLAGISLHAAPNPDPEDLAARLLDLSPSPFFGPPEALARLLADLPRQVEPAAAPRPRWRADVPRWETPADLAAALRLTPGELDWFADARTWNRRAATPLRHYRHHWLGHRPLEIPKPRLAEIQRRLNRLLLARLPLHEAAHGFRPGRSAATFAAPHAGQPLVARFDLAGFFTSITAARLRAYFRHLGYPGNLAVALTGLLTTATPPEVLRAAPPGAQRHRLATPHLPQGAPSSPAIANALAARLDRRLAGLAERIGANYTRYADDLAFSGDLPVDRLRAGVRRIAADEGFRLHPGKTRIAAAHQRQKLAGLVVNVRPAVSRADHDRLRAVLHNCARTGPDAQNHVGHPDFRAHLLGRIGWVGATHPARAARLRAIFDTIHWGQA

SEQ ID NO: 5823 - protein, 402 aa, Saccharothrix variisporea
  source 1..402: note = Related to NZ_RBXR01000001.1
MLTEAQAAAVLDGPWDRGGLAERLADVIGPVPAEDLAVRLLGLSPTAPPGGAPSLVRLVGDLALETPPEEPRWRGEVPRWETTGDLARALGLDVGELAWFADARAWNRRAGEPLRHYRTWWVPSRSHGRRLIESPKPRLAELQRRLVRHLLDRFDVHDAAHGFRKGRSTTTFAAPHAGKPLVVRLDLEGFFTSVTGARLRGLLTAHGYPITVATALTGLLTTRTPPEALHPADWPQRRRLAAPHLPQGAPSSPATANVIARALDRRLAGLARTLGATYTRYADDLAFSGDDDLPLHRLLPGVRGVVEDEGFRLNPRKTRIAAAHQRQRLAGLVVNDTPAASRAEYDDLKAVLHNCARHGLESQNRHHHPDFRAHLRGRVEWVSAGRPARRARLTALLDAISG

SEQ ID NO: 5824 - protein, 411 aa, Kibdelosporangium persicum
  source 1..411: note = Related to JAAATY010000004.1
MYVRARGHRENESLRVAASALDGPWTQAEIATRLMPLYVDPAAAEVMADRLVSHSPRAPFGGIADLARLIAAFPPITQAPAPPPKPKRSLDIAGLLDVTPSELDWLADARGWNKRAGKPLWHYRSWWTGTSTGGLRLIEAPKPRLAEAQRRLVRHLGLPVHEAAHGFRKGRSGLTYAAPHSGKPVVVRMDLEGFFASVTGARVRALLHEYAQATTLAGLLTTRAPLAVLRDAPKTSGDPDVRRRLLAHLAHQHLPQGAPSSPAVANAVAYRLDLRLSGLARALGAHYTRYADDLAFSGPQTLPLYRLLPGVAKIAREEGFRVRPDKTSVTGQHQRQKLAGLVVNASPAAPRAAYDELKALLHNCRRTGPQAQNRAGHPDFQAHVRGRIDWVAAGHPARGAKLRALFGQIDW

SEQ ID NO: 5825 - protein, 401 aa, Kibdelosporangium phytohabitans
  source 1..401: note = Related to JADBEI010000001.1
MESLRVAASALDGPWTRSAIATRLISFYADPAAAETMAGQLLDHCPRPPLGDAADLARMIAAFPPMPGYAPPPPKPKRSLDIAALLDVTPSELDWLADARGWNRRAGQPLWHYRSRWAGTSTGGLRLIEAPKPRLAEAQRRIVRHLDLPVHGAAHGFRKGRSAVTYAAPHAGKPLVVRMDLEGFFACVTGARVRALVHEYQQASALAGLLTTRTPLEVLRSAPPSSGDPDVRRRLLARLAYQHLPQGAPSSPAVANAVAYRLDLRLAGLARALGADYTRYADDLAFSGPQTLPLHRLLPGVRAIARDEGFRVRPDKTSVTGRHQRQKLAGLVVNAAPAVPRAEYDALKALLHNCRTTGPDAQNHVGRNDFAAHVRGRIEWVAAGHPARGAKLRKLYSQITW

SEQ ID NO: 5826 - protein, 412 aa, Kibdelosporangium aridum
  source 1..412: note = Related to NZ_FWXV01000002.1
MYAWARGYRENRSLRVAASALDGPWTQTDIATRLSALYADPAAAEVMADLLVSHSPRQPFGSLDELARQIAAFPPLPKPPAPEPPKPKKSLDLQALLDVTASELDWLADARGWNKRAGQPLWHYRSRWVGTSTGGLRLIEAPKPRLAEAQRRIVRHVDLPVHEAAHGFRKGRSALTYAAPHAGKPLVVRMDLEGFFASVTGARVRALLHEYEQAATLAGLLTTRTPLKVLRAAPTTSGDPDIRRRLLAHLAHQHLPQGAPSSPAVANAVAYRLDCRLAGLAKALGAEYTRYADDLAFSGPQTLPVHRLLPGVVMIARDEGFRVRPDKTSVARQHQRQKLAGLVVNTAPAVPRVEYDALKALLHNCVKTGPQAQNRAGHSDFQAHVRGRIEWVAAGHPARGAKLRELFCQVTW

SEQ ID NO: 5827 - protein, 417 aa, Kibdelosporangium sp.
  source 1..417: note = Related to LN877229.1
MSVRHLDLPVHEAAHGFRKGRSALTYAAPHAGKPVVVRMDLEGFFAAVTGARVRALLFEYEQAVVLAGLLTTRTPQEVLRAAPGTRGDPDVRRRLLSRLAHQHLPQGAPSSPTIANAVAYRLDCRLTGLARALGADYTRYADDLAFSGPHTLPLHRLLPGVRTIARDEGFRVRPDKTSAAGQHQRQKLGGLVVNVAPAAPRAEYDAVKALLHNCLATGPGAEPRWPQRLRRARAWPGRVGGGRTRGQGSEVARALQPDRLVVPYDPGVADGAADFEIGKDGLTVIIVGVDGSPPSLHAAAWAGGLARRERAQLVLVYVEPIASPAYWTAMGMAGATEAATAFVDEIRVEAAAYLDHAGIPWELVHYRGDPAHGLEAIAEERRADCIVVGRSRHGGGLVGSVPKMLVKGAKRPVVVVP

SEQ ID NO: 5828 - protein, 378 aa, Kibdelosporangium banguiense
  source 1..378: note = Related to JAGINW010000001.1
MADRLLAHCPRPPLGNARDLSRLILEFPPEPVLVMPPVPRIWRWGVPQWEYTADVAALLDVTLSELDWLADAGGWNRRAGEPLRHYRPKWVATSTGGIRLIEAPKPRLAEAQRRIARHLSLPVHEAAHGFRPGRSPLTYAQPHAGKALVVRMDLEGFFAAITGARVRALLRTAGYPHQVAIKLAGLLTTRTPLDVLRDTPPTQGDPDVRRRLLARLPGQHLPQGAPSSPQLANAIAYRLDCRLAGLANVLGAEYTRYADDLAFSGPQTLPLHRLLPGVRAIAHDEGFRVRPDKSRVSAAHQRQKLAGLVVNSAPAVPRAEYDALRALLHNCVRTGPEAQNRAGHQDFQSHVRGRIEWVAAGHPGRSAKLRALYRNIAW

SEQ ID NO: 5829 - protein, 432 aa, Saccharopolyspora erythraea
  source 1..432: note = Related to AM420293.1
MIWQDVALRALAETAVNADAWEQSELAAALLRHFRRDGGASDAFAWTLLAHVPEPPESAEELLALLVAVPELTAALPKAPRPALEVELSPGWRWPVARWHTAEQLAHGLDLDVGELMWFADRGGWLRHAHPPLRHYRCRWMRTRSGGIRLIEQPKARLAELQRRITRRVVDAMPVHEAAHGFRRGRSAATCAAEHAGRHFLVRVDVEGFFASLTFTRISRAMRAAGYPGAVAGAIGGLLTTATPRDVLAAAPRVRESEVDARRRLLGRLAAAHVPQGAPSSPALANALMHRLDRRIDAYAGTLGATYTRYADDLAFSGDRRLPVAALLRGVTAIVRAEGLRLRQSKTRVLAPHQRQRIAGLVVNDGRAVAPRAEYDALRALLHNCARTGPQAQNHEAHPDFRSHLLGRIAWVGINHPGRARKLGELFDRINW

SEQ ID NO: 5830 - protein, 316 aa, Kutzneria albida
  source 1..316: note = Related to NZ_CP007155.1
MDDWLRLLRIDSGEFAWFADDRGWNRRAAEPLRHYRYRWMRTRSGGLRLIEAPKPRLAEVQRTLLRHLELPVHEAAHGFRRGRSVHTFAAPHAGRDLVLRMDLEGFFASVTATRVRALVGDLAGLVTTAAPVAVLRAAPPAPDVEVRRRLLDRLARPHLPQGAPSSPALANAVAHRLDRRITALADVLGATYTRYADDLAFSGDAGLPLHNLLRGVRRIAADEGFQVRPDKTRITPAHHRQRLTGLVVNDSPAASRAEYDELRAVLHNCVHSGPSTQNRGGHADFRAHLLGRIGWVGENRPARAAKLRALFDRITW

SEQ ID NO: 5831 - protein, 425 aa, Pseudonocardia sp.
  source 1..425: note = Related to NZ_JAJGSX010000003.1
MAPDPHTVAAAALAGPWQLEPLTERLAEHGKWRSPEEIGDVVAILLGRWRARPRRPFERVVTEVEGLLAARPGTRPPDLEPDVPIWRWPVQQWTDLDALALGLDLRDGELEWFADPGGWLRRTPAGPLHHYRRRWVTARSGTPRLLESPGPRLQELQRRVGRHVLARIPVHDAAHGYVRGRSPATLAALHAGRAMVVKVDLEGFFGHVTGERLAGLMRIAGYPPAVAAALAGLLVTATPEPVLRSAPAAEGAWEARRRLLDRLAAPHLPQGAPTSPAAANLLAFRLDRRLAGLAAALGATYGRYADDLVFSAATLPASGLITRIGRIAEEEGFRLHATKTRVLPSHHRQRVTGLVVNAEPGAARREYDALRALLHNCARTGPDEQNTAEHPAFREHLLGRIAWVSTGRPRRADRLRALFDAIRWP

SEQ ID NO: 5832 - protein, 450 aa, Pseudonocardia nigra
  source 1..450: note = Related to NZ_JAHKRK010000047.1
MDGPWRRDDLAERLAPLRGWLGPDEVGRTVAVLLARWPRPPTAAPAQVAAELARLLAALPRRGPIVPDPPPRPQWRWPVAPWTDLAALSHALNLRDDELNWFADPGGWLRRAPEGPLHHYRRRWTASRSGVPRLLETPGPRLQELQRRVARHVLARIPVHDAAHGYVRGRSPHTLAAEHAGRAMVLRLDLEGFFGHVTGARVAGLLRTAGYPPAVAAALAGLLVTATPAHVLRHAPAGEPHAWEPRRRLLDRLAGPHLPQGAPTSPAVANLLAHRLDRRLAGLSTAVGARYGRYADDLVFSGELPVHGLAARVTAIAREEGFRARTDKTRVMPSHHRQRVTGLVVNARPAAPRAEYDALRALLHNCARTGPQAQNRDGHPAFRDHLLGRISWVAAGSPNREARLRALFSEIDWSCRSGSRALMVGVDVLLVRQPRDGVHDLVGCGPADHP

SEQ ID NO: 5833 - protein, 353 aa, Pseudonocardia xinjiangensis
  source 1..353: note = Related to NZ_JAAXKY010000083.1
MRPEEPAVPVWRWPVTPWSSLDALTGGLDLRAGELDWFADRGGWLHRRPEGPLHHYRTRWTASRSGVPRLLETPAPRLQELQRRIGRRVLARIPVHVAAHGYVRGRSPLTLAAAHAGRAMVVRLDLEGFFSHVTGDRIAGLMRAAGYPPAVASALAGLLVTSTPVHVLRGAPPAPPDVLDSRRRLLDRLATPHLPQGAPTSPATANLLAHRLDRRLAGLAAAVGAEYGRYADDLVFSGGARLPAHGIAARVTEIAAEEGFRVRADKTRVLPAHHRQQITGLVVNARPATPRREYDALRALLHNCARTGPDAQNRSDHPAFREHLLGRISWVEAAHPARGARLRARFAEIRWPD

SEQ ID NO: 5834 - protein, 424 aa, Pseudonocardia oceani
  source 1..424: note = Related to NZ_JADQDF010000001.1
MAPEPHVLAALLPGPWTVDALTTRIAGCRGWGGPDEVGDVVAALLARWSRAPTGRPDRVGAQVAALLAARSRRRHVVPESPPADLAWRWPVEPWTGLDALARGLDLRPGELDWFADRGGWLHRTPDGPLHHYRRRWTTSRSGTPRLLETPAPRLSELQRRVGRRVLARIPVHDAAHGFVRGRSPHTLAAEHTGAATVVRLDLEGFFAHVSGARVAGLLRAAGYPDAVASALAGLLVTSTPAPVRRAAPAGGDVGARRRLLDRLAHPHLPQGAPTSPAVANLLAHVLDRRLHGLAGALGARYGRYADDLVFSGDRLPAHGLVARVTAIAAEEGFRVRPDKTRIAPAHHRQRVTGLVVNAHPAVARVDYDALRALLHNCARTGPDAQNRDGHPAFRDHLLGRIAWAGSGHPARAARLRALFDAISW

SEQ ID NO: 5835 - protein, 425 aa, Pseudonocardia sp.
  source 1..425: note = Related to NZ_CP013854.1
MAPGAQVVAALARQGRWDTVSLTDRLAVASGWSGPEEIAGVVGHLVGRWRREPTVPDDLFAAQVAELLALPRRHLRVGAPPEPVWRWPVARWTDVAMVARGLHLDEGELAWFADTGGWLRHVPDGPLGHYRRRWTASRPGTPRLIEAPAPRLAELQRRLLRRVLDRIPVHPAAHGYVPGRGPRTLALLHAARPMVLRLDLEGFFSHVTGARIAGLLRTAGYPEAVATTLAGLLVTATPPAVLRACPPAADPQPRRRLLDRLAAPHLPQGAPTSPAVANLLTHRLDRRLSGLAAAVGARYGRYADDLVLSGAANLPVHGLAARVAAIAREEGFRVRPGKTRIAPAHHRQRVTGLVVNSGSPAASRRDYDDLRALLHNAARTGPAAQNRAGHPAFREHLAGRIAWVGGGRPRRAEVLRSLFDAICWD

SEQ ID NO: 5836 - protein, 423 aa, Pseudonocardia sp.
  source 1..423: note = Related to MCIS01000001.1
MAPHPAAVAAAACAGPWGTDPLTERLAGLGGWSGPEELAGVVGALVARRRRAPRDSSAGVEAEVVALLAGPRRHRRVEQPDPVWRLPVPRWADLSALATALHLDDGELAWFADPGGWLRHAPEGPLTHYRRHWTPSRSGTPRLIEAPAPRLAELQRRIRRRVLDRIPVHPAAHGHVRGRSPHTLAAEHRARPMVLRLDLEGFYSHVTGGRVAGLLRVAGYPPAVAATIAGLLVTATPPGVLRACPHRGDPAARRRMLDRLAAPHLPQGAPSSPTVANLLTYGLDRRLSGLATAVGAAYGRYADDLVFSGDAALPVHGLTRRVAAIAAEEGFRVRPDKTRIMPAHHRQRVVGLVVNGDAPAASRRDHDELRAILHNAARTGPDAQNRAGHPVFREHLLGRIAWVGHGRPARAARLRELFDRISW

SEQ ID NO: 5837 - protein, 405 aa, Pseudonocardia sp.
  source 1..405: note = Related to BEGX01000057.1
MTDPEAVLVAILRVPWRERAVAAAVREIVGAQRAPELAARLLERWPDAPRVTHAEILAGITTALGRRIVLDPLPPPRWRWPVQRWEDVDALAAGLDLRDGELDWFADTRGWLADGRLGHYRRRWHDRRLIEAPKPRLAELQRRVGRRVLAHIPVHDAAHGYVRGRSPLTLARVHAGQALVLRLDVEGFFTRIGPARIAGLLATAGYPAAVARTLAGLLVTATPPGVLRAAPAHVDAATRDRLRAPHLPQGAPTSPAVANVLAHGLDRRLTALAAAAGARYGRYADDLVFSGDTTLPVQGLLRRARDVAADEGFAVRPAKTRVMPAHHRQRVVGLVVNETPAVSRREFDALRALLHNCARTGPAAQNRDGHPDFRAHLLGRIGWVATGSPARAERLRALFGGISWD

SEQ ID NO: 5838 - protein, 396 aa, Pseudonocardia sulfidoxydans
  source 1..396: note = Related to NZ_BJVJ01000106.1
MRPDPEVVLAAVLRVPWREEALAAAVTPEVARRLVELWPQPPRDTHAAILAGITRCLGRRIVLDPLPPPRWRWPVERWEDVDALAAGLDLRDGELDWFADVRGRLGDDARAHYRRRWHERRLIESPKPRLAELQRRVGRKVLAHIPVHDAAHGFVAGRSPLTLARVHAGREMVLRLDVEGFFTRIGPARIAGLLATAGYPAAVARLLAGLLVTSTPPGVLRAAPAGTAVERLRAPHLPQGAPTSPAVANVLAHGLDRRLSALAAAVGARYGRYADDLVFSGDGALPVQGLLRRARGVAADEGFAVRASKTRVMPAHHRQRVVGLVVNASPAVPRREYDALRALLHNCARTGPAAQNRDGHPDFRAHLLGRIGWVATGHPTRAARLTALFDAISWNG

SEQ ID NO: 5839 - protein, 412 aa, Pseudonocardia dioxanivorans
  source 1..412: note = Related to CP002593.1
MRRRRPDPEAVLVAVLRVPWRADALTAAVAGEVGADAAPELVARLLERWPVAPRDTHAAIVAGIGASLGQRIVLDPLPPPRRRWPVQPWEDVDALAAGLDLRAGELDWFADPGGWLDRSASPRLAHYRRRWHGQRLIETPAPRLAELQRRVGRRVLAHIPVHDAAHGFVAGRSPLTLAREHSGRQWVLRLDVEGFFSRIGPARIAGLLGAAGYPAAVAGALAGLLVTSTPAAVLRRAPERPADAVRDRLRAPHLPQGAPTSPAVANVLAHGLDRRLSALAAAAGARYGRYADDLVLSGDGPLPVQGLLRRAREIAADEGFDVRPAKTRVMPAHHRQRVVGLVVNSAPRVPRHEYDALRALLHNCARTGPARQNRDGHPDFRAHLLGRIGWVATGSPARAQRLRALFDAIDWA

SEQ ID NO: 5840 - protein, 421 aa, Pseudonocardia sediminis
  source 1..421: note = Related to NZ_SHKL01000001.1
MTEEAEGVLRDVLGVRWEVAPLAAALADRIGERAAGAAERLVERWPQAPRGTHADLVEEIAVLLAVRRRLVPAEPQPSWRWGVAEWESVDALSRGLDLRDGETEWFADPGGWLRRAPEGPLHHYRGTWRVSPSGAPRLLETPAPRIAELQRRIGRRVLMRIPVHPAAHGYVRGRSPATFAAVHAGAAMVLRVDVEGFFSRIGPARIAGLLRTAGYPAAVAAVLAGMLVTSTPRAVLRRAPGAPGEARRRLIDRLALPHLPQGAPTSPAVANVLAHGLDRRLDGLAGAVGARYARYADDLVFSGEADLPVHGLLRRAGEIAADEGFDVRPDKTRVMPAHHRQRVTGLVVNAGPAVSRRDYDDLRALLHNCARTGPDAQNTAGHPAFREYLLGRIAWAGTGRPARRDRLAALFARIDFGQDRS

SEQ ID NO: 5841 - protein, 400 aa, Pseudonocardia oroxyli
  source 1..400: note = Related to NZ_FNBE01000010.1
MTDPEAVLRALLGVPWRLGALTHTLGEVLGERAPEVAARLVDQWPEAPRAAHAELLAGIRGALGRRIVVEEPAPVWRWPVARWASVDELAAGLDLRAGEPEWFADPGGWLRRAPEGPLHHYRAVWRGDRLIETPGPRLAELQRRIGRRVLGRIPVHPAAHGYVRGRSPFTLAAEHAGRAMVVRLDVEGFFTRIGPARIAGLLRAAGYPAAVARVLAGMLVASTPRAVLRRGPSSQRQRLALPHLPQGAPSSPAVANLLAHGLDRRLGGLAAAVGARYGRYADDLVFSGDELPVHGLVRRVSAIAAAEGFTLRPDKTRIMPAHHRQRVTGLVVNATPAASRRDYDDLRALLHNCVQHGPDGQNREAHPAFREHLLGRIAWVGAGRPARRARLRELFDRIAF

SEQ ID NO: 5842 - protein, 434 aa, Pseudonocardia acaciae
  source 1..434: note = Related to NZ_JIAI01000002.1
MNWLSLAQRALDGPWLQGPLAERLGDELDPAAAERLASAVLAHRPRMPWTEQARFARELAEIPDVVAALAPGNGRGPRVLVSPEWRPVWRWPVPEWTTTEHLAHALDLTPGELAWFADSRGWLRRHRGGPLPHYRHRWLRTRGGVPRLLEAPKPLLAERQRRLLRHLLRAIPTHPAAHGFARGRSVLTFARPHAGKDLVLRFDLEGFFSCIGAARVAGLMRWAGYPGPVATALTGLMVTATPPPVLREAPPPAGPGQVDARRRLLTRLAGTHLAQGAPSSPALANLVAYSLDRRLSALARERGLAYTRYADDIALSGDHATSVPALRRAVSRIARDEGFRIRADKTRVMPSHRRQRLTGLVVNAEPAVARDEYDTLRALLHNCARTGPTEQNRTGHPDFAAHVRGRIAWVAATHPGRGEKLLAQYRAIRWPTPS

SEQ ID NO: 5843 - protein, 480 aa, unidentified
  source 1..480: note = Related to READ01000015.1; note = Betaproteobacteria bacterium
MSVRLFAERKHMLSASDTPPPPKDAAPLAGLSRSIADFLLYSLEQGFALNAKALRERARAHFFDASEILEAVYVELESDEWPWRGQTADVLAQRILVSEALLDLQAPIDEDELWYLDDETLASYKTQHESYLFSLSTMPVWKPPSVRGHAWLHSARSSVPSLESVSDIATWLNVSRDEWDGATNASKYRLRVHRKPSGKLRLLEIPPEPKRVLQRRLLHRLLDHVAPHEAAHGFVAGRSVHTHASLHIQQQVVIRLDLADFFANTLAARVFLLFRALGFVAHVANALTALCTTSQSRVSLRGALGAEYLNGNRYDIYSVNHLPQGAPSSPALANLCAHSLDVRLTAIAGQFGAIYTRYADDIVISGSGEIAARPRKFITLAREIIADEGWRLNPDKTRIMRNTGRQSFTGLVVNERVNVARDEFDRIKAAVHRATRDDVPHVLGLLSWLKQSSPERAAKLRQKLLARNDLTDVRSASKTR

SEQ ID NO: 5844 - protein, 471 aa, unidentified
  source 1..471: note = Related to REAM01000105.1; note = Betaproteobacteria bacterium
MSANEDTSPDDSRTPLLAFERFARSIAEFLLYSHREGFQLSVSALRARATRHFGGHDYLVCAIIREVIDDVAGWCDLPPTTLAQRILDSSALEELVAPFVEDDYWFLDDDALLDLRSAQARRVADAASLAAWLPPPQNGAEWLREARLISPSFATVVDLARWLDVSPEEFDAAMANRRYRLRVHAKPSGGTRLIEIPPESLRVLQRRVLHRLLDRISPHAAAHAYVRTRSAHTHAAQHVGREMVVRLDLRDFFPSIKGARVFLLFRSLGFAANIANVLTALCVASQSRASLRRALGAAHVAFFERFSANHLPQGAPTSPALANLCAHSLDVRLNALAESFNATYTRYADDLVFSGDEGIASEPREFVCLARAIVSDEGFQLNTEKTRIMRKSARQAFAGLVVNEKINLPRCDYDQLKAAVHRATLRSTSEEVSKLLGRIAWLRQNSPHRADKLRSKLISSLPNQSASPTAP

SEQ ID NO: 5845 - protein, 489 aa, unidentified
  source 1..489: note = Related to JAGNQL010000184.1; note = Burkholderiales bacterium
MVIDAAPPSPEWLAAQLAALFSHAVAHGYSLKPATLARRSSRHFAGASGIVRHVARDLQKRGQTGNDWTKWPTEVLADFILKSNAFVPLVDGYAVVTGEVESPKYETEPDAEIMALLAENPEALAAWLERDEADDVPLYAPFVATRPLPEVMPNFAATLPALNGVSDIARLLDVSREEWDDALARSRYRLRCVRKSSGGVRLIEIPSEALRVLQRRTLHRLLGRVSVHDAAHGFVRGRSVHTHAAAHVGRDIVIRLDLKDFFPSISGARVFLFFRSLGYNVRAANALTALCVAWQTRRSLRDGLKTLATTTDINALLPRYSVAHVPQGAPTSPALANLCARSLDLRLDAWAKSFGATYTRYADDLVFSGDAALAKSWRAFIATARVIIGEEGWELNVQKTRVMRRSVRQVFTGLVVNSRVNVARDEFDALKASVHRFCKPDATANADELRVLLGRVAWLGQSHPARAEKLRNKLYASTDSRADTNGDAA

SEQ ID NO: 5846 - protein, 486 aa, Casimicrobium huifangae
  source 1..486: note = Related to NZ_CP041352.1
MPATVPSETTPPPEVDAIADALAAFMLAEHTAGRSLTARALTARASARFVGCSALLGAARRDLALHAELAWPHWSAAQLAARIRKLPAFERLVTQSVLLTAAIEDITATLAHAADEKERGEHADWVAGLQARRARLQADLPRIWPVAATAGSDPPRVESGLQPLADLARRIEISEDELDAALRTSRTPHAFRLLVMRKQSGGLRVIEQPQDALRVLQRRVLREVLATADLHPAAHGFVRGRSALTHAALHSGRRLVLRLDIADFFTSITAGRVHSAFLRLGMPPRVATALTALCTSVQRAGALRAALRRHDAFASQTRIVGHVRDWQQTLCVPHLPQGAPTSPALANWIAYRLDRRLSGLAAAWDMRYSRYADDLTFSTDASDCNSLRFVDQVRTIVATEGWLLNERKTLVMPQSNRQRVTGIVVNQTMNLCRQDYDALKAAVHRHVNAPPDDAQRSQLLGRIAWLAQFRPERADRLLHKLRSAPR

SEQ ID NO: 5847 - protein, 453 aa, unidentified
  source 1..453: note = Related to JAFLCL010000155.1; note = Deltaproteobacteria bacterium
MAAVHALAHAIASAFLDGPWVPREMAQRATYAVRGVRTETRVGLHLVIPHEAVRTRTWLPALARATVMRFPEPPHATLDALAVWIGDQDSLARHAHITVVRAIALPAPAMSTMRGALADLGVPSITTLPELAAQIGTSVAALDFLSRARPREIVRPQHRTTLLRKQSGGLRVLEIPSPPLARAQRAILDAIVAHVPIHDAAHGFVRGRSPRSAAVRHMHREVVVRLDLADFFLSITAARVRGVFSRMGYPDVIAARLTRLTTTATRPDVIASLRTHVDHASTHALAQRLRTPHLPQGAPSSPALANLVAYHLDARLAGLARRFGATYTRYADDLTFSGDASLSHHVRGLVRSVVAICRDESFGVRHDKTRVLRRHRRQDVLGVVVNDRPNLARDRYDLLRAVLHRVAREGWERAEIDGQPIGPSALAGHVAHACTLVNDARARKLRAMLARLP

SEQ ID NO: 5848 - protein, 408 aa, unidentified
  source 1..408: note = Related to JACKEY010000014.1; note = Alphaproteobacteria bacterium
MLLRSPWELYALWAALDEAFGRRMPFTRQLAMEALRVGRVGEERLARGLREGRAFRGLLRDEEPLRLVLWDLPVTQMQPPRVPLHWEPPELPTDDALAAWLGLELGPLRAFADLQDRARHHPPAWRNYQHRWIGRRLIEAPKARLKHVQRRVLHGILDALVVHPAAHGFVRGRDRRSHAAPHVGHEVVARVDLARFFPSIHRRRVTGLFEAMGYPRRVARLLAGLCAARTPPDVVEAGPADAPVRYDAPHLPQGAPTSPAVANALCWRLDQRLSARATASGHVYSRYADDLTISGPRRGMRALVAAVQVIAADEDFVVAADKTRVMHQSEQQRVTGIVVNAQPGVPRRERERLEAILVNCGRTDPAAQNRDGHPDFAAHLRGRVAAVGAVNARHGEKLLALWQAVDWG

SEQ ID NO: 5849 - protein, 437 aa, unidentified
  source 1..437: note = Related to JAHQVJ010000021.1; note = Myxococcales bacterium
MHAATFCALLAEAFLAGDWQPADMARRGSAMIDAAGSQRRWMRRLAGRVAESLPRGEHLTPARVASFVERDLGFRRVWSTWLSSCRIRQRFWVHPTMGPSQLPLEAALPQVATAGQLADWLGVGVSELAGFADLQGRHLRASARSRRHYRRRWREPRSVAGSPRLLEAPKDRLRRLQRRILRGILSQVQVHDAAHGFVPGRSVHSCAARHACRPVLVRMDLSAFFTGIDGRRVAGLFEAMGIPRTVARVLAGLCTTATPADELAALAHTWWLRVLYARPHLPQGAPTSPALANLCAFRLDARLDAFARSKGWRYTRYADDLYLSGPDRPHRLVRMVHRIARQESFTVNARKTSIMRPGRAHRCLGLSVDRQPAVPRQLRERLEAILTNCVRHGPNGQNREGHPDFRRHLEGRVAWVTAACPRHGERFARLLEEIQWP

SEQ ID NO: 5850 - protein, 450 aa, unidentified
  source 1..450: note = Related to JAGQJO010000674.1; note = Myxococcales bacterium
MISHLPRGIPGVPTSMHDHRQAADPAVRRAGSQGTESEVSLHHPLIDALADALLAVPWDREALQRGFREVLGGYDPLAAGLAARLWTDARPDRGEAVRLLVEDVELRRLLQGPVVARRRAWHFPEEDPAPLRFEGLPELPDVAALARWLGWSVPVLLGHADLRHDHRRRAEYRDYVYRWHGARLIEAPKDRLAGGQRRILRELLVHVPLHDAAHGFVRGRSPRTHARLHVGCAVVVRVDLERFFASITAPRVRGMFRALGYPRRVASLLAGLTTSWPPPDVVPGGSPWSAPHLPQGAPTSPALANIVSHGLDRRLQGLARHHGAAYSRYADDLTFSGRALPSSLVPTIEQIAVSEGFRVRRCKTRRMGEGAAQRVTGLIVNRHVAVSRRERDHLRALLHLALTRGPASVRVEGVDDVRSWLRGRIAWVAHARPAHAERMLEVFHQIAWTA

SEQ ID NO: 5851 - protein, 454 aa, unidentified
  source 1..454: note = Related to JACKEN010000003.1; note = Deltaproteobacteria bacterium
MLDVLRQGRPGPSPFWVGLVARVRDAFGPTSPPPTLDALTRMLAEDPIFDEDYRAEMALLTEADGWKTPPYVDRLIFRPVGSRFRPGAAAAEWPVPRLESVPELAAHLEVPEATLEGWADVGGWLGRYPSDRRQHYVRRWIPGVPGRRSRPTPLRRAAPGCAPCLRSSGGSGPRLIEAPKTQLAKMQRRILRSILDLVPVHPAAHGFVRGRSIRTHAARHVHMQVVLRFDLRRFFPSVQAPRVQGLFRYLGYPEEVARLLAGLCTTITPHDVFPPRTAADVRQLYRQRHLPQGAPTSPALANLLCLGLDRRMMGLARAFDAGYSRYADDLVFSGGAALAARSRRFGGFVARVVEEEGFLLNHDKTRRMPRSGRQEVTGLVVNQGPAYPRDEFDRLKAILHQCALDGPERHNREGHPDFRAHLLGRVSFVESVDPRRGAKLRVRFERIRWGSSQR

SEQ ID NO: 5852 - protein, 413 aa, unidentified
  source 1..413: note = Related to JAEPMI010000002.1; note = Deltaproteobacteria bacterium
MSHAVAAAIALALLEPERWRSGVRASLESFEGLDAESRTAIGRLVKSLYVRPEVDELAALIARDPKVTLRGVIPRRWALPPLRMTRPPYGAPPLPTPADLAAFLDVEVGELSFLADPKGWNTDARRQHYRTRWVPKRRGGRRLIEAPKARLKRVQRKVLRGILDPVPLGAAATGFAPGASPSKHAARHSGKRWVLKMDLADFFAHVGSGRVRAIFETLGYPLAVRRLLVGLCTTRAPAELLLDADPVERALHGRRRLPQGAPTSPTLANLAAAPLDHRLWNLAARLGLTYSRYADDLAFSGDRMPESLIPRIAAIGIEEGFPLQLRKTRRMGRAVRQELTGLVVNADPAPRRESYDRLRAILHQAALDGPAAANREAREDFRAYLRGRIEWVAGGRPQRRAKLDALFARIDWS

SEQ ID NO: 5853 - protein, 351 aa, unidentified
  source 1..351: note = Related to JABTUV010000001.1; note = unidentified bacterium
MGLIIYAILSRGKIDAVAIRRSRKDYRSPFLFRRAGRPDAGKLASRGLPVLGNVNEVAALLGVSPKQLRWLSVADFGHYHSFLLEKKSGAARLIDAPKPQLKAAQRKIYELLLKKQPLHPAAHGFCPGKNVRDHAARHCGKQTVLGMDVANFCPSVSARRVCGLFKSWGYGEDVALLLTTLTTYNGHLPQGAPTSPALANLVFTHADARLAGLARRFGAEYSRYADDMTFSGGQAFQRKLSAFSKAVQGIVKEEGFALNHNKTRQMRHGRRQVVTGLVVNETPHVSRRMRRRMRAILHNAQRKGLEAQNRFKHPRFAEHLRGRIAWITSLHPRLGGRLLEGWKAARARFAG

SEQ ID NO: 5854 - protein, 462 aa, Thalassoglobus polymorphus
  source 1..462: note = Related to NZ_CP036267.1
MGLFDFIKGLFGGSAQVQSGPTHADVNPAHDQAGRDQTETSYAESIHADAGEAVPHEHSSPQNSSSNKVFRERKASKNIVLRKFSYRPSTVATPQEQEIVRHRPYKFAVPGPHTGEFLDLSQDADERWLEYYGLPTLATPDDLADWFGISIGKLAWLTHRMRDGNRPKDVKDAHYHFQWKKKRSGSWRLIEAPKEELKGVQTKILREILDLVPAHPAAHGFVPGRSILSNAVPHVGSKFLLKLDLENFYPTVRYSRVVAIFRSLGFSREVSIWLARLTVSAPPWSLDAPKKNWEFWQLMPPHLPQGAPTSPALANLSAFALDVRLSGMAKAYNLKYTRYADDLTFSGPGLSIPALNEFIPLTSKIIAAERFFVNKKKRKIIRNSQRQCVTGVVVNEKINVSRQDYDQLKAILHNCVKTGPQQQNRNQHPDFASHLRGRIAHMMQLNPSRGAKLLEIYQKIRW

SEQ ID NO: 5855 - protein, 358 aa, Planctomicrobium sp.
  source 1..358: note = Related to JABJMI010000419.1
MGLFDFIRGLFGSSPNHQVEQSGEQRDTTPGRSDPGVSETASPTPQVEPRQSVSKRTQTHLPCSKRSPVKLQQLEYRPGIVRTPSEQEVSKQKPYRFASIGPRTGEYLNLSRDMDERWLEYFGLPQLATPDDLAQWLNLSIGKLAWLTHHTREGYRPKNESDSHYHFQWKRKRSGGLRLIEAPKQELKNAQHQILHQILDSVPTHQAAHGFVRGRSILSNASRHVGSKFILKLDLENFYPSVKYSRIVAIFRSMGFSREVSLWLARLTTSAPYWGLKAPEKNWEYWQLMQRHLPQGAPTSPALANLSAFSLDVRLSGLAKAYNLKYSRYADDLTFSGPGMSIPALNEFIPLTNKIISD

SEQ ID NO: 5856 - protein, 459 aa, Thalassoglobus neptunius
  source 1..459: note = Related to NZ_SIHI01000002.1
MGWFDFLRKIFGFGRAESSQGSQTVADAPLAEAPVTESSAAESPSSDVSDSEVSEPAEKRKAEPRPNSTVPRPDVHLRPLDYVPSTVPIPPDREIVSEKPYRFAVPAPRTGEFLDLSRDSDERWLEYYGLPRLKTPDDLADWLGVTTGTLAWLTHRFREGHRPSDERDSHYHYRWIAKRSEGWRLIEAPKSKLKDVQTKILRGILDSVPAHSAAHGFVPGRSIVSNATPHSGSKFILKMDLEDFYPTVRYSRVVAIYRSLGFSREVSLWLARLSVSALPWSLKSPVSAHEYVVYTAHHLPQGAPTSPALANLSAYGLDIRLAGMANAYRIRYTRYADDLTFSGPGLSIPALNEFIPLAKKIIREERFTMNRRKLKVIRNSQRQIVTGVVVNEKTNVSRKEFDQLKAILYNCIKHGPQSQNRAEIANFAEHLRGRIAHISQLNPRRGAKLMRMYSQIGWT

SEQ ID NO: 5857 - protein, 366 aa, unidentified
  source 1..366: note = Related to JAGQQQ010000703.1; note = Planctomycetaceae bacterium
DRPYHFAWPGPRTGEYLDLSTDADERWLQYYGLPTLRTPEDLADWLHIPIGKLAWLTLRTNDGHRPVSTEASHYRYQWIPKRSGGWRLIEAPKEQLRLVQTQILREILDRIPPHSSSHGFIAGRSIITNAEPHLGQKFILKLDLQDFYASVRYARIVAIYRSFGFSREVSIWLARLSTTAVPWSLQFPTRDARSWTFHAYYAFHLPQGAPTSPALANLSAYGLDVRLAGMAAAYGLNYTRYADDLTFSGPGRAFPSLREVIPFANRIIRSERFRPNQKKAKVIRRSQRQTVTGVVVNEHLNVSRQEYDRLKAILHNCVKMGPSSQNRGELADFPAHLRGKIAHVMLLNEDRGLKLLEIYHRIDWSR

SEQ ID NO: 5858 - protein, 452 aa, Planctomicrobium piriforme
  source 1..452: note = Related to NZ_FOQD01000010.1
MGLFDILKRLLGFGPRPDTGPAAPPGQPAPPPESLPGPASATIAEPSPQKRASAREAHEQPARRVRVVLKPLRYQSNLIPTSSSQEIVSGKPYRFAGIGPQQGQFRDLSRDIDQRWLDYFGLPVLATPDDLAAWLNIPIGQLAWLTHRTSRGHRAESVKQSHYVYSWIAKRSGGHRLIESPKSDLKHAQEQILRGLLDHVPPHTAAHGFVPGRSILTNASPHVGQRFVLKFDLRDFYVTVRYSRVVAIFRSLGYSREVAIWLARLTTSSVPWGIKAPVKEWELAKYASRHLPQGAPTSPALANLSAFGLDVRLDGLAGAYGLEYTRYADDLTFSGPGTAIPALHELIPLIQKIIRAERFSSNWQKRRVLRNGQRQTVAGVVVNEKLNVSRRDYDSLKATLHNCRKLGPSTQNHKSHPEFASHLRGRIAHVRQLNPARGEKLLAIYQQIDWSK

SEQ ID NO: 5859 - protein, 455 aa, unidentified
  source 1..455: note = Related to JACKHO010000006.1; note = Planctomycetaceae bacterium
MGLFDFLSRLIFGSPASHDSAADVPPTAPEPSRADAAPKHNSPPPKRPSRIKNRTSSTRPVRLVPLRYVGSLVRTPQQQELTAEKPYPFASRNLNPRTGEDLGWLDLSTDGDERWLQYYSLPILKTPTDLAQFLGIPLGRLAWLTQRRHSNYRPATIRESHYHYRWITKRSGGHRLIEAPKQQLKQVQQKILSGILDRVPAHPSAHGFVAGRSILTNAQAHVGKRFLLKLDLEDFYTTVRYRRVVAIFRSLGYSREVALWLSRLTTSAVPREFVGPDSRPGWHHSLSRYALLHLPQGAPTSPALANLSAYALDVRLAGIAGAYDMDYSRYADDLTFSGEGRSIPALQEFVPLVQQIIRAERFRPNRSKRRVVRDSQRQIVAGVVVNERTNVARKDYDLLKAILHNCMREGPSSQNRYNLENFAEHLRGRIAHVTQLNPERGARLLEMYLRIDWNC

SEQ ID NO: 5860 - protein, 446 aa, unidentified
  source 1..446: note = Related to JAGQPW010000040.1; note = Planctomycetaceae bacterium
MGLFEFFKRLFFGSPAPDVTSSAGSASAPHSSPTPAAPAKSTPRRRRKRVPGQSSRPPVQLRSLRYRSTLVQTPRQQEQVPTKPYAFAVRDFDAYLDLSQDADPRWLEYYGLPALRTPQDLANWLGIPVGRLAWLTQQHLPDRRPASPKEAHYHYQWKQKRSGGYRLIEAPKELLKTVQTQILREILDRVPPHPAAHGFVEGRSIVTNARPHLGQRFILKFDLENFYPSVRYSRVVGIFRSLGFSREVAIWLARLTTTAVPQEFRSPDSRPGWHWSMSTYRSHHLPQGAPTSPALANLSAYALDVRLSGLAKAYHVTYTRYADDLTFSGAPRTVPALGEVIQLTEKIVRSERFRLHPRKRKVLRNNQRQVVTGVVVNDRLNISRKEFDQLKATLHNCIKLGPASQNRAEHPEFAAHLRGRIAHVRQLNALRGDKLMALFQRINWNR

SEQ ID NO: 5861 - protein, 466 aa, unidentified
  source 1..466: note = Related to JAGQQB010000156.1; note = Planctomycetaceae bacterium
MGLFEFIKRLLFGSPAPTTATQSGDDSPLERPAESGSASAATSAMTPAEQHRQRMRYQSRQRNAGRRERVRVSLRPLRYESSLVPTSASREQVAEKPYLFATCSVDPRQGPRHGYLDLSQDADPRWLEYYGLPVLRTPQDLADWLQIPVGRLAWLTQRQHRERRPPTVREAHYHYQWIRKRTDGHRLIEAPKEKLRAVQTQILEGILNHVPPHPAAHGFVEGRSIVTNARPHVGQRFVLKFDLENFYTTVRYSRVVGIFRSLGFSREVSLWLARLTTTALPEQVKNPEGLPGWHWSLAPYRAAHLPQGAPTSPALANLSAYGLDVRLQGLAKTYHVNYTRYADDLTFSGEARVLPALSEFIPLCQRIVRSERFVLNLRKRRLVRSNQRQVVTGVVVNQRTNVSRREYDRLKATLHNCLRQGPQSQNREDVENFAAHLRGRIAHVTQLNPARGAKLLEMFQRIHWTG

SEQ ID NO: 5862 - protein, 438 aa, Maioricimonas rarisocia
  source 1..438: note = Related to NZ_CP036275.1
MGLITLLKRILFGSAPSIPHAGGQPEPAAESTGDHTARVGAVSQRPSGPVRLAPLRYQSSLVRTPPDREHADGAGKPYRCAHIDPRRGGYLDLSTDGDARWLEYYGLPHIATPEQLAVWLQLPLGKVGWLTDRFCQNHRPQNTREAHYHYHWLAKRSGGHRLIEAPKSQLKQVQQQILREILCRVPPHTAAHGFTAGRSIRTNARPHVGQRVLIKFDLEDFYPSCRYARVVAIYRSLGYCREVALWLARLTTSAAPANLRFPDGNLRSLMPYLPRHLPQGAPTSPALANLSAYSLDVRLAGLAARYHLKYTRYADDLTFSGDGHSIPALREILPLITRIVRDERFRVNRKKRKVIRNNQRQTVTGVVVNQHLNIRRDEFDRLKAILHNCRKHGPASQNRDDHPDFAAHLRGRIAHVMQLNRHRGEKLLAMYDQIDWAR

SEQ ID NO: 5863 - protein, 428 aa, unidentified
  source 1..428: note = Related to JAGQQF010000427.1; note = Planctomycetaceae bacterium
MGLLRLLQRLFFGSSATAEEPRQDVRPSSQSKPSASAERQRERLAPLRYQSSLVATPRSREVVEGSSPPYRFAHRDAVGGAYLDLSQDVDPRWLDYYGLPHLSTPEDLAGWLRLPIGKVAWLTYRFCENRRPQSAKEAHYHFRWIRKRSGGHRLIEAPKKTLRLVQIQILREILDRIPPHPAAHGFVRGRSLTTNAAPHVGKRVVVKFDLDNFYGSVRQSRIVAIFRSLGYSREVALWLARLTTSAAPGSLKLPLGESTSIWKYMPRHLPQGASTSPALANLSAFGLDIRLAGLARAWHVDYTRYADDLTFSGDPKFVAAVGDFIPLVQQIIRDEGFQSKRSKRRVLRTNQRQTVTGVVVNQHINVSRAKYDRLKATLHNCVKHGPASQNHDLHADFAAHLRGRIAHMHRLNPHRGQKLLALFAKIKW

SEQ ID NO: 5864 - protein, 419 aa, unidentified
  source 1..419: note = Related to JABISG010000096.1; note = Planctomycetaceae bacterium
MGLFDFLRQLFLPSSRDVASPSHRRRERAPRRRVKLTPLRRRHGQRPWSEPIEEETPPYRFAQYGIRDGRFLDLSRDGDESLLDSFDLPVIHTPEQLAEWLQMPLGQVAWLTQRFSDGYRPENEQQAHYHFRWVKKRSGGWRLIEAPKQKLKQVQTQILREILDRVPPHNCAHGFVRRRSIVTNARRHVGQRAILKLDLEDFYANVGFSRVVGIFRGLGYSREAALWLGRLTTSKVPSNLRYPERFSSAFFPFLKRHLPQGAPSSPALANLSAYGLDVRLSGLARSYSVEYTRYADDLTFSGPQSFIRALPVFIPLTSQIIRDERFRVNRNKRKVVRNNQQQVVAGVVVNAHTNMPRREFDRLKAILTNCVRHGPASQNREHHADFSAHLRGRVAHAVQLNPHRGNKLRELYHAIDWKR

SEQ ID NO: 5865 - protein, 431 aa, unidentified
  source 1..431: note = Related to JAGQPX010000026.1; note = Planctomycetaceae bacterium
MGLLDFLRRLLGGQPASPNDQPSAPDTSTLVRDPRTGGVTPAAPKLLAPLRYRSSLNRTATAAERVAELPYRFANLSVDGDGYLDLSTDADERWLEHFDLPHLRTPEDLANFLQLPLGKLAWLTHRFEEGGRPAGEKESHYHHHWVKKKLGGHRLIEAPKQTLKMVQRRILRDILDHVPPHPAAHGFVTGRSIRTNAEPHVGKSVLLKFDLQNFYPSVRYSRVVAIFRSVGFSREVAIWLGRLTTSAIPASLKYPQDDPSALWMYYPRHLPQGACTSPALANLSAFALDVRLTGLARKYDVHYTRYADDLTFSGTGRFGGALSEFIPLVTHIAKSERFYIHRQKRRVLRGSQRQTVAGVVVNEKPNVSRRDFDRLKSILHNCAKHGPSTQNHDDHPDFAAHLAGRIGHVLHLNPHRGAKLRELYNQIDWSR

SEQ ID NO: 5866 - protein, 300 aa, unidentified
  source 1..300: note = Related to JAGQQG010000136.1; note = Planctomycetaceae bacterium
RPAGVREAHYHYHWVKKKTAGHRLIEAPKQTLRAVQQRILRDILDKVPPHPAAHGFVSGRSIRTNAEPHVGQRILLKFDLQNFYPSVRYSRVVSIFRSVGYSREVAIWLARLTTSAIPASLSFPKGDPSALWTYYPRHLPQGAATSPALANLSAFALDVRLAGLARKYDVRYTRYADDLTFSGSHRFGGALSEFIPLVVHIAKSERFVLHRQKRKVLRSSQRQSVAGVVVNQKANIARHEFDRLKAVLYNCVKHGPSTQNHDAHPDFAAHLAGRIGHVLHLNPARGAKLRELYNRIDWSR

SEQ ID NO: 5867 - protein, 445 aa, unidentified
  source 1..445: note = Related to JAEUIG010000100.1; note = Planctomycetaceae bacterium
MGLFDWLKGMLGGAPPSPTPAAPSPPAAGVRINPFTQEVVQLGIDRRTSAPSLHAFRYRSSLVRTPPSREFAAKRPYPSAQRQVYKGWLDLTTDSDPRWLEHFGLPPLKSPDDLAKWLNVPLGRLNWLSGRYRDGGHPGTAKEAHYHFQVIPKRSGGARLLEAPKPQLKAIQQRILRDILDRIPVHSQAHGFSKGRSIVTNAEPHVGKRIILKYDLENFYPSVRYNRVVAIFRSIGFSREVGIWLARLTTSALPWNTSDIPRLGELSGLETRGRYWELYGSRHLPQGAATSPALANLSAYSLDVRLSGLARKFDADYTRYADDITFSGTKRFAGALSDFIPLVERVVRAEKFVVHKGKRRVLRNNQRQSITGVVVNSKPNIRREEFDRLKAILHNCLKYGPSTQNRDRHPRFADHLRGRVAFVSQLNADRGEKLREMYDRIDWRK

SEQ ID NO: 5868 - protein, 434 aa, unidentified
  source 1..434: note = Related to QQVO01000002.1; note = Planctomycetes bacterium
MGLFNWLRTVLFGAPPQPTGDFTPDQPPPAGRDVHPVTGERVSHSRARLDRLEYRSSLIRTPSRRESAGSDPPYQFAHRNPRTGRWLDLTTDADPRWLDYYGLPHLKTPADLADWLEMPIGRLGWLTHRFCDDRRPPSAQTAHYHFQWLNKKTGGHRLIESPKTSLKGAQRKILSGIIERIPPHRNAHGFVAGRSILSNARPHVGAYAVLKLDLENFYPSVRYSRVVAIFRSVGFSRDVAIWLARLTTSAVPHDIPRPAGGHAAVWPYFSRHLPQGAPTSPALANLSAYSLDVRLTGMARAYDVTYTRYADDLTFSGSYRFAAAIRDFAPLVTRIVRDERFKANRSKQRIIRRNKRQTVTGVVVNEKPNISRDAYDTLKAILTNCAKRGPSTQNRGAHENFAAHLRGRIAHVAHLNPRRGAKLLQLYATIDWSR

SEQ ID NO: 5869 - protein, 438 aa, Caulifigura coniformis
  source 1..438: note = Related to NZ_CP036271.1
MGLFDLLRRLLFGAPASPTDTAGSSPAPRASQMPVAPKSLPVATPAGKRGPARKLPPFRYQSKPRRTSPKAERVARRPYTFAAPTALGEYLDLSTDADLGLLDHLGLPRLQTPADIAEWLEIPLGRLAWLSGRFFENHKPQSERSAHYNFRWLKKRSGGHRLIESPKKQLKAVQEKILREILDKADAHPRAFGFIAGRSAILNAREHVAPYVLLKFDLENFYPSVRYSRVVAIYRTLGFSRAAAIWLARLTTSAVPSSMSFPGGDPYGLNPYLSRHLPQGAPTSPALANMSAYGLDVRLTGLARSFGVTYTRYADDLTFSGDQKFAGALRDFIPLTETIIRKERFFLNVSKRRIIRRSGRQTVTGVVVNQHPNLARAEFDRLKAILFNCVRLGPSTQNRTNHPQFAAHLQGRIAHAASINPSRAARLRALYDRIDWSK

SEQ ID NO: 5870 - protein, 429 aa, Planctomyces sp.
  source 1..429: note = Related to JAHBXW010000001.1
MGLFAFLRRILFGAPEDAADDGGSTAPRQSPPPQSPATARRRRTPLPPLRYGSKHPRTPAALEQVAERPYQFANLGPAGRFLDLSTDADLSRLEQLELPRLLTPADVAHWLNMPPGRLAWLSGRFEPQQRAASEKAAHYHYRWIRKRSGGMRLIEAPKVRLRQVQTRILREILDHVAAHDHAHGFVRDRSALTNAKPHVGSYVVLKLDLENFYASVRYSRVVAIFRALGFSRAAALWLARLTTSAAPASLSFPDRSPLGLLPYLPRHLPQGAPTSPALANLSAWSLDVRLTGLAKKYHATYTRYADDLTFSGSHRFAAALSEFIPLAEKIIRSERFKVNRAKRKVLRRSGRQTVTGVVTNARPNIAREDYDRLKAILHNCVRRGPSTQNHDSRKDFQAHLRGRVAHVRSVHPARGAKLLALYQRIDWKR

SEQ ID NO: 5871 - protein, 348 aa, unidentified
  source 1..348: note = Related to VGXY01000890.1; note = Planctomycetes bacterium
MGFFTWLFRWLGWGADSRDFPSDTERTSDLGVRTSSGSLNRSSFDDSDAPRRNSDLTETAIHSNSERSVTTRPVTSRPKLTLSRREEERIRNPPERSPCVEVVGETPYRYARFGSTTGRHLDLSQDGDDSQLNARCLPIFHTPEELAGWLQIPLNQLVWLVHRFSAGRPPASDAAHYVFQWLKKKSGGWRLIESPKPILKRAQVKILREILDRIPAHRSAHGFVAGRSIVTNAEPHVGQDVVVAFDLSNFYTTVGFSRVVAIFRSLGYSREAAIWLGLLTTSAIPGNMAFPERNPYAFDPYLKRHLPQGAPTSPALANLSAFGLDVRLTGLARSFGATYTRYADDISL

SEQ ID NO: 5872 - protein, 314 aa, unidentified
  source 1..314: note = Related to JACMJF010000970.1; note = Candidatus Saccharimonas sp.
MAFFAWLFRWLGWSTDPRDSWDAPAPPQAADRSAVRTATLEAPPRAPSRPPSEPLPRPRLTPTRRDTTRHDARKSHATFVEVTGAVPYKYARFGSGTGRHLDLSQDGDEARLQQRGLPVFRTPEQLADWLGVPLKKVAWLVHRFSAGRPASVEQAHYHFRWLKKKSGGWRLIESPKQTLKQAQVKILREILDRVPTHSAAHGFVTGRSILTNAKPHVGHAMLVKLDLSNFYATVGFSRVVALFRALGYSREAAIWLGLLTTSAIPGNMAFPARDPYAFEPYLRRHLPQGAPTSPALANLSAYRLDLRLAGLSKS

SEQ ID NO: 5873 - protein, 451 aa, unidentified
  source 1..451: note = Related to JAFEBS010000049.1; note = Planctomycetes bacterium
MFSWLGGGEPSSPSQPTTDRGQQPDPQHSPTPPADHGPDRTSRSTTPPRQRPRIRRFPPKRNPRLNVRSHDQQHRRNRKKASFLEVTGASPYRFARFGSQTGRYLDFSRDGDDARLRDRGLPVFHTPEELAEWLGLTLNKLAWLVHRFSNGRPDSVDHAHYHFTWRKKRSGGVRLIESPKQTLKEAQVKILREILDRVPTHPAAHGFVAGRSVLTNAKSHVGQGIVVKFDLTNFYTTVSYSRVVAIFRTLGYAREAAIWLGLLTTNAVPGNMPFDRQKLYSILPYWRRHLPQGAPTSPALANLSAYHLDARLTGMARAFGADYTRYADDLTISGPETLSYALRTLIPLVEQIIRRERFQSNRSKRQVLRAHQRQVIAGVVVNVKPNVSRANLDRLKATLTNCVRMGPSTQNRDQVEDFQAHLRGRIAHVLQLNPARGEQLLAIFHRIDWRR

SEQ ID NO: 5874 - protein, 501 aa, unidentified
  source 1..501: note = Related to QWPM01000121.1; note = Planctomycetes bacterium
MGLIRWLLHRLGWRPAPLTRSLPTAGPVSPAPATPAPLDTPPLDTPPLAQASLTPAWPVVASPVVAPPAQASPIVASPNPDSVPPSILFDPPAVAPANSRKRPRIWSRTSRIRLVPTRRKQQRQAARRPAMLVEETQGAAPYRYARYGSRTGHYLDLSRDGDVVRLQRFGLPEFHTPEQLSHWIGLPLNRVAWLVHRFSGGRPEMEELAHYHFRWIKKRLGGWRLIESPKTTLKLVQTKILRELLDKVPVHAASHGFVKGRSILTNARAHVGQSVVLKFDLTNFYTTVSFARVVAIFRSLGYSREVAIWLGLLTTSAVPGNLRFQDQGPYALVPYLRRHLPQGAPTSPALANLSAFGLDLRLTGLARSFGAHYTRYADDLTLSGPEELGKALRTLIPLTQQIIRQERFVLNPEKRRVLRSHQRQTVTGVVVNQKTNVSRGDFDRLKAILTNCVKQGPSTQNQKMVEDFYHHLQGRIAHVSMLNPLRGQKLTLLFQAIDWTR

SEQ ID NO: 5875 - protein, 443 aa, Schlesneria paludicola
  source 1..443: note = Related to NZ_JH636437.1
MGLIRWLMQRLGWGSSRGPVPTESNSRPASEQASAKSENLTPTSLRTTRRSYPPGRARLVASTRVESDITRPSMAYVETEGEPYNYARYGSQTGRYLDLSRDANEARLAQFGLPVLRTPDDLANWIGLPLNKVAWLVHRFSAGRPATVKDAHYHFHWLKKRQGGWRLIEAPKAMLKLVQTKILRELLDPIPVHRSAHGFTVGRSIVTNALPHVGQHVVLKLDLSNFYTTVSFARVVAIFRGLGYSREVAIWLGLLTTSAVPGNLGFQEQGPYALVAYLRRHLPQGAPTSPGLANLSAFGLDARITGLAKSFGATYTRYADDLTISGSKELTRGLRAIIPLVQQIVRQERFFVNHKKRRILRSHQRQSVTGVVVNEKPNISRGDYDRLKAMLTNCQRHGPSSQNRDGVVDFYNHLRGCIAHVSMLNPVRGQKLTELFQVIDWAR

SEQ ID NO: 5876 - protein, 445 aa, unidentified
  source 1..445: note = Related to QWPB01000058.1; note = Planctomycetes bacterium
MGLLAFLQRLFWGAPPRESSMVGRGTAGAPFGDPLSRDNSLSGPATSGQVLYKSRRGVFQNPASNRYAPHGDRTGRGQVVEQSPYRFARRDLPSGGFIDLTGDHRPDVLNQYGLPLLRTPDDLARWLSIPLPRLAWLIGRFDDNHRPQSESESHYHFHWIKKKSGGFRLIEAPKSQLKQIQLQILRGILDRLVPHPAVHGFVPGRSIRSNAAPHVGQAWVLKLDLTNFYPSVSFNRVVAIFRSLGYCREVAIWLGRLTTSAIPSSLNSPDRRMATVWPYLRRHLPQGAPTSPALANLSAFGLDVRLQGLAGAYGLRYTRYADDLTLSGPQRAVAALREIIPFAGWIVRQERFHLNKAKRRVLRRYQQQSVTGLVVNDQLGVPRAEFDRLKAILTNCLRHGPASQNREAHPAFAAHLLGRIGHLASVNPGRGVKLRSLYQQIDWNR

SEQ ID NO: 5877 - protein, 436 aa, unidentified
  source 1..436: note = Related to QWOR01000226.1; note = Planctomycetes bacterium
MGLIAFLKRLFWGTPTPSSVPSAESADSSRLAADSTSSSAKIIVRRKFRGPDLLRFSATVRRQGRTVQVVRGQPYRFARPFVISSVDYGDLSTDTNPAALGRFDLPVLRTPEDLAHWLGIPLGRVAWLTGRFFENERPQSDDVAHYHFHWVKKKSGGYRLIEAPKALLKFAQTQILRGILDRVPAHPAAHGFVKQRSIRSNAAPHVKSAWVMKLDLSNFYPSVTFSRVVAIFRSLGYSREVSIWLGRLTTSTIPSNLSAPDRRENTVWPYRLRHLPQGAPTSPAIANLSAFSLDVRLNGLAAKYHARYTRYADDLTLSGKGKSIPALREIIPMAEWIVRNERFHLNRSKRRVLKQHQRQSVTGIVVNQKLGVGRAEFDQLKAILTNCIRQGPVSQNRNQHNDFASHLRGRIGHFKSVNAERGTKLLKLYYQIDWTR

SEQ ID NO: 5878 - protein, 436 aa, Planctomyces sp.
  source 1..436: note = Related to NZ_CP011270.1
MGLLSFLKRLLFGAPASNDAPARPKPSNDPASRPATPPASPPSTDGTATKKRVRLTPMRRQGPRERGQPARETARPPYPYAFPTYGGKFLDLSDGTDFERLRQFGLPELVYPGQLAEWLQLPLGHVAWLTYRFCDGNRPQTAGQAHYHFHWVRKKSGGHRLIEAPKSRLRRVQDQILREILDRVPSHPAAHGFVRGRSIVTNAEPHVGHKFVFKLDLENFYPSVRYSRVVATFRSLGYSREIAIWLARLTTSLIPTDLPTPGQRPGMLYAYFGRHLPQGASTSPAIANLSALGLDIRLSGLANAYGCTYTRYADDLTLSGPGKAAGALRELIPLSEQIVRSERFHLHPVKRRILRRGQRMRVTGVVVNDKVNIARGDFDRLKAILTNCIRTGPEAQNREGLPAFSDHLRGRIAHITQLNPNRGAKLQALFARIRWP

SEQ ID NO: 5879 - protein, 463 aa, unidentified
  source 1..463: note = Related to JADZEF010000283.1; note = Planctomycetaceae bacterium
MGLLDFLRRLFFPQPSPPPNKTAFDGVPSPRPPVRAPSDNGRHPSDNSHSAATSTAEPEVESRDRRPKRPRRTGPRPRAKLTPLRHAPPEFIADRSTEVTPIPYRFARFGVRSGGFLDLASDGDDARLRERQLPVLHTPEDLAAWLGIPLGKLAWLIHRFTANSRPLSEREAHYHFRWERKRSGGWRLIEAPKATLKDVQCRILEEILSRVPAHPAAHGFVPGRSIVTNAAEHVGKPIVVRLDLTNFYPTVTLARVAAIFRSVGYSREASVWMARLCTSSLPQTAGFPEGNASAIRPYLPAHLPQGACTSPALANLSAFSLDVRLSGLARAFGGVYTRYADDLTFSGPDGFRRALPNFLPLVEQVIREERFRINKAKRRIIRSNARQMVTGVVVNDRTNVRRVDFDRLKALLTNCLRHGARSQNHEGRDNFAAWVRGRIAHVQSLNAARGSKLLALYQQIDWR

SEQ ID NO: 5880 - protein, 385 aa, unidentified
  source 1..385: note = Related to JAGQPV010000469.1; note = Planctomycetaceae bacterium
MPLRYDGHRSGKRQKNAEEVDRLPYRFAQQGVRYGGYLDLSDDADVGRLEQLGLPILHTPEQIAVWLDRPLGQVAWLIHRFSSGYRPENEGEAHYHYRWQRKKSGGWRLIEAPKPILKTVQQQILTDILSQVPVHPAAHGFTAGRSIVTNAAPHAGQQVLVQFDLANFYATVSLSRVVAVFRSLGYCREAAIWLARLTTSAIPQTATFPDQDTHALTPFLPRHLPQGAPTSPALANLSAYSLDVRLTGFAASWGGTYTRYADDITISGSKSLIRALPKFIPLAERIIGQERFVFHRQKRRVVRDCSRQVVTGVVVNSHPNLSRPQYDRLKAILTNCIRHGPSTQNRENHADFAAWLRGHVAHARNLNPQRGLKLQALYDQVDWQR

SEQ ID NO: 5881 - protein, 433 aa, unidentified
  source 1..433: note = Related to JACCRE010000317.1; note = Planctomycetaceae bacterium
MGLLRWLLGLFGANSGTAVAKAWTDQALRSTAGRPWRRPRLSSIRRNAVSPPLRRTPAPTTPQPAYRFARQGVAGMLESLRGRSSYLNLATDLDRTRLDRWNLPPLATPDELADWLEIPVGKLAWLSGRLVSGNRPPSTREAHYVFRWKAKRSGGARLIESPKPLLRQVQTKILREILDKVPPHAAAHGFVAGRSILTNAKPHCDRVVVVKWDLTDFYASVRYSRVVAIFRSLGFSREVALWLASLTTSAIAADLPFPESGPQALRPYLGRHLPQGAATSPALANLSAFSLDVRLSGLARAFGGAYTRYADDLTISGDDAFARQLKNVIPLVEKVIRQERFHVHAKKRKVIRRGQRQVVAGVVVNQHPNIRRDDFDRLKAILYNSAKHGPASQNPNGHPDFAAHLRGRIAHAAMLNSVRGEKLMRLYEAIDFG

SEQ ID NO: 5882 - protein, 449 aa, Rubinisphaera brasiliensis
  source 1..449: note = Related to NC_015174.1
MWRLFSSLWRLFTGHSGRQAKNPYATFGTTDESTANETFDDAMVSPPEPPRHQRKPKADQRYPRLTKFRYQPGRVSDREHAPQIVTGTPYRYANPFVVSPGMFLDMSNDLRSERLDRWELPQLKTPQDLADWLQLPLGKIAWLTDRFTEANRPVDASKSHYHYCWKQKKSGGYRLIEAPLPLLRQVQEQILDEILASVPVHAAAHGFCSGRSVVTNARPHVGQQLVIKMDLDNFYTRVRYARVVALFRSLGYSREVALWLARLTTSAVPSNLPFPGGEPKQLRLFLARHLPQGAPTSPAIANLVAYNLDVRLAGLARSFQVQYTRYADDLTFSGGEDLQYCSRVFLPLVSQIVRDERFQMHATKRKFLLPSCRQQVTGVVVNEKTNISRKEFDRLKATLYNCVKTGPAAQNHNAHADFQAHLRGRIAYVQQLNPARGAKLLDLYQQIRW

SEQ ID NO: 5883 - protein, 444 aa, unidentified
  source 1..444: note = Related to JAGQQR010000004.1; note = Planctomycetaceae bacterium
MWRLFSFLWQLLGGRSPDSRVSEPISPGGTVSERTASSSAALSPAPGRKKSKADQKRPVLVPLTYRRPRLSDREHAPEIVSESPYRYALPYVVSQGKYLDLSQDIRPELLQRWDLPLLKTPQDLADWLHLPVGQVAWLSGRFGEGGRPADASKAHYRYSWKKKRSGGYRLIESPLPLLRQVQEQILDEILSRVPVHQAAHGFCAGRSVVTNAAPHVGQHVVIRLDLDNFYSRVRHSRVVAVFRGMGFSREVSLWLAKLVTSAIPSNLEFPGDQPGLLRLFLPRHLPQGAPTSPAVANLVAYSLDVRLAGLARAFSANYTRYGDDLTFSGSAELSQGSRLFLPLAQAIIREERFRVNSRKRRFMRQSTRQEVTGLVVNEKVNYSRQEYDRLKATLHNCVKTGWESQNRAGHPDFLAHLRGRIAYVQQISPLRGAKLLALFTRIVR

SEQ ID NO: 5884 - protein, 371 aa, unidentified
  source 1..371: note = Related to JAESQE010000528.1; note = Planctomycetaceae bacterium
NRSSSIVSQQPYRMALPSVRSPGTFLDLTTDYSPDKLNQRDLPLLKTPEDLANWLQKPLGTVAWLTDYYNEARRPIDIRKAHYRYSWKQKRSGGYRLIEAPLPMLKEVQEQILDEILDRIPVHSCAHGFCTGRSILTNARPHVGQDVVVKLDLDNFYTRVRYSRVVAIFRSIGYSREVALWLAKLTTSAIPSNLEFPGNEPKLMRLFLPRHLPQGAPTSPAIANLVAYSLDIRLSGLTQSFGGNYTRYGDDMTFSGDWQFIKAMRLFLPLTQQIIRQERFVVNGRKRKVLRRSKQQSVTGVVVNDKTNISRKSYDNLKATLHNCIKSGPDSQNREEHPNFHAHLRGRVAFVQQLNRAKGDKLLRMFEQISW

SEQ ID NO: 5885 - protein, 444 aa, unidentified
  source 1..444: note = Related to JAGQQT010000159.1; note = Planctomycetaceae bacterium
MGLIQFLRSLFFGSGPQSAGTASRQYSDQWNAGSSSANQNSSTPTATAPETVRTRPKLVPLRRHKKGRNRQLISGERGLKTAPYQLAVPDVTSPGTFLDLSRDGDSARRADWELPELTTPQDLADWLEIPLGHLGWLTGRYLDGKRPLDASKAHYHYTWKQKRKGGFRLIEAPYPLLRQVQEQILDEILCCVPTHVSAHGFKTGCSVLTNAQPHLGKDVVVKLDLDNFYTRVRYSRVVALFRGIGYNREIAIWLARLTTSAIPGNLRFPGGQPKLMSLFLPRHLPQGAPTSPALANLVAYSLDIRLNGIAESFGAQYTRYGDDLTFSGDHKFRASLRLFLPLVRQIIRHERFVLNPKKMQVVRPCSRQLVTGVVVNQKPNISRKEFDRLKATLHNCVRLGPESQNRTNHENFRAHLRGRIAFVQQLNPARAEKLLMIYNRIKWS

SEQ ID NO: 5886 - protein, 445 aa, Rubinisphaera italica
  source 1..445: note = Related to NZ_SJPG01000001.1
MRFLEFLKRLFFGGSAQSTADKYSRTPDDTRFQSTLAPTEPETHPESQISDHVKREQHWPVLVPLRRKRIRQTTHNGEETAGPKKYALALPYIMSPDSYLDLTQDVQPELLNNWDLPHIVTPADLADWLQISLGQLGWLTDRFSEGKRPIDARKAHYRYSWKEKRSGGYRLIESPLPMLRQAQEQILDEILEQIPPHAAAHGFRTGRSIVTNAEPHVGQAVLVKLDLDNFYTRVRFSRVVAIFRSLGYSREISLWLARLTTSAIPGNLQFPGGQPKLFSLFLPRHLPQGASTSPALANLVAFSLDVRLSGLAKSFNANYTRYGDDLTISGDERFRHSLRLFIPLARQIIRQERFVLNAKKKKIIRPMSQQRVTGVVVNEKTNIPRKEYDRLKATLHNCVRFGPESQNHDQHEHYQAHLRGRIAFVQQLNPHRGEKLLAIYRKINW

SEQ ID NO: 5887 - protein, 445 aa, Rubinisphaera sp.
  source 1..445: note = Related to JAKFGB010000009.1
MLLLELLKRLLFGSSAVSSKKRVVETASSRSDGRFSPPAEASVAVADKPRKKPREEQTWPILRPLRRKKVRPERDAAANAGSKQYPFAYPYVVSDGSYLDLTKDTDRERLDRWDLPYFETPTQLAEWFNLPLGQLAWLTDRFSDGKRPVDKSKAHYRYQWRTKRSGGYRLIEAPLPLMRQVQEQILDEILDRVPTHDAAHGFCAGRSVVTNAEPHVGQAVVVKFDLDNFYTRVRYSRVVAVFRSFGYSREVAIWLARLSTSAIPANLDFPGRQPKRLRLFLPRHLPQGAPTSPCMANLVAFSLDVRLSGLAKSFGATYTRYGDDLTFSGDESYLRSLRVFIPLAHQIIRQERFVLNGKKKQIRRRVSQQKVTGVVVNDKTNIPRKEFDRLKATLHNCVQHGPDSQNHDQHPNFRAHLRGRIAYVQQLNEHRGNKLLSLYQAINWS

SEQ ID NO: 5888 - protein, 370 aa, unidentified
  source 1..370: note = Related to BJHP01000039.1; note = Planctomycetia bacterium
MDLSLDGDDSLLASYHLPVFHTPQRLADWLGIRVGELAWLVHRSTSDRRPADEQRSHYVYRWVKKRSASLEAGSPNSRPVQTQWRLIEAPKQTLKAAQRKILSEILEKIPAHHAAHGFVRGRSIVSNARPHVGQAVVIKLDLQNFYANVTYSRVVAIFRSMGYCREAAIWLGRLTTSAVPWSLAVPDGDEAMKSLYVRRHLPQGAPTSPALANLSAFGLDVRLSGLLKKFGGNYTRYADDLTLSGSDDFRFSLRCVIPLTEQIVRSERFRLNHRKRKVVRRGHRQLVTGVVVNAKPNIRRDEFDRLKAILYNCVKLGPSSQNRDAHADFSAHLRGRIAFVRQLNPARAEKLWRLFENIRWDGFPPTQGSR

SEQ ID NO: 5889 - protein, 439 aa, unidentified
  source 1..439: note = Related to VGZH01000005.1; note = Planctomycetes bacterium
MKLLLDFLRWLLGDRGGTSRTGSQQPTGTQSRRLKRRPVKLTKRRRLSGNALLMQRPKPIKSLAPPYQFSAYASDHRQFLDLSQDGDDSLLASYHLPVFHTPQHLAQWLGVRVGELAWLVHRSTSDRRPADEQRSHYVYRWVEKRLASVESGMPNTRPVSTQWRLIEAPKQTLKCAQRKILTEILEKIPTHQAAHGFVRGRSIVSNARPHVGQAVVIKLDLQNFYANVTYSRVVAIFRSMGYCREAAIWLARLTTSAAPWSLAVPNGDEATKSLYVRRHLPQGAPTSPALANLSAFGLDVRLSGLLKKFGGNYTRYADDLTLSGDDDFRYALRCVIPLTEQIVRSERFRLNHRKRKVVRQGHRQLVTGVVVNTKPNIRRDEFDRLKAILHNCVKLGPALQNRDGHGDFAAHLRGRIAFVGQLNPARAEKCQRLFEQIRW

SEQ ID NO: 5890 - protein, 446 aa, unidentified
  source 1..446: note = Related to JAFEBR010000742.1; note = Planctomycetes bacterium
MGLFDWVRGLLGFGNPAPNPVESPVETKNAPLPTPASGVASPPSGPASSRRDRGVTRSREFRRSRSAIQLRTLRFQLRPRSDLRTTVQDRAHYRFARPSVEGGFLDLTQSGDTGNLEQLSLPVFRTPEEIAGWLQIPLGQLAWLVHRFDEDQKAGDEKTSHYWYRLIPKRSGGQRLIEAPKAKLKRAQWQILDGILSKVPAHRAAHGFVASRSILTNATPHVGQRVIVKLDLENFYPSVTFNRVVAIFRSLGYCREAAIWLGRLTTTTLPRRISPELSRCADLNDYRGRRLPQGAPTSPALANLSAFALDLRLSGLARSFHANYSRYADDITFSGDDRFLRSLAVFIPLVKTILKSERFRANRRKWRVIRNNQRQTVTGVVVNARPNVTRRNYDRLKAILTNCIRRGASTQNHSQHKQFAAHLLGRIAQVSHLNAERGQKLYALYS

SEQ ID NO: 5891 - protein, 436 aa, unidentified
  source 1..436: note = Related to JACQFH010000599.1; note = Planctomycetia bacterium
MGLFQWLRGLFGFGDAAPESSAQPHSPSSSRASDSNRATPAARPPRKRRRPARLKPLRFKPPRKVGGRTTLPKDRGYRFARPSVTGGWLDLSQGGDASRLERYSLPVFKIPEQLAKWLEIPLGQLGWLVHRFDDEHRAADEKSAHYFYRWIDKRAGGKRLIEAPKVKLKGVQWKILDGILRKVPAHPAAHGFVTGRSISTNAVPHVGQRVVLQLDLENFYPSVSLNRVVAIFRSLGYCREAAIWLGRLTTTTLPASMTATFGRGPEIHPYRGRRLPQGAPTSPALANLSAFVLDLRLSGLARTFGANYTRYADDLTFSGDAVFLKSLAVFIPLVKQIVRDERFLINRRKWRVLRNNQRQTVAGVVVNTRTNVARKDYDRLKATLTNCVRRGASTQNHDRHERYASHLLGRIAHVAHLNPARGEKLRVLYDQIDWNK

SEQ ID NO: 5892 - protein, 449 aa, unidentified
  source 1..449: note = Related to RPPR01000054.1; note = Planctomycetaceae bacterium
MGFFDWVFGWLGLGLRSPAKTAGSAPPGSPGDSLGQPGETETQFRTRNRNYAKVALTPRTFRATRAGGEHPEERRATGDWPYKFARRAPDPARWLDLSRDADRVRLAQFGLPVLETPEDLARWLQVELGELAWLSGHFHFGGRPDSVARSHYHYSWIEKRSGGRRLIEAPKARLKHLQTQILRCILDRVPPHRAAHGFVAGRSILSNAAPHVGQRVLVQFDLSDFYPSVSYSRVVAIFRSLGFSREVGCWLARLTTSAVPHELLTGPSSTRFGSRFDSDHELYLRRHLPQGAPTSPALANLSAFVLDLRLAGLARAFQAHYTRYADDLTFSGGTRFQRSLAVFIPLARQIIRGERFSIHPLKFRVRRRGQRQTVTGVVVNDHLNVSRADFDRLKAILHNCARHGPASQNRSQLPDFAGHLRGRIAHVQMINPRRAAKLVALFGQIDWTR

SEQ ID NO: 5893 - protein, 430 aa, unidentified
  source 1..430: note = Related to DNUF01000128.1; note = Planctomycetaceae bacterium
MGWLDWLWRLFTGSGADRSPQELTSARGTAADPASKARRRPGRRRRLVPLRYRRNPSRSPPALAAQLPYRFARRSADLRHWNDLRQDGQPRRLEQLGLPVLAGPDDIACWLSLSAGEVAWLTGRFWEGRSAPRVAASHYHYRWIAKRRGGRRLIEAPKSRLKRVQQQILAEILGRIPPHVAAHGFVTGRSIQTNAQPHVGQRVLLKLDLENFYPSVTYPRVTAIFRSLGYSREAAIWLARLVTTAVPPNLWEAGRPSDVAETRYLRRHLPQGAPTSPALANLSAFVLDLRLAGLARSFNAQYTRYADDLTFSGGEVFQRSLAVFLPLVRQIVAQEQFRLNSRKTAVQRASQRQRVTGVVVNSKLNIRREDYDRLKATLKNCIQYGPTSQNRERHPEFASHLRGRIAFVTSLNSQRGAKLLALFEQIDWNR

SEQ ID NO: 5894 - protein, 429 aa, Symmachiella macrocystis
  source 1..429: note = Related to NZ_SJPP01000003.1
MSFFDSILRWLGLKNTPPTGRDHAQQRRGKLRRRRGRLGHIYMVPLRRRQGQRSADPTEDAGEESAESPYRFARFGGYGEYRDLSKDSTPERLYQFGLPQLCTPSHIAEWLEVPCGRLAWLIHRFDDGGRAAHVAQAHYHYSWLKKRGGGYRLVEAPKPILKAIQQKILREILDRIPLHGAAHGFVAGRSICTNAQPHVGQRVVLKFDLENFYANVSFSRVVAIFRSVGFSREAAIWLGRLTTALPPEGLPAPGGDRNVVRPYLSRHLPQGAPTSPALANLSCYALDLRLAGMARAFGATYTRYADDLTFSGDQHLIDSLNVFIPLVTKIVRSERFTVHAGKRKVVRNNQQQRVTGVVVNERLNICRKDYDRLKAILTNCVRHGAATQNREQRADFAAHLRGRIGHVQSIHPGRSRKLQAIFDRIDWRS

SEQ ID NO: 5895 - protein, 432 aa, unidentified
  source 1..432: note = Related to JAGQQA010000064.1; note = Planctomycetaceae bacterium
MGLLNFFWRLIFGDPPSRPESSSSASRDSSVSRNPSTPRTRTRKLRARLIPDRVKRSRQDFPQNIVSSLPYRFARLNVTGGYLDLSQDLDEPQLQQLGLPLLATPEQLANWLGIPLGKLAWLTHRCDEGQRPRDVRHSHYHYRWVKKKQGGYRLIEAPKHQLRRLQDKILLEILCKIPVHPAAHGFVAGRSIRSNAEPHVGQRVVVKMDLANFYPTVRFSRVVSIFRAIGFSREVAIWLARITTSAVPLAFEGPPGELNRWALTPYYSRHLPQGAPTSPALANLSAYLLDRRLAGLARRFRANYTRYADDLTFSGDAKFLSGLRNFVPLVHTVIRRERFQLHYKKTKVHRSNQHQRVTGVVVNEKPNMSRADFDRLKAILTNCIRRGVSTQNHSQIPDFEAHLRGKISHAKFLNPARGAKLLALLRKIDWQS

SEQ ID NO: 5896 - protein, 429 aa, unidentified
  source 1..429: note = Related to JACRIH010000511.1; note = Planctomycetales bacterium
MGLWSWLRRLLFGQPKRSAASRSDDREQKRRRPRARLTPLRHRQRRTDRWRQRDAAGSINKITVKSQPYRFAWSSVFGGFLDLNRDGDPARLKQAGLPVFQTPQELADWLQMPIGRLAWLVHRFHDHQRPATVKLSHYHYQWIAKRSGDRRLLEIPKPQLKAAQEKILREILDLVPTHSAAHGFVTGRSIKTNAEPHVGQRVVMKFDLENFYPSVKYSRVVAIYRSLGYSREAAIWLGRLTTSITPPLGTLKDLATEAEWIPYATRHLPQGAPTSPALANLSAFALDLRLAGLARTFHANYTRYADDLTFSGPDQFLRSLRVFIPLVMQLIRQERFRVKLSKRKVIRNSQQQRICGVVVNEQIGIPRREFDRLKAILTNCVRRGPATQNHERHPDFAAHLRGRIAHVSHLHSERGARLLDLFEQIDWNS

SEQ ID NO: 5897 - protein, 432 aa, unidentified
  source 1..432: note = Related to SIAF01000026.1; note = Planctomycetaceae bacterium
MGLFNWLRCWFLGKRPPATNDVVSDQGAAPQRRKRRRKHSRARLVPLRAAAARDARRRFPGLTTAERTGAAPYRFARPCVLGGWLDFSLDGQTEQLGSAGLPVFETPQGLADWLELPLGRLAWLIHRFEIEQQPPDQAKAHYHFCWLPKRRGGKRLIESPKPILKRIQHRILREILDKVPLHPAAHGFAAKRSIRTNAAPHVGQRVILKMDLENFYPSVRFSRVVAIFRSLGYSREAALWLSRLTTSSLPANAAQWSLWSPELEAYLCRHLPQGAPTSPALANLSAFSLDLRLAGLARTFGARYTRYADDLTFSGDEHFSRSLAVFIPLAEQIIRAERFRTNKSKRHVVRDHQRQQVTGVVVNRHPNVARPDYDRLKAVLTNCIRRGPSTQNHSREDDYAAHLRGCIAHVAFLNPSRGEKLLDLFSQIDWNR

SEQ ID NO: 5898 - protein, 430 aa, Gimesia aquarii
  source 1..430: note = Related to NZ_CP037422.1
MGIFQFIRRLLFGSSPSRPIAPADTHSALKQIKPSRPRRKPRLQPLRFNKKKNRDSPDMVDVSPLPYKLARPYELLRYRSQSDHYLDMTQDVDHQKLRQYHLPAFSTPEEIANWLEYPLGKLAWLTHRFNQADRPDDVNESHYTYHWLPKRNGYRLIESPKPFMKMAQQQILQDILNKIPAHPTAHGFVTGHSQVTNAVPHTGKRVVVKFDLENFYASVKFSRVISIYRSVGYCREAAIWLARLTTTAIPMSMPFPDGSLRPLYPYLSRHLPQGAPTSPALANLSAFSLDVRLSGLARSFDAEYTRYADDLTFSGSDQFLRSLRVFIPLVEQIIRSERFQVNQSKRRILRNNQQQKVTGVVVNEHTNVPRKEFDLLKAILTNCIRKGPASQNREGHPDFASHLRGRVAYVQQLNPNRGQRLLQLYQQIRW

SEQ ID NO: 5899 - protein, 422 aa, Gimesia aquarii
  source 1..422: note = Related to NZ_CP037920.1
MGLFQFIRRLLFGSSSGRPVTPTDSYSKQNKTQRAYRKPRLKPFRYRQNRRTDTTELEEVSSPPYELARYASRTGHYFDMAQDTDFEKLDQYNLPRFCTPLELSQWLEFPLGKLAWLTHRFNQFDRPDDVKESHYVYHWLPKRNGFRLIEAPRPFIKIAQEQILKDLLNRIPVHPAAHGFVAGHSSVTNALPHTGKRVVVKFDLENFYTSVKFSRVVSIYRSIGYCREVSLWLARLTTSAIPMSMPFPDGSLRPLYPYLSRHLPQGAPTSPALANLSAFSLDVRLSGLARSFDAEYTRYADDLTFSGSDQFLRALRVFIPLVEQIIRSERFQVNQSKRRVLRNNQQQKVTGVVVNEHTNVPRKEFDLLKAILTNCIRKGPASQNRKGHPDFASHLRGRVAYVQQLNPNRGQRLLQLYQQIRW

SEQ ID NO: 5900 - protein, 430 aa, Gimesia fumaroli
  source 1..430: note = Related to NZ_CP037452.1
MGFFDFIRQLFFGPAPDRSVARPETSANVKPSKAPRIFRKPRLSPLRYNKKKRFTPPENADVGSLPYKLARPYELLRYRSETDHYLDMTQDGDAAKLSRFDLPVFSTPEDIAHWLNLPLGKLAWLTHRFNQSDRPDDVKESHYTYHWLPKRNGFRLIEAPRPFIKMAQQQILQEILNQIPVHDAAHGFVTGHSPVTNAIPHTGKRVVVKFDLENFYASVNFARVVSIFRSVGYCREAALWLARLSTTAIPMNMPFPDGSLRPLLPYLSRHLPQGASTSPALANLSAFSLDVRLSGLARSFDADYTRYADDLTFSGSDQFLRSLRVFIPLVNQIIRSERFQVNQSKRRVLRNNQQQKVTGVVVNEHTNVPRKEFDLLKAILTNCIRQGPVGQNREQHPDFASHLRGRIAYVQQLNPNRGQRLLQLYEQIRW

SEQ ID NO: 5901 - protein, 424 aa, Gimesia maris
  source 1..424: note = Related to NZ_CP036353.1
MGLFDFLRRIFFGSPPSQTVSPVESAPVPEETSSRKPRRKTTLEPLRYSSSHSSRVENIEEVAAPPYELARYGARTGHYYDMTRDGDTEKLARYELPLFSTPVELAEWLNIPLGKLAWLTHRFTQFDRPDDAQDSHYIYHWKPKRSGFRLIESPRPFLKMAQQQILHEILNQIPVHTAAHGFVRGRSSVTNATPHTGKRVVVKFDLENFYTSVKFSRVVAIFRNLGYCREASLYLARLTTSVIPMSLPFPDGSLRPLVPYLSRHLPQGASTSPALANLSAYSLDVRLSGLARAFDADYTRYADDLTFSGSEQFLRSLQVFLPLVNQIIRSERFQVNHMKRRILRENQQQKVTGVVVNEHPNVPRKEFDLLKAILTNCIRQGPRTQNRENHPDFASHLRGRVAYVQQLNPKRGQRLLHLYEQIRW

SEQ ID NO: 5902 - protein, 425 aa, Gimesia chilikensis
  source 1..425: note = Related to NZ_VTSR01000009.1
MGLFDFIRQLFGSPPDRSGQAAAPDPVPEPAPHEPPQKRRPVRLHPLRYPKRRPRTEYNIEEVPAPPYELARYGAMTGHYFDMTQDTDAAQLSRHELPQFATPLELAQWLEIPLGKLAWLTHRYNHSDGPEDVKESHYTYHWLPKRNGFRLIEAPRPFIKMAQQQIQQEILSRIPMHHSAHGFVSGHSPVTNARPHAGKRVVLKFDLENFYANVKFSRVVSIFRSLGYCREAALWLARLTTSAIPANLPFPDGTLRPLLPYLSRHLPQGAPTSPALANLSAYSLDVRLSGLARSFGADYTRYADDLTFSGSEAFLRSLKVFIPLVQQVIRSERFQVNLSKRRVIRNNQRQTVTGVVVNDHTNVSRKEFDRLKAILTNCIRQGPETQNREQHPDFANHLRGKIAHVQQLNPNRGQRLLHLYEQIRW

SEQ ID NO: 5903 - protein, 425 aa, unidentified
  source 1..425: note = Related to JAADHY010000128.1; note = Planctomycetes bacterium
MFIPITGPLPSSIKIRRPISIVTPLLKPSSSHRTELEGKPRLTPLRYRPVESRAEAALPVDHLPYRFARLATRPGQYWDLSRDGDPDQLRTLGLPEFHTPEQLADWLQMPVGRLAWLTRRCAETQRPETERDGHYYCRWMEKRSGGWRLIEAPKPILKSVQQRIAREILQNIPPHEAAHGFVRGRSIVTNAQPHVGRRVVLKLDLENFYASVRFARVVAIFRRVGYSREAAIWLARLTTSAAPWSLSAPDGSDDTLRPYTAWHLPQGAPTSPALANLSAFSLDVRLTGMARCFGAAYTRYADDLTFSGSQRLIRALPTFLPLITQIIQSERFRVKKEKRKVLRNNQRQTIAGVVVNAHPNVTRSDFDRLKAILTNCIRHGPSDQNREQVPDFAAHLRGRIAHVMQLNPHRGAKLLALYEQIDWNH

SEQ ID NO: 5904 - protein, 331 aa, unidentified
  source 1..331: note = Related to nan
MGLWQWLKQLLFGSTSVEVEIPTEEERQERRPTPKLTPLRYHVSSWENHLPWKREFVSQRPYRFACNTDVWGMYNDGYVDLSLDANFGQLERWGLPKFSNPEELAEWLGLPVGRVAWLADRVRRGDWRGDRATDHYYRKFVSKRRGGWRLLEAPKPATKAVQYRILSEILERVPPHPAAHGFVRGRSIVTNARPHAGQAVLVKLDLENFYTSVSYARVVAIFRRLGYSREAAIWLARLTTTQAPENLQPPHGKARLDWRYTLRHLPQGAPTSPALANLAAFSLDVRLSGMARSFGAQYTRYADDLTFSGPKRFLQSLDTFLPLVIQIIQSE

SEQ ID NO: 5905 - protein, 426 aa, unidentified
  source 1..426: note = Related to CP036268.1; note = Planctomycetes bacterium Pan189
MFRWLLRLLFGEDESVTQRSQPEKIAPVETDEAPKVRVRPRLARFEFRRRRGHHSTSAATRTTEKPYRFALPNGVSGETIDRSQDQNFERLTRWELPALTTPEDLADWMEVSIGELAWLTHRTESAYRPPSLEAAHYHFRWVHKKSGGSRLIESPKRRLKHVQQLLLRGLLDRVPAHPAAHGFVRGRSIVSNAQPHVGKAVVLSYDLENFYPAVRYNRVVAVFRGLGYSREAAIWLTRLTTSALPPRMPLPEGRGANLIRAYAARHLPQGAPTSPALANLSAFSLDVRLNGLANSFEANYTRYADDLTFSGDDRFRRSLATFIPLVNQIVRSEQFVVHREKRKVVKHGQRQLVTGVVVNDRPNVSRAAYDRLKATLHNCVRQGPASQNRDEHLNFEAHLQGKISHVRQLNPARAEKLQRLFDRIEW

SEQ ID NO: 5906 - protein, 424 aa, Calycomorphotria hydatis
  source 1..424: note = Related to NZ_CP036316.1
MLRWLFSLLFGSRDDGGRPAPAQRRKRPKYWRIGKIKLSRFQYGRRNRKLQRDELVREKPYAFAFRYPLHSKYIDRSGSGDSEKLARFELPDLRTPDDIAQWLGMPLGRVAWLTHITERQFRPQSLSEAHYTFHWMPKKFGGARLIEAPKPLMRKVQHQILRGILDHVPAHDAAHGFVKHRSVLTNAAPHVGQRVVLRMDLENFYANIRFSRVAAIFRELGYSREAALWLARLCTSGLPPRMPLPEGRGANLVRNYTARHLPQGAPTSPALANFSAYSLDVRLTGLANSFHANYTRYADDLTFSGGDRFLRSLRVFIPLVNQIITQERFIAQPAKRRVIRDNQRQKVTGVVVNQKPNCDRREFDELKAILHNSVRFGPASQNRHDHEDFYAHLNGRIAHIAQLNPQRGEKLRSMFRQINWANSP

SEQ ID NO: 5907 - protein, 440 aa, unidentified
  source 1..440: note = Related to JAGQQC010000202.1; note = Planctomycetaceae bacterium
MGLIDFLFRMLGLKRESRGELPTSVPTKPRPAAKTQTKTSYPRLHPLRFKRERWSKVKKSSQKLSASTRPFSVPDAKTERPYPLANQDVRYGGYLDLSQDSDPVQLRELELPQFTNPPELAEWLGIPVGQLGWLTYQFDEGHRPLTQRAGHYHLRWQPKRNYSVRLIESPKPLLKQVQRKILREILDHVPAHSAAHGFVSGESILTNAKPHCRQRVIVKFDLENFYPRIRFRKVTAIFRAMGYSREAAIWLARLCTSNIPVDTKLPSMDPEVIFLYTPQHLPQGAPTSPALANLAAYGLDVRLEGLARSFGANYTRYADDLTFSGDDKFLRSLKIFIPLVEQIIRETGFSVNKEKRKVIRDNQRQAVTGVVVNQHPNMNRKDYDRLKAILNNCVRHGAESQNRDQHPDYQAHLRGRVAHLLQLNPKKGTKLQRLFERIQW

SEQ ID NO: 5908 - protein, 438 aa, Polystyrenella longa
  source 1..438: note = Related to NZ_CP036281.1
MGFFDFLLRLLGLKSKPQATMAPAAGTQFKKTTSPKRTDRKLDPLRFQRERWSKVAKSPQQQTTTSRPFSVPAVKVEQPYPFAHFSPMGDGYLDLSQDGDSVQLQELELPEFSNPQQMADWLQMPVGQLAWLTCQFEEGYAHATEKAAHYHFRWLPKRNFGCRLIESPKPLLKQAQRKVLREILDNVPTHQAAHGFVQGSSILTNAQPHCGKRVVLKFDLENFYPHVRFSKVVAIFRSMGYSREASIWLSRLCMSRLPLDCKPPTANPEALWIYQPTHLPQGAPTSPTLANLAAYVLDVRLDGLARSFGADYSRYADDLTFSGDAQFLRSLKSFIPFVEKIIRETGFKVNKNKRKVIRNNQRQSVTGVTVNEHPNINRKEFDRLKAILHNCVRYGSESQNRDQLPDFQAHLRGRVAYFQQLNPTRAAKLKQVFEQIRW

SEQ ID NO: 5909 - protein, 420 aa, unidentified
  source 1..420: note = Related to JABURQ010000038.1; note = Planctomycetaceae bacterium
MSLWQLLKNLLFGGTAASSNPAVRNTEHERRRGRPRLQPLNYSQHSRNRQPSRQVSEKPYLYARKDTYRQDGWYDLREGGDAEFLQQEGLPLIESPAELADWLDLKPGQLAWLTHFFSPGSRAESVEQSHYHYHWVSKRSGGERLIESPKPMLKQVQSKILQGILNQVPVHRSCHGFTRGRSILSNAEPHCGQRLLLKFDLQNFYPSVSLNRVIAIFRSLGYNREVAIWLGRLTTTAIPSSIPFPEEGPKGLRDYLADHLPQGAPTSPALANLSAFSLDLRLHGLANSFGANYTRYADDITFSGPETLLKSLKTLIPLVEAVIRDERFTVNKAKRKVIRNNQRQTVCGVVVNEHPNYSRKEFDRLKAMLFNCIRFGPDSQNREGHPNFREHLWGRISFVKQLNPARGAKLEALWNQISWS

SEQ ID NO: 5910 - protein, 431 aa, unidentified
  source 1..431: note = Related to WGME01000003.1; note = unidentified bacterium
MDQRWLGILIVVAAWIVVRTLFGKRRTQPRSSRSIHKERYEQQRVRPAIREKRPLIVGRNKSPLLAVASPPHSFAHRGLKPGTWYDLSQDGRNDELVRRGLPVFQTPDELAAWLNVPVNRLAWLAYRCTRGNLPGVSQSHYVYTWKPKRTYGYRLIESPKASLKTVQRQILTEILDHLLVSEAAHGFRKEHSILTNAQLHVNAAVVVKFDLSDFYLTVRSGRITNLLRRVGYSREVAIWLTRLTTSTIPGNLPPPPTNPIVMWNYRQRHLPQGAPSSPALANLVAYRLDQRLLGLAKSFGANYTRYADDLTFSGDESFAAALRAFIPLVEAIIRRERFQSNNAKRQILRRHQRQIVAGVVVNEKPNFCRKDFDRLKAILHRCVTQGPAAQNRDQIEDFAAHLRGRIAHVRQLNPQRALKLESLFQRIDWRR

SEQ ID NO: 5911 - protein, 421 aa, unidentified
  source 1..421: note = Related to nan
MMWYLILIAVVTGIGVMVARSRVRGASRSRPPGDSRWRRLRRPFQHPPTPRTSGEVVRQPPYAFSYGAGGKGRFCDLSQDLNLDRLTTWKLPVLRTPDDIAQWLGLPVNRLAWLAHRCRRGRPEGVQQSHYHYRWLPKASGGMRLIESPKRELKAIQRRILKEILQAVPVPAAAHGFVRGRSIKTHAVLHERMHVLVRIDLRDFYASVGFNRVVAIFRTIGYPREAALWLARLTTAALPTNLAGPPEDPGAVWRYRRRHLPQGAPTSPALANLSAYWLDKRLTGLARAFGANYSRYADDLTFSGDDALDPKLRVLIQLIEQVVRDERFHSHRKKRRVLRRHQRQVVTGVVVNDKPNVSRRDFDQLKAVLHNCVQFGPASQNREGHAHFAAHLRGRIAHVQQLNPSRGAKLLAVYGQIDWGR

SEQ ID NO: 5912 - protein, 483 aa, Planctopirus hydrillae
  source 1..483: note = Related to LYDR01000158.1
MIAPILNWNPVYGGSTVDRIRNRHWLCDPAVDTLGNSMQTMHCQGKDVFMGLWSWFWSWWRPTGSNHALPSSPPANRASGQKRQWIGSTTTPKLPRLRYRSPEMVRQWRIEGRGTQVDQLPYVYARYARTRRRKQFLNLLTDTRVDLLQQHRLPVLTTLDELSQFLGLPIGRLAGLIHLADHGRPPTEKKSHYWLKWIRKKRSGHRLIEAPKPALKKVQEIILRQILDLVPAHPAAHGFVPNCDILSNAQLHAGRAVVVKFDLKDFYPSVTFSKVVAIFRSLGYSREMALWLARLTTSALPIGMAFPDKNPYSIMQFTRRHLPQGAPTSPALANLAAYSLDVRLTGLARRFGAIYTRYADDLTFSGDHRFLKQLKRFVPLTDQVIVQCRFHSQPAKRRILRQSNRQTVTGVVVNQSPNCSRRDYDQLKAILHNCVRHGHQTQNRDQQVDFRAHLQGRVAHIRHLNPDRGVRLQKIFEKINWNS

SEQ ID NO: 5913 - protein, 430 aa, unidentified
  source 1..430: note = Related to JAHBXV010000030.1; note = Planctomycetaceae bacterium
MGLLNWFFSLLFGSPRRAASPPTAMSQTSGARSSAQTHGRVRLKKDRPRQWSNRFRSTRVVVPKKPYPFARKSITGRGYLDMSTDGDDQALIAAGLPVFHHPQELADWLRLPLKELAWLTNHFRHGRPIDPQRAHYHFRWIEKRRGGWRLIESPKRLLKALQSRILDEILSRIATHSAVHGFVLGRSILTNAEPHVGQCVVVKLDLESFYPSIRLARIARLFRGLGYSREAAIWLGRLVTSRLPLNQPFPTGKSGTSSLTLWPYFPAHLPQGAPTSPALSNLVLSRLDARLAGLARKFGATYTRYADDLTFSGPERFAASLAVFIPLAKQIIRREGLRVNRGKTRVLRQAGRQIVTGVVVNERPNIDRRAYDTLKAILTNCHRHGPTSQNRDNHPQFALHLRGRIGHVSLLNPARGAKLLAIFEQIDWER

SEQ ID NO: 5914 - protein, 426 aa, unidentified
  source 1..426: note = Related to nan
MGFFDRIRRALSGEPPPTSKAGETGERPQEYRSFPRVKPVRTVARHLPVCQPDALVRVEKPYAFARRSPLTGEYLDRRVGGKVERLRKFRLPEFGTPEELATWMGLPVKTIAWLADFHNRNAGEKTAKKQHYRYTWRRKRGGRGWRLIESPKPVLKLVQQRILHEILDRVPAHGAAHGFVKGRSILTNAASHAGKYVVVRCDLANFYPSISFKRVRAVFAGLGYNSEIAWWLARLCTNCTPDTLEGPSGGALGRFAAGRHLPQGAPTSPALANLSAWALDVRLSGLARRFNVAYTRYADDLTFSGDEKCLNGLTMAHLLAYIRGIIRDERFVFHPTKRKLVRRGGRQIVTGLTVNRKPNVPRPYFDKLKATLHNCARHGPSLHNRENLPDFRAHLEGQIAFVRSVNPQKAARLQRIFDRIVWEGSG

SEQ ID NO: 5915 - protein, 428 aa, unidentified
  source 1..428: note = Related to JABTUM010000004.1; note = Planctomycetes bacterium
MGLGFLRRLFGGGSDKPPSGRKTNPKRRALKPTVVPGAHAPAPTAHPLPVFEKPYAFPLFAPDTQKESRARFLDGRVGGKPDRQKGWNLPRLETPEDLAKLCGVPLKTLAWLCDYHRRNADEKVKKKQHYHYVWKQKKAGGWRLIEAPKPLLKHCQQRVLREILDRVPPHGAAHAFRAGRSIKTNAAAHAGKYAIVKADLSYFFPSIRFKRVVSVFRGLGYNLELARWLARLCTNRLPPDLSIPGTNNTWALYSVLGHLATSLGRHVPQGAPTSPALANLCAWAMDVRLNGLARKFGAVYTRYSDDLTFSGSAELMGKRRINYFVRYVRGIVRNERFKWHPKKVRVVRRGSRQIVTGLTVNEKPNVGRADFETLKAILHNCVKQGPASQNRSGHADFRAYLSGKLAFVKSVNPQKAARLERDFAKIKW

SEQ ID NO: 5916 - protein, 418 aa, unidentified
  source 1..418: note = Related to JACQFI010000030.1; note = Planctomycetes bacterium
MGLSFLKKLFGGSESERPSGKKGKPSQRLPKTTLARYKPKPYVPSLRVKGAKPYPFAQPACPGFLDGRVGEDAARLQRYGLQRLQTPEELAAWLKIPLKTLAWMADYHRTNYLEDVKKKQHYHYKWVKKRSSAGYRLIEAPKPMLKMIQRRIHEEILSKVPPHPAAHGFVAGRSIISNASQHAGKYVILKIDLQDFYPSIKRRRVLAVFRGLGYGVEASHWLMRLCVNCIPSNCDAPDDSSKAFHWIIRGMYVPRHLPQGAPTSPALANFAAWALDVRLAGLAKKFGVTYTRYADDLTFSSDSKLMKGKSMTMLIRYVRGIVKDEGFRWNASKKAVVRRGSRQVVTGLTVNAKPNVARKEFDALKAILHNCAKKGPASQNRSGVADFRAHLQGRIGFVRSVNPPKAARLQKVYEKIAW

SEQ ID NO: 5917 - protein, 432 aa, unidentified
  source 1..432: note = Related to JAGQRG010000294.1; note = Planctomycetes bacterium
MGIFDWLFGKKKKAAYGADWDTTQSAPSYQGPANQPAPEQREPFINAPARRTKRTRTWGLKWRQQRSKHPLESVPNEEEPFSLWSNPFKHHALYGGTEAKPSKGGSAARIEALGLPNLENLDELAALLGETRNNLLHYIIRDRPGDRHYVARDLPKKSGGTRMLLVPKPRLKAIQRKLNAKLIRRLPLNPAAHGFRRSHDVLSGASVHVARSVVISVDIEAFFPSLTFRRVSGFLRSIGYSRGIATALANLMTIRPCNVAGIGRTADTRYPQLPQGAPTSPGIANAICWRMDKRLSALARKFGGDYTRYADDLTFSGFDEMAKGAGRLLQLVRKIVKTEGLALNEKKTRIMRKGRQQRVTGVVVNQQTNVSRREFDKLKAILHNCIKHGPGGQNRESVPDFKEHLRGRIAHISHIGPERGRKLKAMFDQIRW

SEQ ID NO: 5918 - protein, 403 aa, unidentified
  source 1..403: note = Related to JACKID010000003.1; note = Planctomycetes bacterium
MGILDWLFGRKRRLPAEPEVFVPRPVEVPDSPNAREPFLNHPMPRSKRRWYYERTANLFWRNGRSKEPKYSTSIEPSPSRIEALGLPDLRELRDLAALLGVALKDLKQYSARPNHANGHYLPLYITKKNGTKRLLLAPKPRLKAIQRALHQKLVRKLPLNEAVHGFRRGRDSLSSASAHVGRDVVICMDIEEFFPSFDFRRVSGFFRAVGYSREVAVMLANLTTVAPDDVPNAESRYCRDIPQLPQGAPTSPGLANAICWRMDKRLAALAHRFGAEYTRYADDLTFSGHDDLADGANKFVRMVREILLSEGLYVNEDKTRIMRKSRQQRVTGVVVNERTNVSRREFDRLKAILHNCAKHGPGGQNHERHEDFAGHLRGRIAYFCHIGPERGRKLMRMFELINW

SEQ ID NO: 5919 - protein, 400 aa, unidentified
  source 1..400: note = Related to JAKITN010000241.1; note = Planctomycetes bacterium
MCVANKPNPKEPFLSSPEHTLDRRHRKRWAGLAYRRKRSKWRISPVADQSIEGCDWRDKLGNVSADRVPQGVAGRVATLGLPAINSVEDLAALIGITPNQLAGFALRGDGQRSHYVGRPIPKKSGGERRLLVPLPRLKAAQQALHRKLISLLPLQPCVHGFRLKHDVLTGSSVHVGRQIVIGMDIAEFFPSFTFRRVSGYFRALGYSRGIAIALASLTITSCMDVPDYTPEAYSNHSYTELPQGAPTSPGIANAICWRMDKRLSALARKFGGDYTRYADDLTFSGFQDMADNTGRLLRIVRQIIETEGFVVNENKTRIMRRGSQQRVTGVVVNEKTNLPRREFDKIKAIIHNCIKHGPATQNHAQHENFKEHLRGRVAHAQHIGPERGQKLKAMFDSIVW

SEQ ID NO: 5920 - protein, 459 aa, unidentified
  source 1..459: note = Related to QEVF01000001.1; note = Planctomycetes bacterium
MGFLDWLFGRKRFLPPHTPPSPVGPRNPNIPTISESGTAPVRPPAGGQSQSGQHSLGSRYNPRILRPRRRRSSRPREIDAGKSEHLDRWPHDELDRPDPASLTLPAPRADWVPLGDQSALAALLGIQPTDLKYWLVGHHLDENYILREIPKKSGGTRLLMAPMPRLKALQRQLQQALVSRLPLSPSVHGFRRRHDVLTNAAVHVGKRVVVCMDIADFFPSFDLRRVCGYFRWLGYSRSVALSLASLTTADSFNARLAKGRGRTGLSSDWTERNEVENRCQSVNKIHRTSPLRYRGYRLPQGAPTSPGIANAIVWRMDKRLSALARRFGGDYTRYADDLTFSGFEKLAKHTRMFIKLVEKIVHTEGLAINRKKTRIMRSGRRQRVTGVVVNRQTNLARRDFDLLKAILHNCITKGPSTQNRSNHPNFREHLRGRVAHALHIGPERGAKLQQLFNQIDWSR

SEQ ID NO: 5921 - protein, 387 aa, unidentified
  source 1..387: note = Related to JAGPBM010000060.1; note = Planctomycetes bacterium
MRMLKPRYRRSKDPKSIEGKQNEPIGYWHEQMGGTVKDPVKGGNPSRTAQLGLPSIPHADALASLLGISTRALEGWIGGLLNEQNYVVRGIAKKSGGTRYLMAPMPKLKALQRTLRTSLVDKLPLNACVHGFRRDHDILSNGTVHVNKRVVICMDVLQFFPSFDLRRVCGYFRWLGYSRGIALSLAKFTTADSFNGQLVSASGREGFAQSTPAYVALKNQYRQPQLPQGAPTSPGIANAIVWRMDKRLTALARKFGGDYTRYADDLTFSGFEKMAKHAKLIVALVEKIVHTEGLAINKKKTRIMRKGRQQRVTGVVVNKQTNASREQFDLLKAILHNCAKKGPSTQNRSNHPNFKEHLRGRVAHIAHIGPERGAKLKKLFDAIDWSR

SEQ ID NO: 5922 - protein, 466 aa, unidentified
  source 1..466: note = Related to CAJPFM010000266.1; note = Planctomycetaceae bacterium
MGLFDWLFGRKKKDPPTYRNPYPPKVHSFSEFSADSTLPAPRQQARRNKPTRRKLQPFAPQSYKGHRTLGLSWRRERSKEPVDRVPNSYLSVAHFQHFGGTPSSIPEGGDAAKLLNVGLPVLRHFNELAALLEIDSTSLYKLVVRTSAQHYLFHEIAKKSGGIRLLMAPLPRMKAAQRRLLQALVSKVPLHLAAHGFREGQDVLTNAGPHVGKPIVICMDISDFFPSFTFRRVSGFFRHLGYPRGIAVALANLTTWSPRGQFQLPQTTGRNLRSVDYKERKVQLARAEWLDSGGNEIPSRMWPQLPQGAPTSPGLANAIVWRMDKRLSALARKFGGDYTRYADDLTFSGFEKMAEHSRTLISLVEKIVKTEGLTINVNKTRVMRKGRRQKVTGVVVNKQTNASREQFDLLKAILHNCAKKGPSTQNRSNHPNFKEHLRGRVAHIAHIGPERGAKLKKLFDQIDWSR

SEQ ID NO: 5923 - protein, 395 aa, unidentified
  source 1..395: note = Related to JAGQRI010000064.1; note = Planctomycetes bacterium
MSFRLRRSKEHIGPVKDLTLSGSRNPMTGEASSVGAIGNIGGSARHPDIGFDSATIRSLGLPEIEHLDQLAQVLQIDRNQLVWLAARPAFSENTDAHYTLKAIPKKAGGRRLLMVPLPLLKRAQQRLLAELVRKLPVHEAAHGFRVQRNTLTGASIHVGKDVVIGLDIADFFPSFTFRRVSGYFRSRGYGRGISVALANLTTNRLLDTITKDGKRWKYPKRNAFPELFEHPPHPILPQGAPTSPGIANAICWRMDKRLAALALKFGGDYTRYADDLTFSGFGDMARGAERLIKLVRKIVETEGLALNEKKTRVMRQGRQQRVTGVVVNDQTNVSRRDFDRLKAILHNCIKHGPHGQNRENVPDFEQHLRGRIAHVSHIGPERGRKLMRMFEQIRW

SEQ ID NO: 5924 - protein, 456 aa, unidentified
  source 1..456: note = Related to JAHBYA010000006.1; note = Planctomycetes bacterium
MGFFDWLFGKKKDPYGGKLQKGYSSPRAQPQPAKTYQHQPQGYGGPVPPPTPQQQRAVGVRFRFLKWRRARSKDPLPPLPDQTISGGIDPMTGAYTEPGAIAGLGGTAQHPDPHFKPDRVRAAGLPEIPHLDALAALVGVGRNTLVWLAGKPLASEGCDSHYTVKAIDKPSGGQRLLMVPLPKLKAVQRALVDRLINKLPVHDAAHGFRKGRDVLSGASVHVGKDVVISLDIRDFFPSFTFRRVSGYFRSLGYGRGTAVALANLTTARLNDAQVKQGKRWVYAAQVHKLRTYSHPELPQGAPTSPGISNAICRRMDKRLAGLARKFGADYTRYADDMTFSGSDDLAFHAPKFIGLVTKIVQSEGLALNDKKTRVMRQGRQQRVTGVVVNHKTNVSRRDYDRLKAILNNCIKRGPHGENRENHPDFRGWLQGKIAHVSHIGPERGRKLQALFSQIRW

SEQ ID NO: 5925 - protein, 445 aa, unidentified
  source 1..445: note = Related to JADZFR010000004.1; note = Planctomycetes bacterium
MGFFDWLFGKKKDPYSGNVQKDYTSPRQRPQTAQTYPQQPHGYGSPVPPPTVQQQQSLGIRDRYLSWRRNRSRAHVPPVADQTLGGNEHLGHLGGTSRHPDRHQNAAALQAAGLPLLPHLDALAAMVGVELKTLVWLASKPVASDECESHYTIKAIDKPSGGKRLLMVPLPKLKAVQRALVEKLVNKLPVHEAAHGFRKGRDVLTGASVHVGKDVVICADIRDFFPSFTFRRVAGYFRSLGYGRGTAVALANLTTARINDALVRQGDTWTYAAEVYKVHLWGHPELPQGAPTSPGIANAICRRMDKRLTGLARKFGADYTRYADDLTFSGGDDLAFHASKFLGLVRQIVQTEGLTLNDKKTRIMRQGRQQRVTGVVVNDKTNVSRRDYDRLKAILHNCVKRGPHGENRDNHPDFRGWLQGKIAHISHIGPERGRKLMALFQQIRW

SEQ ID NO: 5926 - protein, 444 aa, unidentified
  source 1..444: note = Related to JADJRK010000001.1; note = Planctomycetes bacterium
MGFFDWLFGKKKDPYGPRRDPYQQQPKAYGGPVPPPTAQQASAIGLRNIFLSWRRRRSKGPVPAQPDQTIRGGLNPQTGAWVDPGAISSIGGTRQHPDPYYDSAKVRAAGLPDLPHIDAMAEVLRVDRRTLVWLAAKPVPGDSLDSHYTLKEMPKSSGGTRLLMVPLPKLKAVQRALVEKLVNKLPIHEAAHGFRKGRDVLSGASEHVGKDVVICADIRDFFPSFTFRRVSGYFRSLGYGRGTAVALANLTTGRLMDARVQMNGRWQYAAKLKHPETHARYHPELPQGAPTSPGIANAICRRMDKRLTGLARKFGADYTRYADDLTFSGGDDLAFHASKFLGLVRQIVQTEGLTLNDKKTRIMRQGRQQRVTGVVVNDKTNVSRRDYDRLKAILHNCVKRGPHGENRDNHPDFRGWLQGKIAHVSHIGPERGRKLMALFKQIRW

SEQ ID NO: 5927 - protein, 444 aa, unidentified
  source 1..444: note = Related to JACKID010000003.1; note = Planctomycetes bacterium
MGIFDWLFGKKKKDPYGGGGLSKDYGAPKPYSDMPRQYQRPSDPAPPRTFEPDNREINLSFRLGRSKQPVTPLRDQTVGRNAKPGTTNLDHLGGTRDNPDPYTDVMKLRSNGLPEIDSLDALAELVGSTRESLLFLAARSGWDRPAHYSLRQIPKKSGGTRLLMAPMPKLKAVQRALHGKLVQLLPVHEAAHGFRKGRDALSAATPHVGKDVVISVDIENFFPSFTFRRVAGYLRTLGYGRGVAVAIANLTTARLADGKYKEGSRWVPGHNLRHPDMAGRYHPELPQGAPTSPGLANAICLRMDKRLDALARKFGATYTRYADDLTFSGYDDLAKSAGNLLQLIRQIVRTEGLRLNEQKTRIMRGGRQQRVTGVVVNQKTNVPRREYGTLKAILHNCIKHGPAGQNRDNHADFKEHLRGRIAHVSHIGPERGRKLMRMFEQIRW

SEQ ID NO: 5928 - protein, 451 aa, unidentified
  source 1..451: note = Related to JAIOJA010000048.1; note = Planctomycetes bacterium
MGLFDWLFGKKKDPYGTKPGQDYGDKDHAPKPYNDQPKQYQSAQKPYQAPPKSYGAPPPKPGERTEKLSFRQARSNKPVDPLADQTIKTPRRGPNLAHLGGTRESPDPHTDVIKLRNNGMPEIAHLDDLADLVGATRNEIIFLASRPGWGEPSHYTLKELRKKSGATRMLMVPMPRMKAVQRALNAKLISRLPVHEAAHGFRKGRDVLTSASPHVGKDVVISVDIEDFFPSFTFRRVSGYFRNLGYGRGVSVALANLMTARLRDGATKQGNKWKPVAYGSHPDIGKRYHPEIPQGAPTSPGLANAISRRMDKRLHALAQKFAADYTRYADDLTFSGNDELAKSVGNLLQIVRQIVRTEGLRLNEKKTRIMRKGKQQRVTGVVVNKQTNVSRREYDKLKAILHNCIKHGPTGQNRENVPDFREHLRGRIAHVSHIGPERGRKLMRMFEQIRW

SEQ ID NO: 5929 - protein, 452 aa, unidentified
  source 1..452: note = Related to JAGQRE010000003.1; note = Planctomycetes bacterium
MGLFDWLFGKKKKDPYGGSFRQDYDSGRSYNDQPVERYQSKATRRPPAVESPRQKHRTGKLSFRRLRSNQALDPLPDQTLDGRNPNTGQLTGSPLSHLGGTRQAPDPHTDAQRLRNHGLPVVEHLDDLAELLGTARDELVYLSARPTVEEPTHYTLKELPKKSGGTRLLMVPMPRLKSLQRTLNAKLISLLPVHDCVHGFRTGRDVLSSASAHVSKDVLVSMDIEDFFPSFTFRRVAGYFRSLGYGRGTCVALANLTTFRLADASVKRSNRNAWKLASVHHHPDAMRRWHPELPQGAPTSPGIANAIARRMDKRLHALALKFGADYTRYADDLTFSGGEELAKGVGRLLMLARKIVKTEGLALNENKTRIMRKGRQQRVTGVVVNQQTNVSRRDFDKLKAILHNCIKHGPGGQNRESVPDFKEHLRGRIAHISHIGPERGRKLKAMFEQIRW

SEQ ID NO: 5930 - protein, 335 aa, unidentified
  source 1..335: note = Related to JADKGX010000001.1; note = Planctomycetes bacterium
MPALPHLDAMAELLGTPRSELQWLAHRPVQEIAKSHVHYRLFEVRKKSGGTRLLAAPLPRLKAVQHQLLDKLISRLPVHGAAHGFRRGRGILSGANVHVGKDVLVCFDIKDFFPTFSFRRVSGYFRWLGYGRGIANAIALLTTAALHEATTGGKGQWTPAYNTRHPDLVRRHHPELPQGAPTSPGLANAICWRMDKRLSALASKFGGDYTRYADDLTFSGGQDLARHADNLIKLVRKIVRTEGLELNEQKTRVMRKGRQQRVTGVVVNEKTNLSRRDFDKLKAILHNCAKHGPAGQNRADHPDFKGHLQGRVAHAMHIGPERGAKLKAMFDKIVW

SEQ ID NO: 5931 - protein, 449 aa, unidentified
  source 1..449: note = Related to JAHBXZ010000001.1; note = Planctomycetes bacterium
MGLFDWLFGKKRDEYGAGLNRSYPPSQPQQVRPVPSQGGPVPSAGTPQNGKRTSYLSWRRRRSRESVVSVRDQTLGGSVDPQTGRHSEAGAIGNLGGSPRHPDPYFDAGRVASHELPALPHLDSLAALVETPLPELKWLSVMPPFGDKMWGHYCLFEVKKKSGGTRLLAAPLPRLKAVQRRILDKLVSRLPVHGAAHGFRRGRGILSGATVHVGKDVLVCFDIKDFFPSFTFRRVSGFFRWLGYGRGIANAIAALTTVRLTDTNRRREGKWEHPGLAKHPDMLKRRQPELPQGAPTSPGLANAICWRMDKRLSALARKFGGDYTRYADDLTFSGGEDFARHAANLIKLVRKIVRTEGLALNEKKTRVMRKARQQRVTGVVVNEKTNLCRRDFDKLKAILHNCAKHGPAGQNLENHPDFKGHLQGRVAHALHIGPERGARLKALFDKIVW

SEQ ID NO: 5932 - protein, 380 aa, unidentified
  source 1..380: note = Related to JABTUE010000002.1; note = Planctomycetes bacterium
MRDQTLGGARNPQTGAPSVAGAISGVGGTPGHPDPYFDAGRVASHELPALTHLDALAELIETPRNELLWLAVKPPFSNKLWGHYHLFEVRKKSGGTRLLAAPMPRLKAVQRKLLDKLVSRLPVHGAAHGFRRGRGILSGANVHVGKDVLVCLDIKDFFPSFTFRRVSGYFRWLGYGRGIANAIAALTTARLTETNQRQGTTWAAAHTGMHPDMNHRRHPELPQGAPTSPGLANAICWRMDKRLSALARKFGGDYTRYADDLTFSGGQDMARHTDNLIKLVRKIVRSEGLQLNDPKTRVMQKGRQQRVTGVVVNEKTNLSRREFDRLKAILHNCVKHGPAGQNRENHTDFKGHLQGRVAHAMHIGPERGAKLKAIFDKIVW

SEQ ID NO: 5933 - protein, 461 aa, unidentified
  source 1..461: note = Related to JADLBZ010000167.1; note = Planctomycetes bacterium
MGFFDWLFRRKKDDYSKGLQRGYQRPSSHPQPLPPQPATPPQRAGTPPEPAGWGSPPPPPPWKNRTHRSWINRRSRTPPEPQRSEPIPKGRPGELRHLGGTAKHPDPHFKPGRVQELGLPAIPHLDALATLLGTTISKVAGFAVRPPSTAMNWVHYFLHPVPKKSGGTRLLMVPCPELKRLQRRLHEVLVRKLPLHEAAHGFRARRDSLSNATAHAGKAVVICMDIADFFPSFDFRRVCGYLRWAGYGRGVAIALANLTTNSRNECKMRRKPDVQKGAGTLLSAWKCVPKHPDLLAGSLPELPQGSPTSPGLANAICRRMDKRLAALARKFGGAYTRYADDLTFSGGEEMSRRAGRLMQLARKVITSEGLAVNEKKTRVMRRGRHQRVTGVVVNEKPNLPRAEFDRLKAILTNCIRHGPASQNREQHADFRAHLHGCVAYAAHIAPARGGKLVKLFNEIRW

SEQ ID NO: 5934 - protein, 363 aa, unidentified
  source 1..363: note = Related to JADLAK010000089.1; note = Planctomycetes bacterium
MGLGNFFRKLFGGGDDYQRRPGGGDYRKPSVGATHASPAAHGGPPPPPPAASRVHAGDPAYRSPQSGQAINDREITDALKHPYRRKRRSKHPLQGHIHETGSSNWFSPDRTTNPVRLNALGLPVLSTPVELVPLLGEELKRLYDFAYANDRDSEDSHYAYRLVPKKRGGWRFIEAPKPRLKAVQKRIKEIFVDKLPVSNHAHGFLRKRDMVSNATPHVGKACVICADISDFFPTIGFNRVAGFLRSCGYGRMVAAALAMLTTNAHWASADVLIGDEVVKNKDARKRAPEVFKYTGAYRRTPQGAPTSPGLANAICWRMDKRLAGLAKKFNAVYTRYADDLTFSGGVELAGRAGAFLRYVARIV

SEQ ID NO: 5935 - protein, 381 aa, unidentified
  source 1..381: note = Related to JABUFB010000006.1; note = Armatimonadetes bacterium
MGFFSWLRGMLFPPATPLPPGMTRAEARRRRQPDFLPRPRRRRPRRHRYGRPEATFRPAELARFDLPALATVEDLAAALGVTTGKLRWLTWPCRDRTCDHYVRRRVPKKSGGERLLCAPKAETRRAQDWIFHEILARVPVSSAAHGFIRGRSIVSNASAHVGKRVVVSMDLEDFFPSVSMATVVGLFEWLGYSKEVAWHLSMLCTCAYGRRRALPQGSPTSPAISNLICWKMDRRLAGLARKFGATYTRYGDDLTFSGHFQRPDRPGRLIGIARAIISEEGFEVARHKTRIMRHNRRQSVTGLVVNERTGIGRDEVRRLRAILHNCKVHGVESQNREGDELFKERLRGKIALVKMANPDQGAKLLAAFHEVDWGATASPKG

SEQ ID NO: 5936 - protein, 383 aa, unidentified
  source 1..383: note = Related to JADLBO010000333.1; note = Phycisphaerales bacterium
MSWMYFLLAGAAVLLLLALSIPRAEQPAVAEPKSRRGPRRPLPGSRWRTQHPGDSDRLRSLGLPELRDTRDLLRWLRLSLRELVPLADHANRATRDRNNYIEWTVPKRRGGKRVIAAPKKRLKAIQTRILREILDRVPPSAAAHGFVRGRNIVSNAAPHVGRAIVVNFDLVDFFEHVHFPRVMGVFRRLGYSKEVARWLAYLCTHRPLLVAGDGHGPLAAARHAVQGAPTSPAVSNLAVHRLDARLAGLARRFGCTYTRYADDLTFSGDEPFKRSLKRFVPLVRRIVSSERFRLHEGKMRFLRAGRRQEVTGVVVNRKINARREEYDRLKAIIHNARRSGSLESQNREGRPHFRAYLLGRASHIAMLSPERGQRLMREIRRLT

SEQ ID NO: 5937 - protein, 376 aa, unidentified
  source 1..376: note = Related to JACRLV010000179.1; note = Planctomycetes bacterium
MTVLVSIGLAAIVIAFTALIMALSALDRSGAPRSRPLPGARVFPQAGGNIAKLRDLNLPELDSTHDLLRWLRLELVQLLPLANHANRTERSNYVEWAVPKKSGGLRVIAAPKKRLKAIQLRILREILDNVPPSSAAHGFVRGRDVLSNATPHVGKTLVVNFDLVDFFGHIAYPRVVGVFRRIGYGKEVSRWLACLCTHQPKPPRGRGHDREGRRRHAVQGAPSSPAIANLAAWRLDARLCGLARRFQCTYTRYADDLTFSGDEPFKRSLRRFLPLVRRIVAAERFALHRRKMRFARASRRQEVTGVVVNRKTNIRRADFDRLKAILHNARRAGSLESQNREQRPHFRAYLLGLAAHVAHLNPQRGERLRREILALE

SEQ ID NO: 5938 - protein, 416 aa, unidentified
  source 1..416: note = Related to JADJRI010000009.1; note = Planctomycetes bacterium
MLALAPTTWACYGIPLGVFLSVAIFLRYAYRRAGSESEKWDSLGGRRWRCERKGDGVGELRERVTRERVWLPGSKRLPQKPSNAQKLGDLGIPVLKDTADILRWLGVDLKSLLPLANPERRVRPGKSNYVEWTVKKRRAGLRVICSPKPRLKAIQRKIKAEILDRAPVHMAAHGFVRTRSIATNAAGHVGRKLVVNLDLRNFFEHIRIQQVYGVFRHLGYGSEVSRWLARLCTHAPQLGEASRGLDGQWEMQRIRRHAVQGAPTSPALANLACLRLDRRLTGLAKKFDAEYTRYADDLTFSGDERFKRGMKRFLDHLHMIIRLEGFSENYVKRRFMRSGQRQQVTGVVVNQRVNVARDEYDRLKAIIHNARKTGLDAQNRDHRPDFRAYLLGRAAHVAQLNPERGRKLVEAIRAVS

SEQ ID NO: 5939 - protein, 415 aa, unidentified
  source 1..415: note = Related to JAFGQA010000434.1; note = Phycisphaerae bacterium
MSYWAWGILVVVAIVVIFIARVTQRKLPSGFWRPGYSCGFAPGAWKRCDKREGADAGFPRAKDAERLKPLPGFKKHRQAPADRGRLVASGLPVLESTDDVLAWLGLDLRSFLALADPGDRIRPGKTNYVEWTVPKKRHGVRIICSPKPRLKAVQHRIKDEILDHIVPHEAAHGFVIGRSIVTNAEQHVGRALIVNLDLRNFFDYVRYHRVIGVFRWLGYSLQASRSLALLCTHRPNLSALHEDPPEAYVRHVFRHAVQGAPTSPALANLTVYRLDRRVAGLARTFDARYTRYADDLTFSGDEPFKRGMIRFLSLAKQIIAEEGFRLNMRKMRFMRPSQRQQVTGVIVNKKVNVRREDYDQLKAIVHNARKIGSLESQNRENHPDFRAHLLGRAAHIRQLNAARGQSLIDRIHAIA

SEQ ID NO: 5940 - protein, 440 aa, unidentified
  source 1..440: note = Related to JAHLLQ010000003.1; note = unidentified bacterium
MMPALQIGAVAIIGLLVAVFAIVVVLIIVVNIVNQARRGGPGGARLELGTDGLRVSVGGRSRGKILGSRAPIVLGNSPTSSYRERDDKMRQLHPQSIDRQRSLRLPVLEKPDDIVAFLQLRDFRELVHLCDTGRMQGLRNGPGKLRNYTMRTIPKRGGGQRFLFIPKPRLKAAQRRILHEILDKVPVHEAAKGFVRGRDATDHARPHIGKPIIVAHDIADFFPSIRYRRVCSFFMWLGYPHSVARILSLLCTTASLASLARVLPQGAPTSPALANALCYRLDCRLAGLAKKFGATYTRYADDLAFSGGEDFKRGLNRFVPLVETILKSERFHPKKAKRRFMRRGRQQNLVGLNVNDRLSVGRAEIDRLCAILHNASKAGSLESQNRDRIQNFADHLGGRIAWVERFHPGKGAKLRSQWRQLIGAPPAPPPPDLPAAPPPE

SEQ ID NO: 5941 - protein, 436 aa, unidentified
  source 1..436: note = Related to JACRIS010000205.1; note = Candidatus Poribacteria bacterium
MLLLVGILVLAVVAAILIAAAAVKSGGSPQTPHPAQAGGRAPGAVPEASGNRFAAPPGANFTGPFDKKKWLINPDWREADPKAASRYPRAEDRRRQWSLPILDNPEDVVRFLDLGGFGVLVNLCDPNLWSSAAGHSVPNPAANYRFRSIPKRGGGVRFIAAPKPRLKAAQRRILREILDKVPVHDAATAFRPRRSVADHARPHVGRQLILAYDLQDFFPRIRHGRVAGLFRWLGYPASVARCLALLCTCSDSMAVSTQARHLPQGAPTSPAIANLLCFRLDCRLTGLAKKFGASYTRYADDLAFSGDNEFKRGITRFIPLAEKIIRNEGFVLNKQKRRFMRHGRCQRLTGLKVNDSLSVGREESDLVKAILHNAKKAGSLESQNRQQRGDFEAHLRGRISWISQFHPARGAKLLAELDKVTGFQRRAGPPAITPPD

SEQ ID NO: 5942 - protein, 509 aa, Pedobacter xixiisoli
  source 1..509: note = Related to OCMT01000001.1
MSEKLSRQQIYDRIRATSKDSYVLEEMQRLGFWESSDTPSLSEVLIKREVAANQELNNLLAQDRKYQNQEAMLKEMRKARMKLAKEKREQTKQKNKQKKDDKAEAWKDTQQQQIVYLGEGVSGGLNEIESAIESLQRFNLPVFENLSDFASALGTDLSALRYLLYQRKVSRINHYHAFQIPKKSGGKRTITAPKQKLKRLQLWVLENVLNRIQINHHVHGFIKERSIVSNARPHLQKDIVINVDLKDFFPSISYKRVKGFFHKLGYSEQLSTIFALICTYAETEKVEMDGVNYYVQKGNRFLPQGSPASPAISNLIAYKLDKKIQGLAAKFNFTYTRYADDLTFSTSKENEKNIASLLFFLKKIIEVEGFAIHPAKTHIMRKGNLQKVTGIVVNQKLNVQRVQLRKFRALLHQIEKEGWKDQKWGNAKYLINAIEGYINFVKMVNESKAMVFKAQLTSILAKHGHPPVEQAVVEEESKIIAEEKATEVKIETPLKTDTEAKQYDWWNVL

SEQ ID NO: 5943 - protein, 509 aa, Pedobacter sp.
  source 1..509: note = Related to NZ_CP042171.1
MSEKLSRQQIYDRIRATSKESYILEEMQRLGFWESSDTPGLPEVLIHRELVANQELNNLLAQDRKYQNQEAMLKEMRKARMKLAKEKREKTRQKNKQKKEDQAANWANIQQQQIIYLGDGVSGGLNQTESDVETLQKFNLPVFNQIVDFASAIGVDLSTLRYLLYQRKVSRINHYHTFEIPKKTGGKRLISAPKSRLKALQLWVLENILNHIEINDHVHGFIKERSIISNAQPHLEKDIVINVDLKDFFPSISYKRVKGLFNKLGYSEQLATVFGLICTYAETEHVEMDGVSYYVQKGNRVLPQGSPASPAISNLIAFKLDKKIKGLASKFNFIYTRYADDLSFSTSKENEKNIASLLFFLKKIIEAEGFTMHPEKTHIMRKGNLQKVTGIVVNEKLNVQRDRLRKFRALLHNIESNGWKDQKWGNAKNLINAVEGYINFVKMVNKSKAAAFKAQLENIVAKHGYPVIVEEVVEVKTETIVAEIVPEVKLENPIKPSSDAKQYDWWNIL

SEQ ID NO: 5944 - protein, 508 aa, Pedobacter changchengzhani
  source 1..508: note = Related to NZ_SJCY01000003.1
MEEKLSRQQIYDRIRSTSKESYILEEMQRLGFWESSETPSLSELLIKQETTATQELTKLLEQDKKYNDREAMVKEMRKARMKLAKEKRSETKNRNKEKSIDKAQKWKETQERQIIYLGEGVSAGLNHTESDKLNLQKLNLPAFDQVTDLASAIGLSLAELRYLLYQRKVSKINHYHTFEIPKKSGGKRVISAPKSRLKALQLWVLEHVLNNISINDVAHGFIKNRSIVTNATPHLATDIVINVDLKDFFPTINYKRVKGLFHKFGYSEQLATLFALICTYAETEVVEMDGVSYYVQKGNRFLPQGSPASPAISNLIAYRLDKKIQGLASKFNFTYTRYADDLSFSTSNENEKNIASLLFFVKKLIEAEGFTLHPEKTHIMRKGALQKVTGIVVNEKLNIQRSQLQKFRALLHNIETNGWKNQKWGKAKNLINAIEGYINFISMVNAEKGAKFKLQLKDIVAKFGYPIVEQETAEVKIETAKQEIVEPPKSKLETPETASKQFDWWNIL

SEQ ID NO: 5945 - protein, 520 aa, Bacteroides sp.
  source 1..520: note = Related to QVMJ01000008.1
MSEKSTRQQIYDRIRMTSKDSYILEEMKRLGFWDSSDVPSLSETLIKRESEVNKELTSLLEKDRKYRNQEALLREMRKERMKKAKEKREETKLRNKKKRLDKAAKWKSMQEHQVIYLGKDVSAGLNNTETNEALLNKNNLPVFKSLTDLGQSMQLELSNLRYLLFQRKVSRQTHYYNFEIPKKSGGKRKISAPKRRMKALQLWVLNNILDRIAIGEQAHGFIKQRSIVTNAGPHTGKDIVINIDLKDFFPSIDYKRVKGLFHKLGYSEQMATIFALICTQAETETVAMDGVTYYVQKGKRILPQGSPASPAISNLIAYKLDKKVKGLADKLGFRYTRYADDLSFSTDKGNEKNIASLLHFVGKIIKSEGLTINPEKTHIMRSGAQQKVTGIVVNEKLNVERKQLHNFRALLHNIETNGWNGQKWGRADNVMHSIEGYIHFIKMVNPEKSIRFGEQLTRIVEKHGLPLVEEKTCTKQDIAPKQVVQVEEPLKPEPTIQPGQKQEDSNKKTSSTDDWWNIFS

SEQ ID NO: 5946 - protein, 512 aa, Bacteroides sp.
  source 1..512: note = Related to JAJQFD010000060.1
MSERSTRQQIYDRIRAAFTKDSYILEEMKRLGFWDSNVDAPTLPERLIQREAEINQELNKLLAQDRKFRNQEAMLAEMRKARMKQAREKRVLTLEKNKQKRLDRAARWRSLQQEQIIYLGKGVSAGLNNTDTNVQSLQKYNLPVFSSLTELANSMNLDLAKLRYLIFQRQVSRHTHYHTFEIPKKSGGKRKISAPKRQMKALQRWILDTILSPISMDEHAHGFIKNRSILTNAQPHTGKEIVINVDLKDFFPSIDFKRVKGLFHKLGYSEQMAIIFALICTQAETETVEMDGVRYYVQRGKRILPQGSPASPAISNLVAYKLDKKVNGLAEKLGFTYTRYADDLSFSTFRRNEKNVARLLHFLGKIIESEGLVMHPDKTQVMRNGGLQKVTGIVVNEKLNVQREQLRKFRALLHNIEVNGWKDQRWGHAHNLIHSIEGYIQFVKMVNPRKGDKFRKQLDQIIKKHGCPPIDETTFYKKTVETSQPSQPITSQTIEPEKHATPKGNDWWNIFS

SEQ ID NO: 5947 - protein, 506 aa, Apibacter raozihei
  source 1..506: note = Related to NZ_CP034930.1
MSEKLTKQQIYDRIRATSKDSYILEEMQRLGFWEKADSPQIPEIFIENETRLLQELNQLLDKNKQYSDQLSMLKSMRKVRMKNAKEKREVTRQNNKLKALEKAERWLKLQQEQVLFLGKEVSKGLNNTEPNVNSLKKFNLPVFHSVVEFAGYMETDLPSLRYLLYQRKVSTINHYHTFELPKKSGGKRKISAPKSRIKALQLQVLDKILKNIPVNDYVHGFIQGKSIVSNAQPHVNKDIVINMDLKDFFPSIEYKRVKGLFYKLGYSEQISTMLALVCTQSDTYEVNMDGVTYHVQKGARFLPQGSPASPAISNLIAYKLDKRIKGLAERLNFTYTRYADDLSFSTTNENQKNIRQLLFFVNQIVVEEGFKVHPEKTHIMRKGNLQMVTGIVVNRKLNIERKKLRNFRALLHNLNLNGWKDQKWGNAVHLIHAVEGYIRFVKMVNPEKGKEFAEKLATIIKKQGYPEISCQKYNSNDTTEKTTASITKPETNQKEENDSQDWWDIF

SEQ ID NO: 5948 - protein, 504 aa, Flavobacterium sp.
  source 1..504: note = Related to PRDM01000004.1
MSEKLSKQQIYDRIKATSKDSYILEEMQRLGFWQSGGQPTLSEILIKQEAAIEKELNELLAQDRKFSNREAMVLEMRKARMKAAKEKRVETKLKREQKRLDKAENWKLLQEKQILYLGEEVSKGLHYKEAAVNLLEKYNLPVFEDALALAKSMNIDLKALQYLAYNRKVSKINHYHTFELEKKSGGKRKISAPKPKLKEIQTWILENILHQIPYTIEAHGFVKERSIVTNAQPHVNKDIVVNVDLKDFFPTITYKRVKGLFCKLGYSEEVATILSLLCTYSEINETTLDGVTYYVQSGERKLPQGSPASPAISNLIVYKLDKKINGLAQKLNCSYTRYADDMSFSTTQENSSNISKLLYFTKKIIASEGFIVHPEKIHVMRKGMQQKVTGIVVNNKLNIDRNQLRKFRALLHNIEKNGWKDQKWGKAVHVINAIEGYINYVNMVNPEKGTLFKENLKNIIKLHGLPHIEKIIIPEKVTPIAVSLPEEKEETTVKQQSENWWNIF

SEQ ID NO: 5949 - protein, 504 aa, Flavobacterium cheongpyeongense
  source 1..504: note = Related to NZ_QJHK01000001.1
MSEQLSKQQIYDRIRATSKDSYILEEMQRLGFWQSGAEPTLSEILIKQEAKIEKELNDLLAQDRKYSNRESMILEMRKARMKAAKEKRAETKLNNEKKRREKAENWQLLQQQQILYLGEEVSKGLYYKESNLTLLEKYKLPFYKDALALAKSMQIDLKALQYLAYNRKVSKINHYHTFELEKKSGGKRKISAPKPKLKEIQNWILENILQKIPYTTEAHGFIKERSIVTNAQPHINKDIVVNIDLKDFFPTVTYKRVKGLFHKMGYSEEVAVILGLLCTHSEINETILDGVTYYVQSGERKLPQGSPASPAISNLIVYKMDKKINGLAKKLNFNYTRYADDMSFSTTQENSKNVSRLLYFTKKIIETEGFVIHPDKIHVMRKGIQQKVTGIVVNKKPNIDRNQLRKFRALLHNIEKNGWKDQKWGKAIHVINAIEGYINYVRMVNPEKGIVFRQNLKDIIKQHGLPYVEKISIPEKITPIVIPVPDETKEIPIEKKPENWWDIF

SEQ ID NO: 5950 - protein, 505 aa, Flavobacterium chungangense
  source 1..505: note = Related to NZ_JASY01000021.1
MSEQLSKQQIYDRIRATSKDSYILEEMQRLGFWQSATEPTLSEILINQEAKIEQELNELLARDRKFSNREAMVLEMRKARMKAAKEKRGETKLNQEKKRLEKAENWKQLQEKQILYLGETVSKGLNSKETDSKILEKYNLPVFEDLLALAKSMQLDLKALQYLAYNRKVSKISHYHTFEVEKKSGGKRKISAPKSKLKEIQTWILENILHKIPHTIEAHGFIKERSIVTNAQPHINKDIVVNIDLKDFFPTVTYKRVKGLFHKIGYSEQIATVLSLLCTYSEMNETSLDGITYYVQSGERKLPQGSPASPAISNMIVYKLDKKINGLAKKLNFSYTRYADDMTFSANEKNSKNVSRLLYYTKKIIESEGFVIHPNKIHIMRKGMQQKVTGVVVNKKLNIDRNELRKFRALLHNIEKNGWQDQKWGKAIRVINAIEGYINYVYMVNPEKGTTLKQNLKNIITKHGQPTITKLSIPEQTVPIPASVPEKKKETIVPDEKPGNWWNIF

SEQ ID NO: 5951 - protein, 504 aa, Flavobacterium jumunjinense
  source 1..504: note = Related to NZ_CP091285.1
MSEKLSKQQIYDRIKATSKDSYILEEMQRLGFWQSGAEPSLSEILIQQETTIQKELNALLAQDKKFQNKEAMLVEMRKARMKAAKERRVETLQKREQLKIEKAQKWKLTQEKEIIYLGDQVSKGLNIQETNAALLDNYNLPVFEDVLALAQSMQIDLKALQYLAYHRSVSKIHHYHTFEVSKKSGGKRKISTPKPKLKELQNWILENILHKIPHTDEAHGFIKKRSIVTNAKPHLEKDIVINIDLKDFFPTITHKRVKGLFHKMGYSEQIATILSLLCTYSEVDEIDLDGVTYYVQSGERKLPQGAPTSPAISNMIVYKMDKKISGLAKKLNFTYTRYADDMTFSTSNENALNVSRLLYFIKKIITSEGFIIHPDKIHIMRNGMQKKVTGVVVNKKLNVDRLQLRKFRAVLHNINQNGWKDQQWGKAIHLINAVEGYINYVAMVNPEKGAQFKKSLVAIISKHGKPEIEKPTPIEKEKLIVPPVLEEPKTIVEDQKPGNWWNIF

SEQ ID NO: 5952 - protein, 337 aa, Dysgonomonas sp.
  source 1..337: note = Related to DQAM01000521.1
MSGNLTRQQIYDRIRAASKDSYILEEMQRLGFWDNSDVPTLSETLIRREVEVNKELNELLAKDRKFRNQEAMLSEMRRERMKKAKEKREQTKQKNKQIRLDKAARWKKAQLEQILYLGKGVSEGLNNTDYDAELLQKYNLPVFDSVKALAENMGVELASLRYLLYQRRVSKNTHYYTFEIPKKSGGKRKISAPKHRMKELQMWVLQNVLDNIPHCDTSHGFIREKSILTNAEPHVGKDIVINVDLKDFFPTISYKRVKGLFRNFGYSEQTAIIFALICTQAETETVEMDGVTYYVQKGERFLPQGSPASPAISNIIAYKLDKKVQGLAKKFGFTYTR

SEQ ID NO: 5953 - protein, 463 aa, Filimonas sp.
  source 1..463: note = Related to JAFKHH010000015.1
MIKKEASLSQELNTLVAKDRKFSNQEAMLKEMRKARMKLAKEKREQTKQKNKQKKLDKATSWQQTQLENIIYLGPGVSAGLNNTVSDSTILQQFGLPVFPNIPSLANAMQVDLATLRYLLYQRKVSRTNHYHVFEVPKKSGGKRRISAPKKQLKKLQLWVLNNVLCHLPNETVAHGFIRQRSIVTNAAPHVGKDIIVNVDLKDFFPTITYARVKGVFKKLGYSEQQAIIFALICTQAETEEVEMDGVKYYVQNGKRCLPQGSPASPAISNIIAYKLDKKIQGLAAKLNFAYTRYADDLTFSTTNDNAKQITKLLYLIKKIVTAEGFEVHPGKTHIMRKGGQQKVTGIVVNKQLNVERSQLRKFRALLHNLQMNGWKDQQWGNAKHLVNAVEGYINFVNMVNPVKAKLYKTQLEKIVATHGYPLVDNTMPKPTVTTVVAEVKETLIPTVAKEKSADKTDWWSVF

SEQ ID NO: 5954 - protein, 510 aa, Dysgonomonas sp.
  source 1..510: note = Related to NZ_OEPV01000013.1
MTLKLTRQQIYLRIKSSSKDSYVLEEMKRLGFWDKEQPTLPENLIKRETEINKELTELQKLDKKFKNQEALLAEMRKDRMKKAKEKRLQTKEANKKKRLEKAANWKLLQENQIIYLGKDVSYGLDNTKSDVESLTKYKLPIYKNILHLAQSMEISLSEIRYLLYHRKVSKKTHYHTFSIPKKSGGTRIISAPKSKLKRLQYWVLHNILEVIPPGEHAHGFIAGKSIQTNALPHVGKDVVINIDLQNFFPTITFKRIKGLFSKLGYSEQLATIFALICTETPCDKVQMDGVDYYVQNSERVLPQGSPASPAISNLIAWRLDKKIQGLASKYDFTYTRYADDLTFSAAAKAEKNIAGLLYFLEKIIRSEGLTINPEKTSIMRKGRQQRVTGIVVNEKLNIPRDNYRRFRALLHNIEANGWKDQHWSHSKNLPLSVKGYISFVKMINPDKGLKFEEQLTRIISKHGFPEMEVKKTISSIQEQNQSIELEKPIQEVKSSKEDKQTEDNNWWNIL

SEQ ID NO: 5955 - protein, 504 aa, Chryseobacterium sp.
  source 1..504: note = Related to JAKVIP010000001.1
MSQNLSRQQIYDRIKESSKDSYILEEMKRLGFWQETSTPSLPEQLIKREAVLQQELQELLAKDRKYGNQEAMLREMRKQRMQEAKAKREITKQKSEKKQQEKADYWKNLQQQQIIYLGENVSKGLHKSDSDTAKLLQFSLPVFENVLDFSQKSGFSLSVIKYLAFHRNVSKKSHYHVFEIPKKSGGKRKISAPKPQLRYLQHWILENILNKIPVGEMVHGFAIEKSIVTNAEPHLKKDIVINIDLQDFFPSISYKRVKGLFSKLGYSEQLSTIFALVCTQAHTEEVLLDNVKYFVHKGERFLPQGSPASPAISNIITYKLDKRLQGLSKKYGFTYTRYADDLTFSAAQDNEHNINTLLYFVKQVINHEDFTIHPDKLHIMKRKHQQKVTGIVVNEKLNVERKKLRKFRALLHNIEVNGWQNQTWGKAFHLINAIEGYINFVNMVNPPKALAFKEKLNTIIAKHGKPVVEIRKTAPEIAETIKVSEDQEEIITPAEEKTDWWNIF

SEQ ID NO: 5956 - protein, 504 aa, Chryseobacterium arachidis
  source 1..504: note = Related to NZ_FQUT01000024.1
MSQNLSRQQIYDRIKASSKDSYILEEMKRLGFWQETSTPSLPEQLIQKEVVLQKELQELLAKDRKYGNQEAMLREMRKKRMQEAKAKREVTKQKNEQKRKDKADHWKKLQQEQIIYVGEDVSKGLHCTDSDVEKLLEFSLPAFESISDFSQKSGFGLPLIKYLAFHRKVSNKTHYHIFEIPKKSGGKRRISAPKPQLRYFQQWILENILNKISVGEVVHGFTAKKSIVTNAELHLGKDIIINIDLQDFFPSISYRRVKGLFSKFGYSEQLSTIFALVCTQAHTEEILLDDVKYFVHKGERFLPQGSPASPAISNIIAYKLDKRLKGLAQKLGFTYTRYADDLTFSANQDKEQNINKLLYFVKQIINDENFTIHPDKLHIMRGRHQQKVTGIVVNEKLNVERKKLRKFRALLHNIEVNGWQNQTWGKAFHLINAVEGYINFVNMVNPVKALVFREKLNTIIAKHGKPIVEVKEVVQEIVETVAVTEIQEEMLAPKEEKTDWWNIF

SEQ ID NO: 5957 - protein, 504 aa, Chryseobacterium gambrini
  source 1..504: note = Related to NZ_FTOV01000003.1
MSQNLSRQQIYDRIKASSKDSYILEEMKRLGFWQETSTPSLPEQLIQKEVVLQKELQELLAKDRKYGNQEAMLREMRKKRMQEAKAKREVTRQKNEKKRQEKADHWKELQQEQIIYLGENVSKGLHQMQSDTEKLDQFSLPVFENILDFSQKSGFSLSQIRYLAFNRNVSEKSHYHTFEVSKKSGGKRKISAPKPKLKLFQQWILENILNRISVGEVVHGFTPNKSIVTNAAPHLGKDIVINIDLQDFFPSISYKRVKGLFSKFGYSEQLSTIFALICTQANTEEVLLDGVKYFVHKGERFLPQGSPASPAISNSIAYKLDKRLQGLAKKFGFAYTRYADDLTFSAGQNSEQNINRLLYFVKKIIKDENFTIHPDKLHIMRRKHQQKVTGIVVNEKLNVERTKLRKFRALLHNIEVNGWQNQTWGKAYHLINAIEGYINFVNMVNPSKASVFKEKLKTIVAKHGVPFVEVQKVIPDVVELPEVLEPEQDAVTPKEEKTDWWNIF

SEQ ID NO: 5958 - protein, 504 aa, Chryseobacterium luteum
  source 1..504: note = Related to NZ_JPRO01000015.1
MSQNLSRQQIYDRIKASSKDSYILDEMKRLGFWQETSTPSVPEQLIQREAVLQQELQELLAKDRKYGNQEAMLREMRKKRMNDAKAKREITKQKSEQKRQDKADYWKNLQQQQIIYLGENVSKGLHKSDSDTEKLLQFSLPVFENVLDFSQKSGFGLSVIKYLAFHRSVSKKSHYHVFEIPKKSGGKRKISAPKPQLRHFQHWILENILNKIPVGEVVHGFTIKKSIVTNAESHLKKDIIINIDLQDFFPSISYKRVKGLFSKLGYSEQLSTIFALVCTQAHTEEVLLDDVKYFVHKGERFLPQGSPASPAISNIIAYKLDKRLQGLAAKYGFTYTRYADDLTFSAGQDNEQNINKLLYFVKQVINAEDFTIHPDKLHIMRRKHQQKVTGIVVNEKLNVERKKLRKFRALLHNIEVNGWQNQTWGKAFHLINAVEGYINFVNMVNPSKALVFKEKLSAIIAKHGKPIVEVRTTIPEIAETIKVSEDKEEIIAPKEEKTDWWNIF

SEQ ID NO: 5959 - protein, 504 aa, Flavobacterium sp.
  source 1..504: note = Related to NZ_PJQW01000010.1
MSEQLTRQQLYDRIKSSSKDSYILEEMKRLGFWKSKGQPTLEETLIEKEASLQQELSTLVAKERKFQNQELLLKEIHKQRMQKAKAKREETKEKRAKEKQEKAARWEALRTTEIIYLGEGVSKGLQPTASNGTLLAQYNLPYFDTVAQLADAMGISTKMLTYWAYHRPVSLTSHYYTFEIAKKSGGKRKIAAPKKGLKKLQNWILTSILSKIALQDEVHGFTSKRSIVSNAQPHIGKAVVVNIDLKDFFPSVHYKRVKGLFSTLGYSEQIASILALLCTQAETKQVTLDNVLYYVQQGNRVLPQGSPASPAISNLIAYKLDKRMKGLAKRYGFTYTRYADDLTFSSHTATDKDIAALLHFAKKISTSEDFTVHPDKVHVMKQSRQQKVTGVVVNEKPNIDRNRLRQFRALLHQIKNKGWQDKQWGKSNNVYAAIEGYILFVHMVAPEKALVFRKQLEDIVAIHGTPPPTEVQPVPQPVTEEKTIVPENNSKANEEDTTNWWTTF

SEQ ID NO: 5960 - protein, 501 aa, Flavobacterium sediminilitoris
  source 1..501: note = Related to NZ_CP090145.1
MSEQLTRQQLYDRIKESSKDGYILEEMKRLGFWKSQGEPTLEETLIQREANLNKELTALVAKERKFQNQEMLLKEIHKQRMQKAKAKREETKQKREQKKQDQAARWQEIQEKEIIYLGDDVSKGLQQTESNKDLLLQNNLPFFENVLHLAESIGTSTKKLTYWCYHRKVSTNSHYYTFEIPKKSGGKRKISAPKTGLKNLQKWLLDTLLSKITMAEEVHGFTANRSIVSNAKSHIGKEVVINIDLKDFFPSIHFKRVKGLFKALGYSEQIASIFALISTQAETKEVLLDGVKYYVQSGNRILPQGSPASPAISNLIAYKLDKRLKGLAQRYGFTYTRYADDLTFSSEENNAKNSAALLYFAKKIITSEDFTVHPDKIHLMKKSRQQKVTGIVVNEKPNIDRNRLRQFRALLHNISCNGWKDQKWGKAKNIYNAIDGYILFIHMVQPEKAIVFRKKLEEIVVKHGKPITKCSTPLPVETQKKEETLSEKENSSSPSNWWSNF

SEQ ID NO: 5961 - protein, 503 aa, unidentified
  source 1..503: note = Related to JAIBAX010000003.1; note = Chitinophagales bacterium
MSKVLSRQEIYDRIRNSSKDYYILEEMKRLGFWKESSVPTVAESLIQREALLNKELQELIAKDKKYQNQELMLREMRKKRMKEAKEKREETKQKNERARIERSEKWKKIHAAQIIYLGDDYSAGLNNSAPINSINALLPTFSDVQDLAAKMGIDLSTLRFLSFHRKVSKNCHYHSYEIKKKSGGTRNISVPKGKLKKAQHWVLQNILNKIEINDSAHGFIKGKSIVTNAQQHVNKAVIINLDLKDFFPTIHYKRVKGLFIKLGYPEQLAIIFSLLCTHAHTEEVFLDGIRYYVQNGERFLPQGSPASPAISNLICYKLDKRLDGLAKKYGAVYSRYADDITFSLDDNENISKLLFYAHKIIEGEDLQINKAKTHIMRKNAQQKVTGIVVNQQPTVERRILRKFRALLHNILKNGWQEQKWGNGSNLLHSIEGYINYIHMVHPTKAQSYRVSLKTILEKHGTPEIKVNIPINIVPPPQIASTEEDPKDSAPEQKKEETDWWNLF

SEQ ID NO: 5962 - protein, 503 aa, Flavobacterium branchiophilum
  source 1..503: note = Related to NC_016001.1
MALTRQQIYDRIKSSSKDSYILEEMKRIGFWENSEIPSVPEQLIAEETALQKTLNQLLAQDKKYSDQEAMLRAMRKQRMQESKQKRDINKQKRAQKIIEKSEKWQQVNQKQMIYLGESVSKGLQNEQQNPILLSKFNLDFFENSYDFSVQSGFDLPTLKYLAYNRKVSKSTHYHVFEIPKKSGGTRKITAPKTKLKAFQLWILEHILNKIVVAPMVHGFVQNRSIVSNANQHVQKNVVLNLDLKDFFPSISYKRVKGLFRIFGYSESMATLLALACTTCDIEKIQIDGETYYVQKGPRYLPQGSPASPAISNLIAYKLDKRLHGLASKYGFTYTRYADDLTFSGNEEAAQYMGKFLCFVKKTIKSEDFEVNNDKTSIMRPSNQQKVTGIVVNKKLNIDRKRLRQFRALLHNIDQNGWQNQTWGKAIHLINAVEGYIQFVKMVDAAKGAKFHQTLLNIIAKHGRPIIESKIMQVSKAAIPEAPIVEKTISKATTDKQTDWWNLF

SEQ ID NO: 5963 - protein, 487 aa, unidentified
  source 1..487: note = Related to JAJQES010000108.1; note = Tannerellaceae bacterium
MGERATRENTPGRSVPVEKQPLEEMKRLGFWEQPLPAFPEELNQREDDLARELNELLAKTGKENKEKGEMLLRQRARQKKLEKAARRKLARPETIPYLGEEVSTGLRETETNTALLQKYNLPVCTSFRELGEQMNCDLPTLQYLLYNRKVTSSTHYYTFKFPKKSGEMRTISAPKQKLKRLQYWVTENILNRLPVCDQVHGFAKERSILTNASPHLGKDIVVNLDLKDFFPSISYKRVKGLFRKFGYSEQLSILLALICTEAQTRQVELNGQTWYVQTNRRSLPQGSPASPAISNLIAYTLDKRLEGVAKKYNFTYTRYADDLTFSAYKEQERNITKLLYFIRKVIREERFTVHPEKTQIMRKNRQQRVTGIVVNQRPNIDRQQLRRFRALLHHIEVNGWQQQQWGHPSGYLPHSIEGYINFIRMVHPHKAKKFEEQLMKIVFKHGYPAGPASSPETRIDKSGEKKEPDSPSTSSFEVDWWGLPLTT

SEQ ID NO: 5964 - protein, 499 aa, unidentified
  source 1..499: note = Related to LJIE01000001.1; note = bacterium 336/3
MAEQLTRQQLYDRIRETSKDAYILEEMKRLGFWENSSQPTLSEALIQREATLQKELNELLDKQRKYNSREQLLRDMRKQKLKLSKEKQAETKKRQEEKRQLKAQKWVESKQKEIVYLGESVSGGLNEKTSNQALLAKYQLSDFASVLGLAEAMKVSLAQLRFLAFHRAVSKTSHYHFYSVPKKSGGKRLISAPKPLLKKCQHWILESILYKITPSEHVHGFVPKKSIVTNAKPHLQKDIVVNLDLKDFFPSISYKRVKGLFVNLGYSEQLATVLALISTHYEMDKVNVDGDVYYVQKGERVLPQGSPASPAITTLIAYTMDRRLQGLAKKLGFTYTRYADDLTFSTDASNEGNIATLLYFTKQVVEDEGFTVHPDKTHVMRKGSQQKVTGVVVNDKLGVDRTILRKFRAFLHQVSQFGWGKNKWGNGDNPRQSALAFASFVMMVDKEKGTKLMNQIKAIADSSVVTEKKKTVSQEPQKQVPEEKTNTSTPASQDWWDIF

SEQ ID NO: 5965 - protein, 532 aa, Bernardetia litoralis
  source 1..532: note = Related to NC_018018.1
MSMTRQELYDRIRTTSKEAYILEEMKRLGFWGDSEKPTLAEELINKQARLQKELSELNQKQRQYNSREAMLKEVRLERMKASKEKQKETKARNEEKVRLKAEKWAETQKTNIIYLGQEVSEGLNNTTSDKEKLEKLKLPYFENIVEFSEKINKPISELRFLAFQRSVSKVNQYHNYYVPKKSGGKRLISAPKPKLKHTQNWIKTNVLDKIEINENVHGFVKERSILTNAEPHQNKNLVISLDLKDFFPSISYKRVKGLFLKFGYSEQLSTLFGLLTTHNETDKLNVDGEIYYAQKVDKETGKTNRFLPQGSPASPAITTLIAYKMDKRLEGLAKKMGFTYTRYADDLTFSSDLDLKKDTKATNKIIGSLLYFVKKVVTSEGFEIHPDKTHIMRKGNQQKVTGIIVNQNTENKLGIDRQTLRKFRAFLHQTAKTGWKVDKNAKDKKWGIHPDPKQAALGFASFIKMVDAEKGEKFIQKIKSIPTAEDYLQTDDTTLVSQKTEEKTLKQVETKSKESEQEIEKQSDESDWWDIF

SEQ ID NO: 5966 - protein, 511 aa, Eisenibacter elegans
  source 1..511: note = Related to NZ_AUMD01000019.1
MSQHPTRQQLYDRIRASSKDSVILAEMKRLGFWEDSPQPTLPETLIAREATLQKELNDLLTTERRFQNSEQVLVDMRKDRMRKSKEKQAENKARRLEERRQKAEQWQQTKTQDIIYLGEGVSAGLQAAPSDLERLQSLGLPIFENVLDLAQQMGIPLPKLRFLAFERKIAKVCHYSYFQLPKKSGGLRRIAAPKPLLKQAQQWIMTHILYQIPNKDCVHGFVPERSILSNAQPHLGQEVVINLDLKDFFPSISYARVKGLFVKLGYSEQLATILALLCTHAETKAVTVDGEQFFVQEGERRLVQGSPASPALSNLIAHKLDKRLEGLAAKYGFTYTRYADDLTFSAPKADEPAISALLAYVKRVVREEGFALHPDKTHLMRKGAQHKVTGVVVNEKPSVDRKQLHKFRALLHQIDQTGWEGKQWGNTPNIVHSVQGYANFVAMVNPEKGQKFVAMVKALIAKHPAPPLVLRYTPAPEQPPADETHSTQPAAPTSPASPQKPESDWWDVLDL

SEQ ID NO: 5967 - protein, 504 aa, unidentified
  source 1..504: note = Related to RDZE01000015.1; note = Cytophagales bacterium
MSTQLTRQQLYDRIRTTSKDQFVLEEMQRLGFWEKKEQPTLSETLIKREADLQKELNELLTKQNKYNKREAMLLEMRKAKMKASKEKQAATKLRNEQKRKDKAKKWQESQQNDIVYLGEGVSAALIQKENNLENLQKYELPLFENMLQLAEAMQIPLSKLRFLAYHRKVSKITHYNHFTIPKKSGGLRTISAPMPDLKKVQQWILEHILYKIKPKAQVHGFVPERSILSNATPHIGKDIVINLDLKDFFPSISYKRVKGLFVKLGYSEQIALTLALLCTYHETEKLNVDNEIYYLHKGERYLPQGSPASPAITTLIAHKMDSRLQGLATKYGFTYTRYADDLTFSANKDAEENINKMLLFVKKVIESEDFELHPDKTKIMRKGSQQKVTGIVVNQKPNVDRQQFRKFRALLHQIEQTGWENKKWGNKDAHIVYAVKGFAEFVHMINPTKGEQLKKKIAEILTKYPATVPAKPQKEVASQTKEETPNIQTNTNIQPTEWWDIFEN

SEQ ID NO: 5968 - protein, 459 aa, Emticicia sp.
  source 1..459: note = Related to JAAAKT010000013.1
MANQPSREDIRKRVAESTKDAVILEEMKRFGFWKEEFSPELEDILQKQKETETELNTLVRKQTRYRNPETLRKEMLKERMKASKQKRQEAKERKEQKRLARAETWKKRKETEVLYLGEDVSSRLSETEPNLEFLAKWNLPNIENPLALANALSLELSQLRFLTYNRKVSLVNHYKRFYIPKKMGGKRLISAPMPLIKSAQLWILNNILYLIPHTDQAHGFIPQRSIVSNAAQHVGKELVLNLDLKDFFPSISFSRVKGLFQSFGYSGQISTLLALLCTEAEVEQVAIDGKKYFVSIGERTLPQGSPCSPAISNLIAYKLDRRLQGIANKWGFVYTRYADDLSFSCGSDNLDNFQQLLWSVQEVVKSEGFTVHPEKIHIMRKGSRQEVTGLIVNRQIGIERKELHRFRALLQQIEKNGPAGKTWNGNPNLENSMRGYASFVMMVKPELGIRFMKKIDSIF

SEQ ID NO: 5969 - protein, 506 aa, Fibrella aquatilis
  source 1..506: note = Related to JAFMYU010000001.1
MTRQEIYNRIQELGSKQSYIAAEMTRLGFWNQGGEPTIPAELTQQATALQTELNQLMERQRRYQSRQAMLQEMRQARMAAAKQRRLETKVRREAARLARAETWKNKLATTVPYLGDEVSAGLKNTTSDPARLAYFGLPHFDSPLALAQAMSLPLSELRFLAYNRAVSTVSHYKRFYLAKKSGGKRLISAPMPRLKKAQLWVLEHILHKVQPTEFAHGFVTDRSILTNATPHVGQDVVINVDLKNFFPTIGYPRVKGLLTKLGYSEAIATILALLCTEPDTEAVQMDGKTYHVGNGERTLPQGAPTSPAITNLLAYRLDRRLQGMAARFGYAYTRYADDLTFSATGAAAGKANQVLWAVEQIVQSEGFTVHPDKVTVMRKGDQQRVTGIVVNQKPSIDRATLRQFRALLHQIGQSGWESKTWGNPNPTADIQNVVIGYANFVMMVKPDLGRQLRATIAGLISKPPTSSSASSMPTIADDLSPVSAPITTPLVPPTAPPASKDWWDVL

SEQ ID NO: 5970 - protein, 499 aa, Fibrella aestuarina
  source 1..499: note = Related to NC_020054.1
MTRQEIQKRIEELGSKQQFIIAEMTRLGFWTQHGEPIPAELVAQDAALQKELSQLLDRQRRFQSRDAMLKEMRQARMAAAKQRRIETKQRREAARKARADAWQATLATDVPYLGEGTPAALANHTADPDRLRQVGLPQFESPLALARAMGLSLSELRFLAYNRAVSTVSHYKRFHLIKKSGGKRLISAPMPRLKKAQLWVLENILSKVQPTEQAHGFRAERSILTNAQPHVGKDVVINIDLKNFFPTVSYGRVKGLLAKLGYSEALATVLALLCTEPDTQALQVDGKTYYVGNGSRYLPQGAPTSPALTNLLAYRLDRRLNGLAQAFGYVYTRYADDLTFSASGSGAGKANQLIWAVEQIVQGEGFVVHPDKISVRRKGQQQRVTGIVVNQKASIDRATLRRFRALLHQIGQTGWEGKTWGNPAPEADIQQVVLGYAHFVQMVKPELGRSLVASIRALIQSRPDAALAQPVEPVPATVSSTATNSAPVARPVKEWWDVL

SEQ ID NO: 5971 - protein, 349 aa, unidentified
  source 1..349: note = Related to SEBH01000648.1; note = Cytophagaceae bacterium
HRPVSTVNHYKSFYLPKKSGGKRLISAPMPRLKKAQLWILEHLLQKITPTEQAHGFTTGRSIVSNAQPHVGQEVVINVDLKDFFPTISFPRVKGLFMALGFSEQLATLLALLCTELPTYAVSLDGRTYYVATDERRLPQGAPTSPAISNLIAYRLDRRLQGMATRFGYAYTRYADDLTFSASDTAVKQVEQVLWSVNQIVESEGFTVHPDKISVMRKGSQQRVTGVVVNDKPGVDRATLRRFRALLHQISLTGWAGKSWGGTATNHQADLRNVVMGYANFVAMVKPEQGQALREQINKLIGGTNLSVNPLLSEQPAPDNAPVVTGESTLGTLSQKPPILSQNKDWWDVL

SEQ ID NO: 5972 - protein, 495 aa, Spirosoma oryzae
  source 1..495: note = Related to NZ_PVTE01000003.1
MTRQEIYDRIRGLGSKDSFVLAEMKRLGFWEPTTDMPGLPEQLIERQGQLQRELNELLEKQRRYENRKAMLAEMRKTRMAESKRKQQETKQRNEQKRQERAAQWKRQQEQTIVYLGENVSGGLQSGTANNDQLRRFGLPDFDSPLALAQAVGVTLSRLRFLAYDRPVSTVSHYKRFYLLKKSGGKRLISAPMPYLKTVQYWILEHILRKIQPTEHAHGFTIDRSIVTNAQPHTGKDVVVNLDLKNFFPSISYRRVKGLFVMIGYAETIATILALLCTEPDSDMIELDGKTYYVAKGSRVLPQGAPTSPALTNMIAYRLDHRLRGVANKFGYIYTRYADDLTFSASDEAAGRVGQLLWSIRQVIDGEGFVLHPDKLQVMRKGSQQRVTGLVVNDQLGIDRTTLRKFRALLHQIEQSGWQGKTWGKGQIQNTVLGYANFVAMVKPEQGKRLVETVKRLMLPAVESAGELPRQEPSTNGQINQPPKDTNLSTDWWDVL

SEQ ID NO: 5973 - protein, 521 aa, Chitinophaga sp.
  source 1..521: note = Related to JAGHZS010000007.1
MSLTRQQLYDQIRASSKEEYILEEMTRLGFWPNNVGQPAPAVTLIRKEGELNRQLNELLAEKQKYRNKRKMLEDMRKDRMAKAKLKRAETKKRREEERVKRAAEWAATKNLQIVYLGEDVSAGLNKVTPDTAQLTRFGLPVLSDAVALANAMNITIGKLRYLSFSRKIGHHTHYQRFQVPKKSGGTRVISAPMPQLKAAQHWILENILYKIKNNDAAHGFVPGKSIVTNATPHIGQDIVINLDLKDFFPSVAYKRVKGLFCKLGYAEQVATILGLICTEPEVDEVLLDGRKYYVAKTERHLPQGAPTSPAITNLICYKLDQRFAGLANKYGYAYTRYADDMTFSAKGDAADKAGQLLRAIKMFVKEEGFTLHPEKLKVMRRGDKQEVTGIVVNEKLSLDRTTLRKFRALLHQIGHTGLSGKSWGKGKNIISSMEGYANFVYMVKPDLGAKLKSSLTALLQREDIKAEARSIWAGEQAPTTPSVAGVHINTTPQATPAAEVPPVNPSTDKPAAPDKPWWDVL

SEQ ID NO: 5974 - protein, 530 aa, Chitinophaga hostae
  source 1..530: note = Related to NZ_JAGTXB010000010.1
MSLTRQQLYDQIRASSKEEYILEEMTRLGFWPKSVGQPTPAVTLIRKEGELRRSLNELIAEKQRYRNKRAMLEDMRKARMAKAKQKRAETKKRREEERVKRAAEWAAEKNLHIVYLGEGVSAGLNKVNPDTAQLEKFGLPVWADAIALANAMGITIGKLRYLSFNRKVGHHTHYQRFQIPKKSGGTRVISAPMPQLKAAQHWILENILYKIKNNEAAHGFVPGKSIVTNAAPHIGQDIVINIDLRDFFPSIEYKRVKGLFCKLGYAEQVATILALICTEPEVDELLLDGRKYYVTKTARHLPQGAPTSPAITNLICYKLDRRFAGLATKYGYAYTRYADDMTFSAKGPAAGKAGQLLRAVKMFVKEEGFTIHPDKLKIMRRGDRREVTGIVVNEKLSLDRTTLRKFRALLHQVGQTGLANKTWGKGKNIISSMEGYANFVYMVKPELGAKLKATLAALLQRADIKAEARSIWTGEALPQKESNTAISGNTETITTPVSTATNGNGAASAARGNTGTDKPAAADKPWWDVL

SEQ ID NO: 5975 - protein, 509 aa, Chitinophaga arvensicola
  source 1..509: note = Related to NZ_FOJG01000002.1
MSLTRQLLYDRIRASSKEELILQEMTRLGFWAENLAQPSPAASLIQQETEVRRQLNDLINERQKYRNKRMMLEDMRKARMAKAKLKREETKQRRETARKERAAAWAITKDQQIVYLGEEVSAGLNKVVPDLVQLQKFGLPVFADANALATAMGITLGKLRYLSFNRKVGHHTHYQRFQIPKKSGGSRTISAPMPQLKAAQHWILENILYKIKNDVAAHGFVPGKSIVTNAAPHTGQDIVINIDLRDFFPSIAYKRVKGLFCKLGYAEQVATILALICTEPEVDEILLDGRKYYVAKTARHLPQGAPTSPAITNLICFKLDRRFTGLAEKYGYAYTRYADDMTFSAKGPAADKAGQLLRAVKMFVKEEGFTIHPDKLKVMRKGDKHEVTGIVVNEKLSLDRTTLRKFRALLHQVEKTGLANKSWGKGKNIISSMEGYANFVYMVKPELGAKLKATLAALLQRPDIKSEARGLWTGEVKEKKVSDTPVAPTAPVNPPPSSASSEKPWWDVL

SEQ ID NO: 5976 - protein, 535 aa, Chitinophaga polysaccharea
  source 1..535: note = Related to NZ_VIWO01000002.1
MAESLTRQQLYDRIRASSKEEFILEEMIRLGFWARNTAQPSPSETLIRREGELRRELNDLLAEKQRYQNKVKMLADMRKDRMAKSKLKIAETKKRREEERKARAEAWAVAKDQQILYLGEEVSAGLNKVNPDTAQLAKFNLPVFADATALANAMGITLGKLRYLAFNRKVGHHTHYQRFQVPKKSGGTRVISAPMPQLKAAQHWILEHILYKVSHSNAAHGFVPGKSIVTNAAPHVGQDIVINIDLRDFFPSIAYKRVKGLFCKLGYAEQVATILALICTEPEVDEVLLDGRKYYVAKTARHLPQGAPTSPALTNLICFKLDRRFAGLAEKYGYAYTRYADDMTFSAKGAAADKAGQLLRAVKMFVKEEGFTIHPDKLQVMRKGDRHTVTGIVVNEKLSIDRTTLRKFRALLHNIEKTGLSGKRWGKGKNIISSIEGYANFVYMVKPEWGARLKEKLAALLQRPDIKAEAHAIWTGNSSQPVTTEAISASSHPAGYTSSDTTTPAATTDSSTTIPGRITPPEPPAATDKPWWDVV

SEQ ID NO: 5977 - protein, 507 aa, Chitinophaga jiangningensis
  source 1..507: note = Related to NZ_FRBL01000014.1
MPEGLTRQQLYDRIRETSKEEYILEEMVRLGFWSRDTDKPSIPEALIKQEGELNRQLNQLLSERSKYRDKKRLLVEMRKQRMAQAKAKRAETKKRNEQKRIERAAAWAEKKQQDIIYLGENVSAGLNKNQSDTAQLQKYNLPVWHSATDLAAAMQLPLGKLRFLAFNRSVAHQTHYQRFAIPKKSGGTRIISAPMPQLKAAQHWILENVLYKVSNSGSANGFVPGKSIVTNAIPHVGKDLVINIDLKDFFPSVAYNRVKGLFCKLGYSEQVATILGLICTEPEVDEVLLDGRKYFVAKTARVLPQGAPTSPAITNLICYKMDRRFEGLSAKYGYAYTRYADDMTFSAKGEAAAKAGQLLWAVKKVVAEEGFVLHPDKLKVMRKGDRHEVTGIVVNQKLSIDRTTLRKFRALLHQVELTGLAGKSWGKGNIIASMEGYANFVMMVKPEQGRALKTKLAAILSRADIKAEAQAMWKNEPPAEQPAMPPANPVAPPAPEKKTDDPWWKVV

SEQ ID NO: 5978 - protein, 512 aa, Chitinophaga dinghuensis
  source 1..512: note = Related to NZ_QLMA01000005.1
MPEGLTRQQLYDRIRQSSKEEFILEEMTRLGFWARDVNKPSVPETLIQQEGGLQRQLNELLQEKAKYRNKQRLLTDMRKERMAKAKAKRAETKQRNEQKRIERAAAWAEKKQQDIIYLGEAVSAGLNKNTSNEAQLQHFGLPVYHNAQQLADAMQLALGKLRFLAFNRSVATTTHYQRFQLPKKSGGVRTISAPMPQLKAAQHWILENILYKVSNSDAANGFVRGRSIVTNAQPHIGKDVVVNIDLKDFFPGIAYKRVKGLFCKLGYSEQVATILGLICTEPEVDEIILDGRKYFVAKTDRVLPQGAPTSPAITNLICFKMDRRFEGLSKKYGYAYTRYADDMTFSAKGDAAAKVGQLLWAVKKVVAEEGFVLHPDKLKVMRKGDRHEVTGIVVNEKLSIDRTTLRKFRALLHNVELTGLSGKKWGKGSIIASMEGYANFVAMVKPEQGKKLKAQLAALFSRADIKAEAQAIWKNEEQPQQDSSVSPQTPNTQDTPTPPKPSGPEKPWWKVV

SEQ ID NO: 5979 - protein, 514 aa, Chitinophaga sp.
  source 1..514: note = Related to VWWO01000002.1
MPEGLTRQQLYDKIRESSKEEYILEEMVRLGFWQRDTEKPSVPEVLIKQEGALNKELNQLLQEKYRYRNKQLMLTEMRKARMARAKAKRAETKKRNEEKRIARAAAWAEQKQQDIVYLGENVSAGLNKKVSDEAQLRKFNLPVWHTAQDLANAMQLSLGKLRFLAFNRTVGHQTHYQRFQIPKKSGGTRVISAPMPQLKAAQHWILENVLYKITNSTSANGFVPGKSIVTNAIPHIGKDVVVNIDLKDFFPSIAYKRVKGMFCKLGYSEQVATILGLICTEPDVDEVMLDNRKFFVAKTERRLPQGAPTSPAITNIICFKLDRRFEGLSAKYGYAYTRYADDMTFSAKGEPAAKIGQLLWAAKKIVAEEGFVLHPDKLKVMRKGDRHEVTGIVVNEKLSLDRTTLRKFRALLHQIELTGLANKTWGKGNIISSMEGYANFVAMVKPEQGTKLKNQLNALLQRNDIKAEAQAMWKGEEVASAKPAEHLPEKENKKDNTSNNNKTPDNDKPWWNIL

SEQ ID NO: 5980 - protein, 515 aa, Chitinophaga niastensis
  source 1..515: note = Related to NZ_PYAW01000007.1
MAEGLTRQQLYDRIRASSKEELILEEMTRLGFWANNTSQPSPSESLIRQEGVLRRELDELIKEKQKYRNKEKMLQDMRKERMAKAKLKRAETKKRREEERKARAIAWAAEKNQSIVYLGEDVSAGLNKVVSNTEQLAKFGLPVWHDAVALANAMGVTLGKLRYLSFNRKVGHHTHYQRFQIPKKSGGTRVISAPMPQLKAAQHWILENILYKIKNSEAAHGFVPGKSIVTNAAPHVGQDIVINIDLRDFFPSIAYKRVKGLFCKLGYSEQVATILGLICTEPEVEEITLDNRKYYVAATARHLPQGAPTSPAITNLICYKLDKRFEGLSAKYGYAYTRYADDMTFSAKGAAADKAGQLLWAIKLVVKEEGFTIHPDKLKVMRKGDKREVTGIVVNDKLSLDRVTLRKFRALLHQISTTGLSNKSWGKGKNIISSIEGYANYVYMVKPEQGAKLKATLAALLQREDIKAASRSIWTGETLAAAPVVTTVTAETPASKPIIKETPPASKDKPWWDVL

SEQ ID NO: 5981 - protein, 526 aa, Chitinophaga oryzae
  source 1..526: note = Related to NZ_CP051205.1
MAEGLTRQQLYDRIRASSKEEFILEEMTRLGFWAKNTSQPSLPETLIRREGELRRELNELLAEKQKYRNKERMLADMRKERMAKAKLKRAETKKRNEEKRKARAAAWAEKKNLDITYLGEEVSAGLNKVTPDEAQLAKFGLPVFKDATALAAAMGVTLGKLRFLAFNRQVANTSHYQRFEIPKKSGGTRVISAPMPQLKAAQHWILENILYKINNSAAAHGFVPGKSIVTNAVPHVGQDIVINIDLRDFFPSVPYKRVKGLFCKLGYAEQVATILGLLCTEPEVDEILLDNRKYYVAKTERHLPQGAPTSPALTNLICFKLDRRFEGLAAKYGYAYTRYADDMTFSAKGDAADKAGQVLWAVKQVVKEEGFTIHPDKLKVMRRGDKREVTGIVVNEKISLDRETLRKFRALLHQISKTGLAGKRWGKGRNIISSMEGFANYVYMVKPEQGAKLKETLAALLQREDIKAEAHNLWTTGTTEGTAAETTTETPSAPQSSAPQHPEGVHIAKDTPTATNKPDKPWWDVL

SEQ ID NO: 5982 - protein, 525 aa, Chitinophaga flava
  source 1..525: note = Related to NZ_QFFJ01000003.1
MAEGLTRQQLYDRIRASSKEEYILEEMTRLGFWAQNSSQPSLPETLIRKEGELRRELNELLAERQKYRNKEKMLADMRKERMAKAKQKRAETKKRNEEERIARAAAWAEKKQQDILYLGEEVSAGLNKVTPDEAQLTKFGLPVFKDATALANAMGITLGKLRFLAFNRKVSNSSHYQRFQIPKKSGGTRVISAPMPQLKAAQHWILENILYKIKNSDAAHGFVPGKSIVTNAAPHIGQDIVINIDLRDFFPSIPYKRVKGLFCKLGYAEQVASILGLICTEPEVDEILLDNRRYFVAKTERHLPQGAPTSPAITNLICFKLDRRFEGLAAKYGYAYTRYADDMTFSAKAAVADKAGQVLWAIKQVVKEEGFTIHPDKLKVMRKGDKREVTGIVVNEKLSLDRETLRRFRALLHQISKTGLAGKSWGKGKNIISSIEGYANYVYMVKPEQGAKLKATLTALLQREDIKAQARSLWTGEQAPAQQQAGPASQADTTKTTDTTATTQAPPASNPSSSAKTEKPWWDIL

SEQ ID NO: 5983 - protein, 517 aa, Chitinophaga solisilvae
  source 1..517: note = Related to NZ_RIAR02000001.1
MAEGLTRQQLYDRIRASSKEEYILEEMTRLGFWARNTTQPSPSETLIRKEGELRRELNELLAEKQKYRNRERMLADMRKERMQKAKDKRAETKKRNEEKRREKAAAWVVQKNLNIVYLGEEVSAGLNKNVSDEAQLKKFCLPVFNDAVALANAMGITIGKLRFLAFNRKVATGTHYQRFAIPKKSGGTRVISAPMPQLKAAQHWILEHILYKIENGKAAHGFVPGKSIVTNAAPHVGQDLVINMDLRDFFPSIPYKRVKGLFCKLGYSEQVATILALICTEPEVDEVMLDNRKYYVAKTDRHLPQGAPTSPAITNLICFKLDRRFEGLAAKYGYVYTRYADDMTFSVKGDAADKAGQVIWAVKQVVKEEGFTLHPDKLKVMRKGDKREVTGIVVNEKLSIDRDTLHKFRALLHQISKTGLAGKHWGKGNIISSMEGFANYVYMVKPEQGAKLKATLATLLQREDIKAEARSIWTGEATAVAAAPADTIADTTASVTPVTPKPEGKATGAEKPWWDIL

SEQ ID NO: 5984 - protein, 478 aa, unidentified
  source 1..478: note = Related to JACMJX010000348.1; note = Chitinophagaceae bacterium
MAQGLTRQQLYDKIRLSSKDEVILQEMTRLGFWSKDSASASPSALLIEREDTLRKELTDLLKEKQKYANQEKLLAEMRAVRMEKALKKRQETKLRKEEQRKERAEEWAEQKNNSILYLGENVSAGLHKIVSDVTQLQKYGLPVWHDVNAMAAEMGLGLGEIRFLAFNRKVAHCSHYQHFYLPKKSGGKRLISAPMPRLKAVQNWILHNILYRIKNSDAAHGFVPGRSIVTNATPHVGKELVINIDLRDFFPSVAYKRVKGLFVKLGYSEQLATILGLLCTEPDVDEIVLDNRKYYVAKTERHLPQGAQSSPAITNLICYKLDKRFEGLAARHGYSYTRYADDMTFSANGEGIEKAGQLMAFVKKVIKEEGFTIHPEKLRVMRKGDKREVTGVVVNDKLSIDRETLRKFRALLHQISKTGLSQKQWGNGNIVSSLQGYANYVAMVKPGAGAKLKASINELFNRPEIKREAVSILGDKKE

SEQ ID NO: 5985 - protein, 510 aa, Chitinophaga sp.
  source 1..510: note = Related to NZ_CP077769.1
MAEGLTRQQLYDRIRSSSKEEYILNEMVRLGFWAHQTATPTLPESILNRERELRKELGDLLAEKQKYRDKERLLAEMRKQRMEAAKQKRAATKQRREEERQSRAAAWTLQKAHSVVYLGEDVSAGLNKAVSDTVQLAKYGLPLFHNGEALATAMGVSLGTLRFLAFNRNVGYISHYKRFKLPKKSGGHRTISAPMPQLKAAQHWILEHILYKVPHSPAAHGFVPERSIVTNAAPHVGQDIVINIDLKDFFPSIAYKRVKGLFCKLGYSEQVATILGLLCTEPEVDEVSLDNRTYYVAKTARHLPQGAPTSPAITNLICFKLDRRFEGLAARLGYTYTRYADDMTFSTKGAAAEKPGQLIWSVKQVVKEEGFTIHPDKLKVMRKGDQRAVTGIVVNEQLSLDRATLRKFRALLHQISQTGLANKSWGKGNIISSMEGYANYVAMVKPALGAQFKQTLANLLARDDIKQAARAMWTGTPVSPVPIPAPTPTASPAKEETPPPAGDKPWWDVL

SEQ ID NO: 5986 - protein, 501 aa, Chitinophaga rhizophila
  source 1..501: note = Related to NZ_JAICCF010000004.1
MAEGLTRQQLYDRIRASSKEEFILEEMTRLGFWTKNTAMPSPSEMLIRREGELRRELNKLMEEKHRYRHREQMLNEIRKQRMEAAKAKRAATKLRNEEKRKEKAAKWAIEKEKNIVYLGEEVSAGLNKVLSDEAKLRAAGLPIYHDGAALAEAMGITLGKLRFLSFDRKVATVTHYKRFYIPKKSGGRRLISAPMPQLKAAQYWILENILYKVKHSDAAHGFVPGKSIVTNAANHVGQDIVINIDLRDFFPTVAYNRVKGMFCNLGYSEQVSTILGLLCTEPEMEPVNLDGKDYHVATSARHLPQGAPCSPAITNIICYKLDRRFEGLARRFNYTYTRYADDMTFSAKEAAANDAGKLIWGVKQVVKEEGFVVHPDKLKVMRKGDKREVTGVVVNEKLSIDRETLRKFRALLHQISVSGIEGKQWGKGNIVSSIEGYINYVQMVKPEAGQQLKTKWQVLLGRTDIKSQTRASSTGQIVIPPVVPPAQDSGETGEKPWWDVM

SEQ ID NO: 5987 - protein, 501 aa, Chitinophaga sp.
  source 1..501: note = Related to NZ_CP048113.1
MAEGLTRQQLYDRIRSSTKEEVILEEMTRLGFWTRNQAMPAPSEVLIRRESELRRELNKLVEEQQRYRNKEKILSDLRQQRMAAAKARRAETKLRKEEKRKERAAQWAIEKEKNIVYLGEDVSAGLNKVVSDEEKLKAAGLPVYHDGLALAAAMGITIGKLRFLSFNRKVANVSHYKRFYIPKKSGGKRLISAPMPQLKAAQYWILENILYKVKLSESAHGFVPGRSIVTNATHHVGQDIVINIDLKDFFPTIAYKRVKGLFSKFGYSEQVATILALLCTEPEVEQVALDGREYHVATTERHLPQGAPCSPAITNIICYKLDRRFEGLARRFGYAYTRYADDMTFSAKEAAGDNAGKLIWGVKQIVKEEGFVIHPDKLKVMRKGDKREVTGVVVNEKLSIDRETLRKFRALLHQISVSGLEGKQWGKGSLVNSIEGYINYVQMVKPEAGQQLKAKWQLLLGREDVKTQVRAAATAAPILIPPVAPAQEEPKDGEKPWWDVM

SEQ ID NO: 5988 - protein, 502 aa, Chitinophaga ginsengisoli
  source 1..502: note = Related to NZ_PYGK01000009.1
MAEGLTRQQLYDRIRASTRDEVILEEMTRLGFWKKNTLMPSPSEVLIHREADLTRELNKLMEEKRRYQNREKMLIEMRKQRMAAAKAKRAETKLRNEEKRKEKAAQWAEQKEKQIVYLGEDVSQGLNKTVSDTERLTATGLPVFHDGVALAAAMGISIGKLRFLAFNRKVGHITHYKRFYIPKKSGGKRLISAPMPQLKATQHWILENILYKVPNSDAAHGFVPGRSIVTNAVHHVAQDIVINIDLRDFFPTIEYKRVKGMFCKLGYSEQVATILALLCTEPEVDQVALDGKDYYVANTNRHLPQGAPCSPAITNIICFRLDRRFEGLARRFNYTYTRYADDMTFSAKEPAADDAGKLIWGVKQVVKEEGFVIHPDKLKVMRKGDKREVTGIVVNDKLSLDRETLRKFRALLHQISVSGLTGKQWGKGNIVSSVEGYINYVLMVKPEAGKQLKDKWRLLLNRDDIKTQVRAAATQSDAPPAPSSSNENNTTNDGEKPWWDIL

SEQ ID NO: 5989 - protein, 495 aa, Chitinophaga tropicalis
  source 1..495: note = Related to WRXN01000012.1
MMTGLTRQELYDRIRSSTRDEVILEEMKRLGFWARSTGAPSLSETLIRKESELRRELNKLMEEKARYRNKEKILNDLRKKRMMDAKAKRAETKQRNEEKRREKAAAWAAEKERSVVYLGEDVSAGLNKTFSDITRLSAAGLPILHDGVGLAAAMGITLGKLRFLSYNRKVEEVSHYKRFYLPKKSGGRRLISAPMPQLKAAQYWVLQNILYKIPGSQSAHGFIPGRSIVTNAQQHVGKDVVINIDLRDFFPTIVYKRVKGMFCKLGYSEQIATILALLCTEPERDQVMLDGKEYHVANTNRHLPQGAPCSPAITNIICYRLDKRFEGLAKKFNYTYTRYADDMTFSTSGETAGKAGQLLWAVKKVVKEEGFTIHPDKLKVMRKGDKKEVTGIVVNEKMSLDRTTLRKFRALLHQVSVSGFAGKKWGNGNIVSSMEGYINYVQMVKPETGKQLKDKFRLLLNRKDIKADLPEAPKEVLPDTSLPDQNNDKPWWDVV

SEQ ID NO: 5990 - protein, 509 aa, Chitinophaga silvisoli
  source 1..509: note = Related to NZ_QTJV01000007.1
MSAGLTRQELYDKIRASSKEEVILEEMVRLGFWAKNESVPSVPETFIRKEGELRRELNELLSEQARYRNKQQVLTDMRKARMAAAKAKRAETKKRNEEKRLQRAAAWKEEKEKTIVYLGEDVSAGLNKTTSDAEQLQKFGLPLLNDGAQLAAAMGISLGKLRFLAFNRKVGTVSHYKRFYLPKKSGGRRLISAPMPQLKAAQYWVLENILYKVPNSESAHGFVPGKSIVTNASNHVGQEVVINIDLKDFFPTIEYKRVKGLFIKLGYSEQIATILGLLCTEPEVDQVALDGKEYFVANTPRHLPQGAPGSPAITNLICYGLDKRFEGLAKRFGYTYSRYADDMTFSTKGEAADKIGQLLWSVKQVVKEEGFHLHPDKLKVMRKGDKREVTGIVVNDKLSLDRETLRKFRALLHQIDKTGLANKQWGNGNIISSVEGFANYVAMVKPEAGRQLKDKIKVLFNREDIKAQARAMMSGAAVNGAGSTGSIGGAAAKDEHIPKKEDGNWWDVV

SEQ ID NO: 5991 - protein, 468 aa, Flexibacter sp.
  source 1..468: note = Related to MTKN01000036.1
MLFNYRYSGSTQVYSNATSAGISFSPDTRREPTFFNEYRNKQQVLTDMRKARMAAAKAKRAETKKRNEEKRQQRAAVWAEEKSKSIVYLGEDVSAGLNKTSSNTELLQRFGLPLLHDAVQLSAAMGITLGKLRFLAFDRKVGTISHYKRFYLPKKSGGRRLISAPMPQLKAAQYWVLENILYKVPNSEAAHGFVPGKSIVTNATNHVGQDVVINIDLKDFFPTIEYKRVKGLFIKLGYSEQLATILCLLCTEPEVDQVALDGQEYFVANTPRHLPQGAPSSPAITNLICYGLDKRFEGLAKKFGYTYSRYADDMTFSTKGEPADKIGQLLWSVKQVVKEEGFHLHPDKLKVMRKGGKREVTGIVVNEKLSLDRDTLRKFRALLHQISVSGLANKKWGNGNIISSIEGFANYVAMVKPETGRLLKDKIRLLLNRDDIKSQARTLMTGAPAPASEKNPPQKGDDNWWNVV

SEQ ID NO: 5992 - protein, 500 aa, Emticicia agri
  source 1..500: note = Related to NZ_SEWF01000012.1
MTERLTRQEIYDRIRATSRDEFILSEMKKLGFWPSDEEKPSVSEQLIKHEGELSRELQELSQKQRKFDNQQAMLAEMRKARMAAAKKKRVETKEKNEQKRKDKAEQWKQQKQNEIVYLGEDVSHELNNTEADTAKLAQFGLPHFADALALATAMNISLGKLRFLAYNRKVSTTTHYKRFYLAKKTGGKRLISAPMPKLKEAQYWILDNILYKLKNTDSAHGFVPQRSILTNASNHIGQDVVINIDLKDFFPSIDYKRIKGLFAALGYSKQIASILALVCAEPDVDMIDIDKKTYYVAHTERKLPQGAPTSPAITNLICYKLDHRFEGIARKFNFNYSRYADDITFSAKGDGKKLVGQVLWAIRQIIESEGFQIHPDKLAVMRKGRQQEVTGIVVNDKPGIDRKELRRFRALLHQIELNGTEGKSWRNGVDLENSMRGYASFVGMVKPEQGIQFKAQLDQIFGVRAKVKPVPAPEIKIVPPTIQDTPPKPDNDEKPWWEII

SEQ ID NO: 5993 - protein, 500 aa, Emticicia sp.
  source 1..500: note = Related to QVMT01000016.1
MSERLTRQEIYDRIRATSRDEFILSEMIKLGFWQSDEDQPKVTEQLIRREGELHRELNELTQKQRRYDNQQAMLADMRKARMEAAKKRRIETKEKNEQKRKDKAEQWKKTQQSTIVYLGEAVSGNLNDTLADTAKLTQFGLPHFEDALGLANAMNMSLGKLRFLAYNRKVSTTTHYKRFYLAKKSGGKRLISAPMPKLKEAQYWILENILYKLKSTDSAHGFVPQRSILTNARNHIGQDVVINVDLKDFFPSIDYKRIKGLFAKLGYSQQIASVLALICSEPDVDIVDIDRKTYYVASTERKLPQGAPTSPAITNLICYKLDHRFEGIAQKFNFRYSRYADDITFSAKGEGAKLAGQVLWAVRQVIEDEGFQIHPDKLAVMRKGSQHAVTGIVVNEKPGIDRKELHRFRALLHQIELTGTEGKSWRNGVNLENSMRGYANFVTMVKPEQGNKFKAQLDRIFGIRTKSQSLPVVETSIIPPAIQATPPKPENNEKPWWEII

SEQ ID NO: 5994 - protein, 503 aa, Arcicella aurantiaca
  source 1..503: note = Related to NZ_QGGO01000002.1
MSERLSRQQLYDRIRETSKDEYILSEMKKLGFWKSNETEPQISEQLIQREGDLHRELNDLSQQQRRYDNQQAMIADMRKSRMEASKKKQLETKQRNQQKRIEKAEKWKTQQQNSIVYLGEEVSGGLNSTQTDIAKLNSFGLPHFTDVLALAQAMKLTLGRLRFLAYNRKVSTVSHYKRFYLPKKSGGKRLISAPMPMLKDAQYWILEHILYKVSPTDLAHGFVPNRSIMTNAQKHIGQDVVINLDLKDFFPTIDYKRVKGLFNKFGYSEQIATILALICSEPDVELLEIDGKQYYTAKSERKLPQGAPTSPAITNLICYRLDCRFEGIAKKFGFQYSRYADDLTFSAKGEGKKLVGQLLWSVKQVITNEGFTLHPDKIAVMRKGSQQKVTGIVVNDKAGIDHKELHKFRALIHQIGKTGIAGKTWRQGVNLENSMRGYAEFVSMVKPEQGQKFKIALDKVFGVKVKSDKQDIPQNPIIENKLPEEKPKNINKNEDGKSWWEVI

SEQ ID NO: 5995 - protein, 497 aa, Runella zeae
  source 1..497: note = Related to NZ_AUIF01000010.1
MSERLTRQQIYDRIRQTSRDEFILSEMKRLGFWQTDANQPKLSEALIDKERELYQELNELSQKQRRYANKQAMLAEMRKSRLEASKKRRQETKAKNEQRRQQKAEAWKVHQQYSIGYLGEGVSGGLNQTQSNPQQLALLGLPDFRSPFQLAQAMGVSLGHLRFLAFNRTVSKISHYKRFYLPKKSGGKRLISAPMPLLKKAQYWILENILYKIPSSEAAHGFVPKKSILSNAQNHTGQDIVVNIDLKDFFPTITYHRVKGLYHKLGYSEQIATILALICTEPEVDIVKIDSQIYYTAKSIRKLPQGAPTSPAITNLICHRLDLRFQGLAQKLGFNYSRYADDLSFSGASEGSKLVGQLLWSIHKIVKDEGFVVHPEKIAVMRKGTQQRVTGIIVNEKVGIDRQMLRKFRALIHHIEQSGVQGKTWNNSKNLEASMRGYVNFVSMIKPEQGAKFKMKLDAIFGQKEKTSTSRPIKDIPPPSPPFQDSNDDDKAWWEVV

SEQ ID NO: 5996 - protein, 505 aa, Niastella sp.
  source 1..505: note = Related to JAGIBF010000018.1
MADKQPTRQQLYDRIRESTKDAVVLEEMKRLGFWPKGEQSPSVPELLINQEAELNKEFNQLFNQQRRYQNKEAVLQEMRMKRMADAKAKREANKKKRELQRLEKAEAWKKRKTTEIIYLGEDVSVGLNNIEANVAALQKYQLPAFANETELAQAMGITLPDLRFLAFSRKVSNISHYRKFYLPKKSGGKRLISAPMPRLKKTQYWVLENILNKVAVHTAVHGFTLNRSILSNALPHVGKKVVLNIDVKDFFPSIHYKRVKGLLQQLGYSEKIATILSLLCTEAVTEEVEIDGKNYFVQKGNRVLPQGAPTSPAITNILCYKLDLRLQGLAAKHQCQYTRYADDVTFSWNSSDINAQQMVWRIKKILSDEGFTVHPDKIRVMHQGARQEVTGIVVNEKPGIDRNKLRKFRALLHQLQTKDAAVLLPGAESPANVVIGYANFVRQVKPALGAFFAKQIDQLFQTGRLQYVVKETPPAGTNNDTPPAKPGNDKEPPKGDDDKPWWNVV

SEQ ID NO: 5997 - protein, 502 aa, Paraflavitalea devenefica
  source 1..502: note = Related to NZ_JAARML010000006.1
MFDSKPTRQQLYDRIRESSKDAVVLEEMKRLGFWSKNDQSPTIPELLIKQEVELNKEFQQLFNRHRQYQNKEAVLKEMRLKRMAEAKAKREANKKKREQQRFEKAEAWRKQKETEIIYLGEEVSIGLNHTESNVAALQKHQLPVFVNENELALAMGVTLKELRFLAFSRKVSTVSHYRKFYLPKKSGGKRLISAPMPRLKKTQYWILENILNKVAVHQAVHGFTLNRSILSNAQLHVGKKVVLNIDVKDFFPSIHFKRVKGLLQQLGYAEKIATILALLCTEAVTEAVEIDGKDYFVQKGNRVLPQGAPTSPAITNILCYKLDKRLQGLATKHQCHYTRYADDVTFSWNSNDVNAQQMVWRIKNILQDEGFTVHPDKVRIMHTGTRQEVTGIVVNEKLGIDRNKLRRFRALLHQLQTKDAAELMPGVESPANVVIGYANFVKMVKPAQGAAFSKQIDQLFQSGRLQYLVKETPPSPGNNGVPPTPPSQQAGKDDDKPWWNVV

SEQ ID NO: 5998 - protein, 505 aa, Paraflavitalea soli
  source 1..505: note = Related to NZ_CP032157.1
MADNKLTRQQLYDRIRESSKDAVVLEEMKRLGFWPKGDESPTIPELLINKEAALNKEFRELFEKHRQYQNKEAVLKEMRLKRMAAAKAKREETKKKREQQRFEKAAAWKKRKETEILYLGEDVSIGLNNMAGNADALHKHHLPAFANENELAAAMGIELKALRFLAFSRKVSTVSHYRKFYLPKKSGGKRLISAPMPRLKKVQYWILENILNKVAVHQAVHGFTLNRSIISNAQLHVGKKVVLNLDVKDFFPSIHFKRVKGLLQQLGYSEKIATILSLLCTEAVTEEVALDGGNYFVQKGNRVLPQGAPTSPAITNILCFKLDKRLQGLATRHQCHYTRYADDVTFSWNSTDINPQQMVWRIKKILADEGFAVHPDKIRIMHQGARQEVTGIIVNEKLGIDRNKLRQFRALLHQLQTKDASELMPGQVSPANAVIGYANFVKMVKPAQGAAFAKAIDKLFQTGRLQYLVKDAPPVLNGNPAPSPSPTSNPPANKGDDKPWWNVTG

SEQ ID NO: 5999 - protein, 502 aa, Niastella vici
  source 1..502: note = Related to NZ_LVYD01000013.1
MADNRNIRQELYDRIRESSKDEVVLEEMKRMGFWAKDENGPTIPELLIKKEVELNRELNKLYEEKRKYQNREAVLKEMRLKRMAESRLKREENKKKKELAHLERAEAWKKKKDTAIIYLGEGVSVGLNNTDNNLAALQKHNLPVFNNENELANAIGIPLKELRFLSFNRKVSTVSHYRKFYIPKKSGGKRLISAPMPRLKQVQYWLLENIFNKIAVHPAVHGFALHRSIISNAQPHVGKSVVVNIDVKDFFPSIHYKRVKGLLQQLGFAEKIAVIMALLCTEAVTEEVEIDGRNYFVQKGNRVLPQGAPTSPAITNILCYKLDKRLQGLATQTQCSFTRYADDITFSFNNETTNAQQLVWRIKKVLADEGFTVHPDKVRIMRKGACQEVTGVVVNEKLGISRKKLRQFRAVLHQLKTKDAAELKWGHGNLASAVTGYANFVKMIKPVQGAALQNTIVTLLQTNRLQYPLAVTSSKKNIQTPPAQNNDPSAKKDDDKPWWNVV

SEQ ID NO: 6000 - protein, 501 aa, Niastella populi
  source 1..501: note = Related to NZ_LWBP01000254.1
MAHKNIRQELYDRIRESSKDEVVLEEMKRMGFWSKNEGGPAVPELLIKKESELNKELNKLYEEKRRYQNREAVLKEMRQKRMAEARLKREENKKKKEQERFNKAEAWKEQKKKEIIYLGEGVSVGLNNIDNNLAALQKHNLPVFNNENDLANAIGIPLKELRFLSYNRSVSTVSHYRKFYIPKKSGGKRLISAPMPRLKQVQYWILENILNKVAVHAAVHGFALQRSIISNAQPHVGKEVVLNVDVKDFFPSIHYKRVKGLLQHLGYSEKIAVILALLCTEAVTEEVAIDGRNYFVQKGNRVLPQGAPTSPAITNILCYQLDKRLQGLANKGQCSFTRYADDITFSFNDPGTNAQQLVWRIKKVLADEGFTVHPEKIRIMRKGTHQEVTGVVVNEKLGLNRKQLRRFRAVLHQLKTKDAAELKWGNDNLASAVTGYANFVKMVKPAQGAALQNRIAALLQTNRLQYASTVTGAPKKKDPTPPANNSADPKKEDDKPWWNVV

SEQ ID NO: 6001 - protein, 489 aa, Terrimonas sp.
  source 1..489: note = Related to JAKLTR010000008.1
MFDNQQTRQQLYDRIRESSRDEVILEEMKRMGFWGKKDAEPSLPEQLIKQETALSKELNALVAQQRKFQDKEKMLKEMRIKRMAEAKQKRAENKKKREQQRFEKAEAWRKRRGGEILFLGEMVSTGLNNTTNNTESLSKFGLPVFHNENDLAIAMGISLSALRFLAFSRKVSTVSHYRKFYLAKKSGGKRLISAPMPKLKGVQYWILQNILQRVNVHPSVHGFIANHSILTNAQPHIGKEVVLNIDVKDFFPSIHFKRVKGMLQQLGYAEKIATILALLCTEAVTEEVAIDGKTYFVQKGNRVLPQGAPTSPAITTILCYKLDKRLQGLADRHQCNYTRYADDVTFSTSRTELNMQQMVWRIKKILADEGFTVHPDKISIMRKGAQQQVTGIVVNQKLSVNREKRRKLRALLHNLETKPGFVPVWGQNSSAAAILGYAHFVKMVDAEKGEKFKDKVRSLIAQGKLSLTQSNNDRSGGNAGSDKPWWNVT

SEQ ID NO: 6002 - protein, 487 aa, Citrobacter freundii
  source 1..487: note = Related to QFQQ01000068.1
MSDNQKTRQELYDRIRESSRAEVTLEEMKRLGFWSKNDKEPTLPEQLIKQEAALVKELNALNAQKQRFQNKEAMLKEMRIKRMAEAKKKREENKKKREQQRFERAEAWRKRKTSEIIYLGELVSTGLNDVTNDTAKLSTYNLPVFNNENDLAAAMGITLSQLKFLAFSRKVSTVSHYRKFYLSKKSGGKRLISAPMPRLKTAQYWILQNILQRVPAHPAVHGFIQQHSILTNAAPHVGKEVVLNIDVKDFFPSIHFKRVKGLLQQLGYAEKFAAILALLCTEAVTEEIFMDGKNYFVQKGNRVLPQGAPTSPAITTLLCYKLDKRLQGLADKHQCAYTRYADDITFSTSNAQFNAQQMVWRIKKVLADEGFEVHPDKIAIMRKSTRQHVTGIVVNKKIAVSRDKRRKFRALLHNLETKPGFVPTWSNNSSGFAILGYANFMKMVDPVKASNALQKLQSLIASGKLPLIAAVKPAREQGDDKPWWNVT

SEQ ID NO: 6003 - protein, 547 aa, unidentified
  source 1..547: note = Related to JAFLBL010000017.1; note = Chitinophagales bacterium
MAYTYQCTFPGAGTWCHNGTLVRVCLALINLVRGRHEGAATLCQNMNFFSPIMADTHLTRQQIYDRIRESSKDEYILEEMKRLGFWKSKESSSIVPELMIKKETGLQQELNRLFEQKRKYQNKEAVLKEMRQKRMEEAKRKREETKKKREQQRADKAAAWQKKKETSILYAGENVSAGMNSTETKPDILQRYGLPLFTDELSLAAGLGITINELRFLSFSRIVSTVSHYRKFYLPKKSGGKRLIAAPMQRLKEAQYHVLEQVLNKVVLHDAANGFVKKRSIVTNAQQHVGKTLLLNLDIKDFFPTVDYKRVKGVFRKLGYAEKISTLLALICTEAPTDEVSIDGKNYFVQKGNRVLPQGAPTSPALTNILFYKCDKRLQGLAAKTGCTYTRYADDISFSTNSNTLNPQQLIWRIKRILTDEGFTVHPEKIRVMRQSSKQEVTGVVVNKKLNIDRKKMRQFRALIHTLKTKGPDAIHWGQSHPAYAIPGYLQFITMVNPEKGALLKNALTPLLDKIPKPVRITQSPQPGKPDTSGEAPKEGGDWWNVV

SEQ ID NO: 6004 - protein, 507 aa, Filimonas lacunae
  source 1..507: note = Related to AP017422.1
MADNRLTRQQIYDRIRSSSKESYILSEMKRLGFWSVKDGASAVSEALINKEASLEKELNQLLAQNRKFNNREAVLKEMRLKRMAEARQKREENKKKREQKRYEKAEAWRARKQQEILYLGEGVSAGLHYTDTNEALLCEKELPVITTEKQLAEYMGIALQELHFLAFSRRVSTVNHYRKFYLPKKSGGKRLIAAPMPRLKNSQYWILNNILARIPVHAAANGFVADKSIVTNARPHLDKEVVINIDVKDFFPSIHFARVKGVFVKLGYSEKIATVLSLLCTEPVTQEISIDGRNYFVQKGQRVLPQGAPGSPVITNILCHHLDQRMQGVAAKHQYTYTRYADDITFSGSENTLHAQALLWRIKKIVQEEGFTVHPDKVHVMRKGARQEVTGVVVNKQLGIQREKLRQFRALLHNIKVKGWENAQWGNGNIISSILGYINYIKMIDPAKAAVFQQQVNVLFQQPGFSAIQQQVQPQASAAATTHDPTTNPQPAPGKGTEGDENWWKVV

SEQ ID NO: 6005 - protein, 504 aa, Filimonas zeae
  source 1..504: note = Related to NZ_BMIB01000004.1
MADNRLTRQQIYDRIRSSSKEEYVRSEMLRLGFWTAKSGNTQITEVLLQQEATLTKELNQLMQERTRYRNKEAVLKEMRMKRMAEARRKREETKQKRELQRLEKAEAWRKRKQDEIVYLGETVSAGLQPGQSNEALLLQRGLPVFHTEKELAAAAGVDLRELRFLCYHRKVSAVNHYRKFLLPKKSGGHRLISAPMPRIKKVQYWVLHQILNKVPLHAAANGFATGRSIVTNAQPHVGRQVVINADVKDFFPSIHFKRVKGVFEKLGYNERIATILALLCTEAVTQEVVIDGKTYFVQKGCRVLPQGAPGSPAITNILCYQLDKRLQGVAGKHQYQYTRYADDISFSGSETTLAAEAMVWRIRKILQEEGFTVHPDKVRIMRKGARQEVTGIVVNKQPGIPREKLRRFRALLHRIKTKGWEGVQWGEGNIVSAMLGYVNFIKMVDPVKAARFEKEIALLGQLPGFTEAQKQVPLTPAPEALQKPSDTNPPSAPNTGEGDWWKVV

SEQ ID NO: 6006 - protein, 507 aa, unidentified
  source 1..507: note = Related to NZ_VVIP01000043.1; note = Proposed Foetidibacter luteolus
MADNRLTRQQIYDRIRETSRDDFILEEMKRLGFWGRGQDDPSVSELLIKKEVELGKELDKLLAEQRKYDNKQAVLKEMRMKRMAEAKQKRADNKKKREEQRFNKAEAWRQKKETEIFYLGQGVSGGLNHTENNVVLLQQKGLPVFYDEQELASAAGIELKELKFLSFSRSVSTVNHYRKFYLPKKSGGKRLISAPMPRLKKLQYWILHNVLQKVTLHTAVHGFTGKRSIVTNAQQHIAKDVVINADVKDFFPSIHIKRVKGIFKALGYSEKTATILALVCTEPVTEEVMIDGKNYFIQKGERVLPQGAPTSPALTNIICYHLDKRLQGVASKHQYTYTRYADDITFSATGQQLKEEALLWRVKKILKEEGFNIHPDKIRIMHKGTRQEVTGVVVNKKLSLSRQKLRNFRAMLHNLKTKGYADIKTGNKDIAAVILGYLNYIKMIDPVKALQFQQQVNQLFQQPSFHQLLKEQAAARAAVKPVEKSAMPSPESTTPQQGNGNWWNVTE

SEQ ID NO: 6007 - protein, 508 aa, unidentified
  source 1..508: note = Related to JAHBTJ010000009.1; note = Chitinophagaceae bacterium
MADNRLTRQQIYDRIRESSKEEYILEDMKRLGFWQRNEEGPSVPELLIKRESTLNKELNSLLAEKRKYQNKEAVLKEMRMKRMAEAKQKREENKKKREQQRYEKAQAWRAKRETEIFFLGEGVSAGLHYTESNLEELQKKALPVFENEMQLANAMGIALKELSFLSYSRRVSAVSHYQKFYLPKKSSGKRLISAPMPRLKKAQHWILQHILYKVPVHAQANGFVPGKSIVSNATPHIGKNVVVNADVKDFFPSITFKRVKALFGKLGYADKIATILSLLCTESVTEEVMLDGKKYFVQKGERVLPQGAPTSPAVTNILCFRLDKRLSGVAKKFGCGYTRYADDITFSGTLNNSDASKIVWHIKKILSEEGLTIHPDKIRVMQKSERQEVTGVVVNRQLSVSREKLRNFRALLHQLKKNGHENAKWSEGSLSNAIAGYASFIRMVNPAKAEKFIKEISDIRQSQTWQHLLLSEAAAIAKKLNQQTLPSTPAPPPANNNRKEDGEWYNVV

SEQ ID NO: 6008 - protein, 402 aa, Flavihumibacter sp.
  source 1..402: note = Related to LUKG01000006.1
MADNHLTRQQIYDRIRESSRDEYILEEMKRLGFWNKNESSPTLPELLIKKESNLHKELNALLAEKQKFQNREALLKEMRLKRMEATKLKREDNKKKKEKERFEKTTAWRKKQETEIFYLGEEVSAGLHYAENNHPLLNQKALPVFENEQQLALAMNCTVKELAFLAFSRRVSELTHYQKFYLPKKSGGKRLISAPMPRLKKAQHWILQTILYKIPLHTSANGFVPTKSIVSNAWPHTGKQVVINMDIKDFFPSISFRRVRALFKNLGYSDKIATILALLCTEAPTEQVELDGKKYFVQKGERVLPQGAPSSPAITNILCYRLDKRLVGVANKFNGTYTRYADDITISGSFAHNTATRIVWQIKKILSEEGFILHPEKIRIMQQSQRQEVTGIVVNQEMSVNR

SEQ ID NO: 6009 - protein, 480 aa, Flavobacterium sp.
  source 1..480: note = Related to SEBO01000011.1
MQRLGFWPKNDNAPTLPEQLIKKEGELQRELSTLLQEKRKFEDKEAMLAQMRKKRMEEAKKKREQTKQKREAKRIEKAEKWKASKEKEIIYLGEKVSGGLNAKESDVPALDSKGLPTFTEETELAQAMGITISQLRFFCYHRSVATTTHYKRFGIKKKSGGMRIISAPMPRLKAAQYWVFHNVLNKLRHHEAAHGFVRERSILSNAKEHLNKEVVVNIDLKDFFPSIHFKRVKGLFHKLGYSEKIATIFSLLCTEPDVEEVELDAKTYFVAKGKRALPQGAPTSPAITNLLCYKLDCRLHGVAKAMGLSYTRYADDMTFSGDGEAAAKVQQLLWRLHRIIKDEGFTIHPKKIHVMRKGARQEVTGIVVNKQPGINRQTLHRFRALLNKIEKKGIEGKRWRGGNVIAEIAGYAEFVSMVKPAQGVKFKDQVRRILQQPDVIEHLQKAPLQAVHASHASKPIKDTHSNSDRNESSKPWWDVL

SEQ ID NO: 6010 - protein, 521 aa, Pelagicoccus enzymogenes
  source 1..521: note = Related to NZ_JACYFG010000060.1
MNQSQPATRQELYERIRESSKNEVIRSEMERLGFWNPNAPEPKVADDWLKEYDRLTKELRELRGKQERMNNRDTLLADIRKKRMAESRERQKETKLRRERERIEKAERWKKLKEEDILYLGEDVSTQLNKKEPRPDLLAERQLPNFVNAKALAASMEVPIGELKFLAYNRKVSKVSHYKRFFMKKKSGGQRLISAPMPRLKRLQYWILHSILYKIPVHECVHGFVPDRSIKTNAAPHVGQDVVVNIDLKDFFPTVSQSRVQGLFNALGYSNQISTIFSLLCTEPEVQQAKLDGESWFIHQGERHLPQGAPTSPAITNLICYRLDCRIKGATDKLGFNYTRYADDITLSASGEAVSDICRLIWQVRKIIEEEGFNFHPDKFRVMRKGRRQEVTGLVVNETLSINRNTLRRFRALLHQIEKSGIEGKSWQGNSVNLLNSIQGYADFVAMVRPEKGQLLQARVKAIRMVQKHKRRAKPEAKPKIPAPLVPINKANELSHAGSDQTPKSSSGPKPFWKKLLFWLD

SEQ ID NO: 6011 - protein, 515 aa, unidentified
  source 1..515: note = Related to JAGROY010000010.1; note = Verrucomicrobiae bacterium
MADPDPSQPFRPLSRQEIYDAIKATSKQEFILDDMIRLGFWMPEQGNPAVPDAIIRRRGELNRELNELLHKQRRFENREAALAAHRKKRMAESKVRQKETKERNARLRQEKAERWRERKQREILYLGEGVSGGLSELQSVPERLSRHQLPDFANAETLASAMGITLGELSFLAFHREVSKTTHYRRFAIPKKSGGERIISAPMPRLKAAQTWILENLLQKVSVHDAAHGFVPDRSIITNASNHIGRDIVINVDLQNFFPSVTQARTKGLFKSLGYSEHIATILSLLCTEPEMDTLELDGQIWHVAMGGRFLPQGSPASPAITNILCRKFDARLSGMARKLGFTYTRYADDVTFSAGGETVEKYKTLLWRAKAIIHEEGFIVHPDKLRIMRLGSRQEVTGLIVNKAIGIPREDLRRFRAVLRQVEQDGPAGKRWHGSGHNILAVLGGYVNFIHMVTPEKAAPLRERVLALQSKHGWQREIRHRPRALAPEAGNPAARSADGGGFFKSILRKLGFGK

SEQ ID NO: 6012 - protein, 500 aa, Flavivirga eckloniae
  source 1..500: note = Related to NZ_CP025791.1
MRNSTERRQEIYDKIKASSKQEYILSEMRRLGFWNEEDLDFEAVNLFFKQESELSAKLQKLLREKRVIEDPEAFLAKKHQERKIASKASQKETKERREKTRLEKAEKWRVSKAKDIVYLGENYSHQLNDKTSDASRLKAQSLPVMHHAEDLALAMKISIGELRFLSYSRKNSKISHYKRFQVAKKTGGYRLISAPMPKLKKTQHWILENILNNVPVHENAHGCVIGKSIKTNAIPHVGKDVVINQDFKNFFPSVTYNRIKGVFKSLGYSNQVATILSLLCSEPKILDISLLGEDYYAQQGERFLPQGSPCSPAITNILCKKLDHRLSGLAKKYGFEYTRYVDDITFSSNNNNFKKITPLLKYSRYIVNSENFKLHPEKLRVMKRNAKQEVTGVVVNEKANISKKSLKRFRTLLFQIEKDGIEGKFWNKSGNVLAQIDGYANFIYQIDQDKGVVYKKRVNAILETYKYKENHRSKYISNTNKGSASSFGRFVKKIASLFRK

SEQ ID NO: 6013 - protein, 506 aa, Algibacter lectus
  source 1..506: note = Related to SORL01000014.1
MRNNSTERRQEIYDKIKASSKQEYILSEMKRLGFWNEGELDFKAVNTFFNEERELSQKLQKLLKEKKVIEDPEAFLAKKHQERKLASKQSQKATKERREKERLEKTERWRVSKEKDIIYLGENYSHQLNEQISNTERLKSKNLPVLHTAEDLAKAMNISIGELRFLSFSRKNSKISHYKRFQMAKKSGGYRLISAPMPKLKKAQHWVLESVLNIVSVHSNAHGCVIGRSIKTNAEPHVGKAVVINQDFKNFFPSVTYARIKGVFLALGYSNQVATIFSLLCSEPKILDVSLLGEDYYAQRGERFLPQGAPTSPAITNILCEKLDFRLTGLANKYGFTYTRYVDDITFSGTHDSFDKITPLLKYSRYVVNSENFNLHPEKLRIMKRNAKQEVTGVVVNEKTNIPKGDLKRFRALLFQIEKDGIEGKYWTKGGNVLAQIDGYANYIFQIEPEKGVLYKKRVNVILEKYNYKEKHKATYVPKVLDKREKANKPDSVGGIFNKIMSFFRK

SEQ ID NO: 6014 - protein, 500 aa, Lacinutrix mariniflava
  source 1..500: note = Related to NZ_LIQG01000027.1
MKNSTERRQEIYDKIKASSKQEYILSEMKRLGFWNQEELDFESVNAFFKEETELSKKLQGLLKEKRVIEDPEAFLAKKHQERKLASKQSQKETKERREKERLEKAARWKTSKEKDIVYLGSGYSNNLNKKESDVTRLKTQQLPVLNTAEDLASALGITVGELRFLSFTRKNSKISHYKRFQMPKKSGGYRLISAPMPKLKKAQHWILEHILNNVKVHDNAHGCVIGKSIKTNAVPHIGKAVVVNQDFKNFFPSVTYNRIKGVFMSLGYSNQVATILALLCSEPKILDVSLLGEDYYAQRGERFLPQGSPCSPAITNVLCRKLDFRLSGLAKKYDFDYTRYVDDITFSGDKKSLPKITALLKYSGKIVRDENFMLHPEKLRVMKRNAKQEVTGVVVNEKANIAKTSLKRFRALLHLIEKEGIEGKYWNKGGNVLAQIDGYANFIFQIDEVKGAIYKERVNAILVKYNYKEEHIKQYAPNAKKGTSGLLSGFIKKVSSFFKK

SEQ ID NO: 6015 - protein, 500 aa, Seonamhaeicola marinus
  source 1..500: note = Related to NZ_VSDQ01000163.1
MRNSTERRQEIYDKIKGSSKQEYILSEMKRLGFWNEGDVDFEAANAYFKEEAELSKKLQELLKEKRIVGDPDAFIARKHKERKLASKQSQKETKERREKERLEKAKRWKAIKEKDIIYLGTSYSNNLNKKISNVEKLRSQNLPVLQTALDLASAMNITIGELRFLAFSRKNSKTNHYKRFKVPKKTGGYRLISAPMPKLKRAQHWILEHILNHVVIHKNAHGGVLKKSIKSNAIPHVEKAVVINQDFKNFFPTVTFNRIKGVFVSFGYSSQVSTILALLCSEPKILDVELLGEKYFAQRGERFLPQGSPCSPAITNILCKKLDYRLTGLAKKYGFDYTRYVDDITFSGDKHSLSKITPLLKYSRFIVNEENFKLHPEKLRVMKRNSKQEVTGVVVNEKPNISKKSLKRFKALLFQIEKDGIEGKFWNKGGNVLAQIDGYANFIYQIDSEKGMLYKKRVKAILDSYNYKENHRKAYVLNSQKTGISVGRLFKKITSFFKKS

SEQ ID NO: 6016 - protein, 502 aa, Crocinitomix sp.
  source 1..502: note = Related to WTCE01000070.1
MTDSKERRQAIYDKIKESSKNEFILSEMKRLGFWSDENVDFGAVTKFFKDEGELSKKIQEKLRDKNILDNPEVFIAQKHKERKLASKQRQKETKEKREKVRQEKAAKWQESKKSDIIYLGDQYSHQLNQKLSLVERLKSQGLPVIQTAAELAKNMGVSVGELRFLTYSRKNSKISHYKRFKVPKKSGGYRLISAPMPRLKQAQTWILEEVLNKVKVHESAHGCVTGKSIKTNAEPHVAKAVVINQDVKNFFPSITYNRIKGVFLSLGYSHQVAVIFALLCSEPKIVDIDLLGEDYFAQKGERFLPQGSPCSPAITNILCRRLDFRLTGLAKKYNLSYTRYVDDLTFSSTEYPDHSVVTKVLKYSRLIVKDENFRLHPDKLRVMKKGARQEVTGVVVNEKPNVSKKTLKRFRALLFQIEKDGIEGKQWNRPGNVLAQIDGFANFIYQINPEKGARYKAQVAVILVTHNYKELHKKAFPPKSNPTNETPQNRLWSRVKSFFKKN

SEQ ID NO: 6017 - protein, 503 aa, unidentified
  source 1..503: note = Related to NVRM01000058.1; note = Flavobacteriaceae bacterium
MKNSQERRQEIYDKIKESSKQEYILSEMKRLGFWDDQQVDFKEAEAFFKLESGLSKELQVLIKEKNLIDDPAAFLAKKHQKRKLKSKQKQRETKEKRELLRLEKAEKWQLSKKEDIRYLGDGFSHQLNDQTSQVDRLKSLDLPLLNNAKELAQAMDIPIGELRFLSFSRKNARLSHYKRFKMKKKSGGFRLISAPMPRLKNAQYWILEEILNKIAVHPLAHGCVIGKSIKTNAEPHLQKAVVINQDFKNFFPSITHNRIKGIFKSFGYSEQLATIFSLLCSEPKIVEVSMLGEDYFAQRGTRFLPQGAPTSPAITNIICKQLDLRLHGLAKHYGFDYTRYVDDITFSGNQEQLPKIAAILKYSKKIVEDENFTLHPEKLRIMKRSDRQEVTGVVVNEKTNIPKKNLKRFRALLFQIEKDGIQGKVWNKKGNILAQIDGYANFIYQIDTEKGIAYKKRVGLILKAHGYKEAHQSKFGRRSKDSSTSWFTSLVSKVKDIFGSGGK

SEQ ID NO: 6018 - protein, 483 aa, Tenacibaculum dicentrarchi
  source 1..483: note = Related to NZ_OENB01000038.1
MDNSATRKQEIYDKIKESSKHEFILSEMKRLGFWGDDNVNFDKVNDFLKEENALSGDLSKLLKKERLIKDTDAFIANKHKERKKLSKEKQKETKLKREQIRKEKAEKWQQTKKEDITYLGAGYSHQLNDTQIDEVRLKEAGLPIYHSVKDLAEAMKITVNELRFLAFSRKNSQIEHYKRFKVAKKSGGYRLISAPMPRLKRAQHFILENILNKVIVHNKAHGCVKERSIISNAMPHLNKAVVINQDLKNFFPSVTYKRIKGVFKSLGYSEQLAVIFSLLCSESKILDISLLGENYFSKRGERFLPQGSPCSPAITNILCRKMDYRLDGLAKKYGFDYSRYVDDTTFSGNHEQFKHITAILKYSKKIISEENFNLHPDKLKIMKRNQRQEVTGIVVNEKLNIDKKSLKRFRALLYQIEKEGIAGKTWNGGLNVLAEIDGYANYIYQVDKEKGAKYKSQVADILKAHSYKESKGIFNKINSLFKR

SEQ ID NO: 6019 - protein, 501 aa, Tenacibaculum ovolyticum
  source 1..501: note = Related to NZ_AUMF01000009.1
MDNSATRRQEIYDKIKESSKDEFILSEMKRLGFWGDNEVDFEKANAFLKEERELSNNLTALVKKERAIEDTEAFIANKHKERKKLSKEKQKETALKRALIRKEKAAKWQQTKKEEIVYIGDGYSHQLNDTETNVARLKENDLPIYESAKELAEAMKITVNELRFLAFSRKNSKIHHYKRFKVAKKSGGYRLISAPMPRLKRAQHFILENILNKVTVHKKAHGCVKERSIVSNAEIHVNKAVVINQDLQNFFPSVTYKRIKGVFKSLGYSEQLAVIFSLLCSESKILDLSLLGENYFTQRGDRFLPQGSPCSPAITNILCRKMDYRLDGLATKYGFTYSRYVDDTTFSGNQEQFKYITAILKYSKKIIKEENFKLHPDKLRIMKRNERQEVTGIVVNEKLNINKKSLKRFRALLFQIEKEGIQGKTWNGGLNVLAEIDGYANYIYQVDKIKGVKYKSQVSAILKAHSYKENHVAKYASNSTEAANEHKVPSFFKKIISFFKK

SEQ ID NO: 6020 - protein, 526 aa, Winogradskyella forsetii
  source 1..526: note = Related to NZ_CP053348.1
MVPISLELFNSVFRVVRRELKYILLLPFFVFMSNSTERRQEIYDKIRQSSKHEYILSEMKRLGFWGEDNVDFEQVNKFFNDESELSKQLNDLLRKEKSIEDTEAFIAAKHLERKRISKEKQKETKEKREQQRLEKAKQWQLSKLEDIVYLGEGYSHQLNDKTTADDLLKRQGLPILHSAKDVAKAMNITVAELRFLAYSRKNSKTCHYKRFKVAKKSGGFRLISAPMPRLKKAQHFILEHILNKVTMHPKAHGCVLEKSILTNALPHVNKDVVINQDLKNFFPSITYKRIKGVFKSMGYSEQVSVIFALLCSEPKILDVTLLGENYFAQQGDRFLPQGSPCSPALSNIICKKLDYRLDGLASKYGFIYSRYVDDITFSGPKAQFSKIPALLKYSNKVVKAENFILHPEKLRLMKRHQRQEVTGVVVNEKPNINKKSLKRFRALIYQIEKDGIEGKTWNGGLNVLAEIDGYANFIYQINKEKGKPYKERVASILVAHNYKEAHKQKYVKAPPKKEGFIKKLFSWFKL

SEQ ID NO: 6021 - protein, 504 aa, Cellulophaga baltica
  source 1..504: note = Related to NZ_CP009976.1
MSNSTERRQEIYDKIRQSSKQEYIISEMKRLGFWGEDNVDFDKVDRFFKKESELSKQLHDLLKKEKSVEDTEAFIAAKHIERKRISKEKQKETKEKRALERIEKAKRWQLLKNEDIIYLGEGYSHQLNDKNTATDLLKAQGLPVLESANDIAKAMKISLGELRFLAYSRKNSKTSHYKRFKVAKKSGGHRLISAPMPRLKKAQHYILEHILNKITMHPKAHGCVLEKSILSNALPHVNKDVVINQDLKNFFPSITYTRIKGVFKAMGYSEQVSIIFALLCSEPKILDISLLGEHYFAQQGHRFLPQGSPCSPAITNIICKKMDYRLDGLGSKYGFTYSRYVDDITFSGDKNQFSKITALLKYSKKIVTSENFTLHPDKLRIMKRHQRQEVTGVVVNEKPNINKVSLKRFRALIYQIEKDGIKGKTWNGGANVLAEIEGYANFIFQIDQEKGRGFKERVAKILAQHNYIEKHIVTYAKEKVVVATSSDAKPKDTFLKKLFSIFKK

SEQ ID NO: 6022 - protein, 513 aa, Aquimarina muelleri
  source 1..513: note = Related to BMWS01000013.1
MYEGNKIHLIATFFIPYTMADSATRRQEIYDKIKESSKDQYILEEMKRLGFWNEGQVDFETVNQYFKEESELSQQLQKLLREKRLVENPEAFLAQKHKERKLASKQSQKETKEKREKLRQEKADRWKESKEKDILFLGAGYSHTLHDKSTKQDRLQQEKLPVLQNAEDVAKAMDISIGQLRFLSFSRKNSKINHYKRFQIPKKTGGFRYISAPQPKLKKAQHWILENILNKVTMHPQAHGCVIGKSIKTNAIPHVAKDVVINQDLKNFFPSIVYPRIKGVFQSLGYSDQVATIFALLCSEPKIVEISVLGEDYYAQRGERFLPQGSPCSPAITNIICRKLDYRLDGLARKYGFSYTRYVDDLTFSGEKDQYAHITNMLKYSRRVVKEENFTLHPDKLRVMKKGVRQEVTGVVVNEKPNIDKKSLKRFRALLYQIEKDGLKDKVWTGKADLLSQIHGYANFINQIDQEKGKKYKEKVNIILERYNYKDNHRKQYVKTFVKPKGLMSKLRSFFRK

SEQ ID NO: 6023 - protein, 498 aa, Chryseolinea flava
  source 1..498: note = Related to NZ_QMFY01000006.1
MADIRQQLYDRIKASTKESVILEEMKRLGFWKQETGVPSLPEQLILQEADLTKELQSLLEQQRKYQNKEQALKEMRKARLEKSKLKREENKKLRKQKREEKAARWKATQETDIIYLGEDVSKGLNNKETDVAKINTHQLPGITTVEELAKAMNISVGTVRYLSYNRIISKTTHYKRFYIPKKTGGKRLISTPMPKLKRAQYWILENILEKIAIQDSAHGFVKKKSIVSNALPHVKAEVVVNIDMKDFFPTITYPRVKGVFQSFGYSEQIATILALMCTEAECDQIDLDGITYYAAGLERFLPQGAPTSPALTNIICRKLDARLKGIATKFNFNYTRYADDLTFSASGEATAHLKTLMGFIKRIIKEENLHIHPDKVRVLRKGARKEVTGIVVNDRPAVNAKELDRFRALLFQIEKDGLDGKHWKGSNNLLASIKGYANFVLMVDPIKGKPLMERVSKILSTHEFKHVIRHKPKSLLANEPEKPKNTEEQSKKPWWRFW

SEQ ID NO: 6024 - protein, 495 aa, unidentified
  source 1..495: note = Related to JAIOAO010000004.1; note = Fulvivirgaceae bacterium QH1ED-6-2
MADIRQQLYDRIKASTKDSVILEEMKRLGFWKRDVGMPSLSEQIILKEADLTKELNALLEQQRRYQNKEQALKEMRKSRLEQSRAKREENKKRRKQKREEKAARWKASKETDIIYLGDNVSQGLNNKETDPAKLTQHQQPLVTTVEDLAKAMNVSVGTLRYLAYNRIISKTTHYKRFYIPKKTGGKRLISTPMPKLKQAQYWLLENMLNKVATHDAAHGFVRQRSIVSNALPHVGAEVVINIDMKDFFPTITYPRVKGVFRSFGYSEQIATILALICTEPDVDQIELDGQTYYAAGSERLLPQGAPTSPALTNIICRKLDARLKGIATKLGFNYTRYADDLTFSASGEAVTHVKTLMGFVKKVVKEEKLVIHPDKIRILRKGARKEVTGIVVNDKPAVNAKELDRFRALLFQIEKDGPQGKHWNNSPNLLASIKGFANFVAQVDPVKGKPLVERVNAILVTHQFKHTIKHKSKAQQAKQEAEQKQKSKKPWWKFW

SEQ ID NO: 6025 - protein, 500 aa, Chryseolinea sp.
  source 1..500: note = Related to JAERRB010000002.1
MADIRQQLYDRIKASTKESVILEEMKRLGFWKKEEGIPSLSEQLIVKEADLTKELKELLEQQRKYENREAALKEMRKARMAQSRAKREENKQLRKQKREAKAARWKDSKEKDILYLGEDVSKGLNNKESDLTKLATYGLPVIHHAEALAQAMQTTIGNLRHLAYHRIISKTTHYKRFYIPKKTGGKRLISTPMPKLKQAQYWILENILNKVTLHDAAHGFVKTRSIVSNAQPHVKADVVINIDLKDFFPSITYVRAKGVFKSFGYSEQVATIFALLCTEPECDQIAIDGVTYYAASMERFLPQGAPTSPAITNIICRKLDARLRGIATKLNFTYTRYADDLTFSASGDAAAGTRTLLGFVKKIIKEEKLNIHPDKFRVLRKGARKEVTGIVVNEKPAVNAKELDRFRALLFQIEKDGIAGKHWNNSTNLLASMKGYASFVAMVDAAKGKPLVERVNAILAANQFKHVIRHKSKAMRDKETAQAPKGSGSSDAKKPWWKFW

SEQ ID NO: 6026 - protein, 503 aa, Azospira oryzae
  source 1..503: note = Related to QFQN01000037.1
MVGSQNTRQQLYDRIKASTKEAVILEEMKRLGFWKSEEGMPSLPELIIEKEAVLIKEVRELVEQQRKYKNKEEALKEVRKLRLEKSKLKREENKKTRKQKREEKAAHWKERKEKDILYLGEKVSKGLNNKESDLAKLTSLQLPVLQNAEDIALAMGIPVGQVRFLSFHRIVSKTTHYRHFYIPKKTGGKRLISTPMPRLKSAQYWVLTNVLDKILIHDAAHGFVRKRSIVSNALPHIKAEVVINIDLKDFFPSISYIRVKGLFQSFGYSEQVATILGLICTEPESDEIELDGETYFAANGERFLPQGAPTSPAITNIICRKLDVRLKGIASKLNFNYTRYADDLTFSASGESAASTKTLLGFVKKIIKEENLNIHPDKLRVLRKGARKEVTGIVVNDKPSVNAKELDRFRALLFQIEKDGIGGKHWKNSNNLLASMKGYASFVAMVNPEKGNPIKERVNKILAANQFTHVIKHKSKAMIAKDAAKNTNTASTSEVKKPWWKFW

SEQ ID NO: 6027 - protein, 523 aa, Sporocytophaga myxococcoides
  source 1..523: note = Related to NZ_KE384560.1
MTKNILYTTIFYTPMANTENSQPTRQQLYERIKSSGRNAVILEEMQRLGFWKSDEGASVIPEMLIHKEADLIKELNKLLQQQRIYQNREEALKKVRQARLEQSRKKREENKILRKQKREAKAARWKELRDKNIIYLGEKVSKGLNNQISENSKLLKYQLPVLQTAEELSAAMKITIGELRFLSYNRTISKINHYKRFYIPKKTGGKRLISTPMPRLKKAQHWILENILNKIDPTESAHGFVKKKSIVSNALPHVKADVVVNIDLKDFFPSINYRRVKGLFIALGYSEQISTIFALICTEPDCDQVELDGETYYAAGSDRFLPQGAPTSPAITNLICRKLDLRLKGIASKLNFNYTRYADDLTFSASGVATSNTSTLLGFVKKIIKDEKLYINPDKLRVQRKGARKEVTGIVVNDKPSVCRKELDKFRALLHQIEKEGTIKGKHWNNSNNLLASIKGYANFVKMVNPEKGKPLEERVKKILEAHRFKHVIKHKPKKQSATTNVVDSKPANQPEAENKKPWWKFW

SEQ ID NO: 6028 - protein, 498 aa, unidentified
  source 1..498: note = Related to JAJTHV010000105.1; note = Flammeovirgaceae bacterium
MADSQSTRQQLYDRIKNSSKDAVVLEEMKRLGFWAKNESAPSLPEILIQKEAALVQELRQLTEQQQKLKDKQQLLKEVRKARLEKSRAKREENKKLRKEAREAKAARWKEKKEKDIVYLGANVSGGLSHTASDATLLGKHQLPIWNSVEELARDMKVKVGELRFLGFNRAVSKVNHYKRFYIPKKTGGKRLISAPMPRLKTAQTWILETILNKVAPSEQAHGFVLKRSIVSNALPHVKADVVINIDLKDFFPSIHYPRVKGVFQSLGYSEQLATLFGLICTEPDCDTVELDGTTYYVSNSERFLPQGAPTSPAITNILCRKLDARLKGISTKLNFTYTRYADDLTFSTSGEHVNKTKTLLGFIKKIIREEGLVIHPDKLRVQRKGARKEVTGLVVNDKPSIAAKELDKFRALIYQIEKDKTLQGKHWKNSPHLLASMKGYANFVAMVDPAKGKPLVLRVNKILDEHGYKHVIKHKPKPKVVAASEQPVPAKKPWWKFW

SEQ ID NO: 6029 - protein, 504 aa, Ohtaekwangia koreensis
  source 1..504: note = Related to NZ_FUZU01000002.1
MADNSQVTRQQLYDRIKASTRDSVILEEMKRLGFWKKDDGIPSLPEILITKESILTQELHVLLDQQRKYKNKEEALKEIRKARLEQSRLKREENKKLRKQKREAKAAQWKERKEKDIIYLGEDVSKGLNNKASDLTKLATYQLPEMHMADELANAMGITVGELRFLAYNRTVSKINHYKRFYIPKKTGGKRLISTPMPRLKKAQHWILENILNKVSIDDHAHGFVMKRSIVTNALPHVKAEVVINIDLKDFFPTISYQRVKGLYRSLGYSEQLSTIFGLISTESECDQIELDGEIYYAAGIDRFLPQGAPTSPAITNIICRKLDARLKGIASKLNFAYTRYADDLTFSASGENVNNTKTLLGFIKRIIKEENLTIHPDKFRVLRKGARKEVTGVIVNDKPAVNAKELDRFRALLFQIEKDGTLEGKHWKNSPNLLASIKGYASFVAMVDPIKGKPFVERTNKILETHGFKHIIKHKPKPPQTAAAVQTEEQAAQKKKPWWKFWA

SEQ ID NO: 6030 - protein, 501 aa, Pedobacter sp.
  source 1..501: note = Related to NZ_JAFEWE010000006.1
MSNQPNRQQLYDRIKASTRDAVILEEMKRFGFWKKDEAQSIVPETLIEKEAALTRELRDLLEKQQRFQNREQALIEVRRARLEASKKKRAENKLLRKQQKEQKAARWKEKKEKEIIYLGEDVSPGLNNVSANPDNLNKQKLPVIANAEELAKAMKTTVAELRFLAYHRTVSKTTHYQRFYIPKKTGGKRLISTPMPRLKSAQHWVLENILELPEIKDTAHGFVKKRSIVSNAVPHLKAEVVINVDLKDFFPSIDYKRVKGLFISLGYSEQIAIILGLLCTEPESDQIELDGQKYYVAGTERFLPQGAPTSPAITNLICRKLDARLIGISKKLGFTYTRYADDLTFSASGEAVKSVKTLMGFIRKIVKDENLNIHPDKLRILRKGSRKEVTGIVVNDKPAINSKELDRFRALLFQIEKDGIAGKHWKNSPHLLPSIKGYVNFISMVDQEKGKALKVRVDAILQKHGYKHEIRHKSKQQIAKEQERIEAEAVHQKKKPWWKFW

SEQ ID NO: 6031 - protein, 503 aa, unidentified
  source 1..503: note = Related to JAJNDK010000004.1; note = Bacteroidetes bacterium
MTRQEIYDRIKNSTKDAVILEEMKKLGFWKEDGAAASVPEQLILREASLRKDLNELLQKQRNYQNRDLALKDMRAARMEASRKKQAENKLLRKEKAEKKAAAWKEKKQKDITYLGEAVSTGLNNAEANTEKLQKSGLPLIESAEKLAALMQISISELRFVAYNRVVSEITHYKKFQLPKKTGGFRTISAPLPRLKSAQHWILQEILNKLPVHAAAHGFVTKRSIVSNAKEHLQNNLLINIDLKDFFPSIHYPRVKGFFKAIGYSEQVATIFALICTESEVDEIELDKKTYYVKSGDRSLPQGAPTSPAITNLLCRRLDARFAGLAKKYGFVYTRYADDLSFSAPEEKKEEFKKFIGFVKKTIKAENFTLHPDKFKVLRKGARREVTGIVVNQKLSVSSDKVKKFRALLFQIEKDGIAGKHWNGSTTLLASIKGYASFIYQVDPVKGKPMLERVNKILVANAFKHIIVHKSKAQKEKEAPKKQAGIGASTKTTSDTKKPWWKIW

SEQ ID NO: 6032 - protein, 478 aa, unidentified
  source 1..478: note = Related to JAFDXR010000011.1; note = Bacteroidetes bacterium
MKKFGFWNETEGQSSLPEQLIMQEARLSKELYDLLEKQRKYQDREKALKEMRTARLQKSREKIAENKRLRKEKKEQRAQDWKNSKQKDIIYLGPTVSKGLQQTADGESDKLKQKQLPLIHTAEELASQMGIGIGELRFLSYNRPVSTVSHYRQFQMPKKTGGFRKISAPMPKLKEAQHWILHYILNKLPVHENAHGFTLRKSIVTNAQPHLQKVLLINIDLKDFFPSIHYPRVKGMFRGMGYNEKIATLLALICTESETDEVELDGKKYFVKSGNRALPQGAPTSPAITNYLCRRLDARLSGLARKYHFTYTRYADDMTFSFSADQQDSIKTCIGFIKKTIRTENFNIHPDKFKVLRKGARHEVTGVVVNNKLSVDSKKLKKFRATLYQIEKHGLQGKHWNHSHNLLASLKGYANFINQVDPVKGKIYTERVRKILDQYQYRHEIIFKPKPKPSPLKEIPNPIPAPEAKTRKPWWKFW

SEQ ID NO: 6033 - protein, 431 aa, unidentified
  source 1..431: note = Related to JACMLS010000980.1; note = Bacteroidia bacterium
IARKEKIEAAAKAWARKKEKEIVYLGENVSAGLNNLQDSDAERLKKNNLTDIASAEQLAALMKIEMGQLRFLSYHRAVSRVSHYKKFTIPKKTGGVRTISAPMPKLKTAQHWILENILDKILLHDAAHGFVNKKSIVTNATPHLKSEVVINIDLKDFFPSVHYPRVKGMFRKLGYNEAISTIFSLICTEAEQDEVEIDGVKYYVKDGNRKLPQGAPTSPAITNIICRKMDARFTGLSKKYGFAYTRYADDLTFSASGDALLKLKQFIALVKKVISSERFTLHPDKFKVMRKGARKEVTGIVVNEKPAIEKKKLKKFRALLFQIEKEGSIAGKKWGNSKNLLAAIKGYSNFINMVDPVKGKSLIDRANKILEQHKFAHVIVHKAKPKVEPVVIQKTTSTVSQSQYVSTTTAATQQVAPEKTDSKKPWWKFWS

SEQ ID NO: 6034 - protein, 501 aa, unidentified
  source 1..501: note = Related to CP004371.1; note = Flammeovirgaceae bacterium 311
MANQSKPTRQQLYDRIRQSSRDEVVLEEMKKLGFWPDGEGAPSLPEQVIRREGELSRELGDMLVQQRRYSDREQMLKEIRQQRMEASRQKQKENKERRRQERQQRAEQWKARQEKEILYLGEGVSAGLGESDNDAAKLRLNGLPDFIDIESLARAMEIDVASLRFLAYSRQVSKVSHYKRFYIQKKTGGRRMISAPMPRLKQAQQWILLHILENVKVNGAAHGFVLNRSIVTNALPHLQPDLLVNLDLKDFFPTVTYKRIKGVFRSLGYSEKVASIFGLICTEPDITEAEMDGRTYFIASGERFLPQGAPTSPALTNILCRRLDVRLKGLARKYGFTYTRYADDLSFSARGEGKENLTKLLGNVRRIIKDEGFVIHPDKLRVMRKGSRQEVTGVVVNQKLNVCRKKVRNFKALLFQIEKDGIEGKSWQGSSDNLLAVIKGYAHYIAMVNPVQGKPLAERVEAILKKHHYRHIIKHPAKKPFMQAAAEEEPQPKKKPWWKFW

SEQ ID NO: 6035 - protein, 513 aa, unidentified
  source 1..513: note = Related to nan
MADSSLNRRQELYDRIRSSSKDQVILEEMQKMGFWPDDSEEPSVPALYFKRELELSQELRDLVIKHRRFDDQAKMLEHIRRERMAESRKKQKETKQRRRQERLARAEAWKQRKASEILYLGEGVSQGLQGATPNRARLTQHGLTDIASVEALALAMGMTVGKLRFLAYNREISRVSHYIRFHLPKKRGGTRLISAPKPGLKSAQYWVLQHILDRIELHDAAHGFRKARSIVTNAKPHLGADLVVNIDLKDFFPTVNYRRVKGLFGGLGYSERISTVLGLLCTEPDVDVVELDGETWYVAKGERHLPQGAPCSPAITNIMCRRLDARMRGLAQKYGFVYSRYADDMTFSASGDSRKLLMTLLGNVRRILKDENFKLHPDKLRIMRKGAQKEVTGIIVNEKLNVSRKKLKKFRALIFQIEKDGPEGKTWEGARDLLPAIWGYANFIKMVNPDKGAEFVARVKAIFDHLGETPPVKPVVAQPDGSEVEVEILQGSDEDEAPGATGNDPDKPWWKIW

SEQ ID NO: 6036 - protein, 485 aa, unidentified
  source 1..485: note = Related to DF820455.1; note = Candidatus Moduliflexus flocculans
MFEGFRDSHFPLNDMSNTENSQDSRLSRQQIYDRIRATSKQEYILSEMVRLGFWPDSQDAPTLPEQLIRREGELTRELTELLEKQRKFDNREQMFKEMRKKRLEESHQKQAETKERRQRERDERARRWKELKAQDIGYLGDGVSGGLQNKEHSAERLAQNNLPAFASVAELVQAMGISVGELRFLTFQRDVSKVSHYKRFYMPKKSGGMRLISAPMPRLKAAQHWVLEHLLQTVPLHPAARGFRSGESIVTNAAPHVGRDVVINLDVKDFFPTVSYPRVKGVFRGLGYSEQLATIFALLCTEPDVDALELDGETYYVVASGRHLPQGAPTSPALTNILCRRLDSRLSGMAQKMGFAYTRYADDMTFSGTEDTLQNLTKLLWRAKKIISDEGFVVHPGKLRIMRSGSRQEVTGIVVNEQMTLERGTLRNFRALLFQIEKDGLRGKTWKGRELTPASLRGLAHYIVMVNPQKGRPLLERVNALLRQA

SEQ ID NO: 6037 - protein, 466 aa, unidentified
  source 1..466: note = Related to PDSK01000128.1; note = candidate division KSB3 bacterium
MNDSEDSRAVRQQIYDRIRQSSHDEYILDEMIRLGFWSSDKDAPSVPEQLIRKEAELSRELRDLLKKQRRFENRKKMLKEMRTKRLAESRKKQQETKERKKRERDEKARQWQQKKATAIFYLGEGVSAGLNQKELLTERLNQYNLPVFTSVEALAQAMEISVGELRFLTFHRKVSKTTHYQRFYMPKKSGGVRLISAPMPRLKHAQYWVFHNILQQIPLHSAGHGFRPAHSIVSNAEPHQGQDIVINMDLRDFFPSISYKRIKGLFHALGYSEQIATILGLLCTEPEIDQVELDGETYYVANSERHLPQGAPTSPALTSILCRRLDSRLQGMADKLGFAYTRYADDLTFSASGETARQFTQLLWQARKIIEDEGFVLHPEKLRIMRKGSRQEVTGIVVNEKLSVNRKTLKNFRALLFHIEKDGLDGKHWKGQPVSLAFLKGFANYVKMVDPDKGRPLLDRINKLIV

SEQ ID NO: 6038 - protein, 504 aa, Desulfonema ishimotonii
  source 1..504: note = Related to NZ_BEXT01000001.1
MTDTDTSRLTRQQLYDRIRESSKDEYILEEMIRIGFWPSGKDAPTLPEQVIRREGELTRELDDLLRKQRRYENKELMLREMRKARMAESRRKQAETKARREEERQARAERWQDIKTREILWLGHGVSGGLNRRTSDVGKLAQNGLPHYDDVKALAKAIGIPVGELRFLAFSRKTSKISHYRRFFIPKKRGGRRLISAPMPRLKALQYFVLENILAKIPPHKAAHGFLPGHSIVTNAVPHVGKDVVINLDLKDFFPTISYPRVKGLFRSLGYSEQQATLFGLICTEPDTDAVELDGETYFVARSERHLPQGAPTSPAISNLIFRKADRRLQGVADQLGFAYTRYADDLTFSASGDAAEALTRLLWGVRQIVKDEGFVLHPDKLRVMKKGARQEVTGIVVNEKLNISRKSLRNFRALLFQIEKDGFEGKRWNGAKNLPPVIWGYANYVAMVNPEKGKPLVAQTDRIFRKYRIRKSDIRPDLARKAALAKKGETSGADEEKPWWKFW

SEQ ID NO: 6039 - protein, 605 aa, Enterovibrio calviensis
  source 1..605: note = Related to NZ_JHZA01000001.1
MSNEQQNDSPIQDPSPKLTRQELYDRVRRVGKDEYILSEMIRLGFWKRDANKPSLTDTFLQKRSALQSRLRELSKENALYSDPEKALKALHEERKKAALEKRELTKIERNTARYQRAFAWYTKQQTSFTYLGDNVSAGLEDKTSDEEKLVSQALPVFDNAGAVADAMGISTSELRFLCYQKDVSTISHYQDFTINKKSGGVRTISAPMPRMKRSQYWLLDNVLNKLAIHDAAHGFVSGKSIVSNAQPHVKKQVVINLDMKDFFPSVSYKRVKGMFINLGYSEELATTFALLATKRETQALEMDGKTWHVAVGERVLPQGSPCSPAITNVLCRRLDARLLGMAEKLGFTYTRYADDLTFSSDDASKVQALLWRSKQIVSSEGFVIHPDKTRVMRRHQKQEVTGVVVNDGLSVERKTLKRFRAVLRHVEMDGPENKHWGSGELFQSLAGYANFVAMVNPEKGIPLQKAVVHLKRQHNIPTPAGKISALNKKLFRIKAAKGEAPRETWWQPMIKPAPELEFTPAQIQHKKREAMAEQRQLSDASSGTQTEDVDNTASESGKKKRGIGFWIFAVIFSPIILLVAISRTSTTAKIALAASILFWMYYFFM

SEQ ID NO: 6040 - protein, 605 aa, Enterovibrio sp.
  source 1..605: note = Related to NZ_SCHN01000009.1
MSNEHQSDSPIQDPSPKLTRQELYDRVRRVGKDEYILNEMIRLGFWKKNTDKPNLTDTFMEKRASLRARLRELSAENALYSDPEKALKALHDERKKAALEKRELTKLKKNTARYKKAFSWYMKQQDTFTYLGENVSAGLDDKTSDEEKLISQEIPVFENAGAVADAMGVSTSELRFLCYQKDVSTISHYQDFAITKKSGGVRTISAPMPRMKRAQYWLLDNVLNKLAVHDAAHGFVSSRSIVSNAEPHTKKRVVINLDMKDFFPSVSYKRVKGMFKQLGYSEELATTFALLTTKPATEALDMDGKTWHVAVGERTLPQGSPCSPAITNVLCRRLDARLKGMAEKLGFTYTRYADDLTFSNDDDSQVQALLWRCKQIVSSEGFVIHPDKTRVMRRHQKQEVTGVVVNDGLSVERKTLKRFRAVLKHVELDGPENKHWGSGELFQSMAGYANFVAMVNPEKGIPLQKAVIHLKRQYDIPTPSGKISALNKKLFRMKAAKGETPRDTWWQPPIKPAPELELTPAQLEHKKREAIAEQKRHSGTPTDSKTETQNSDATDSEKKKRGIGFWIFAIVFSPIILIVAMARASTTAKIAFAASLFFWVYYFFM

SEQ ID NO: 6041 - protein, 605 aa, Photobacterium galatheae
  source 1..605: note = Related to NZ_JMIB01000006.1
MSNSHSNPQTHEPTQDPSPKLTRQQIYDRIRESSKDEYILSEMTRLGFWKPGDSKPSLAEQFVNKRASLMARLHGLSQLDKRYSDPEKALAEMHKARKLAALEKREQTRIARNRAAFEQALAWYQRQKKQFTFLGESVSAGLSQKASDPLRLSTRHLIHFQSVEDVARQMDISTAELRFLCYRKEVSTVTHYQEFELPKKSGGTRVISAPMPRMKRAQYWLLDYVLNLLPVHDAAHGFVPGRSIVTNAQPHVGKAVVINLDLKDFFPSITYRRVKGLFGKLGYSEELATTFALLATKPVTQAVEMDGRTWHVAQGEHVLPQGSPCSPMITNVLCRRMDARLQGMADKLGFTYTRYADDLTFSSQDAGKVQSLLWRCKQIVTDEGFVVHPEKTRVIRRHQRQEVTGVVVNDRLSVDRATLKRFRAVLQQVALDGPEGKTWGAGELFQSLAGYANFVAMVNPEKGLPLQKQVLHLKRQYGFTVPKGKIGELNKRLFRLKVARGQKPRTHWWQPEEKPMPVLALTPKQRQEELEQKRAVVPKKEASVSDVEPEETEAASDEVKLSPFAWVMVVAVMPFALLWMFIKAPIKSKLWVLGIGAVIYWLFFS

SEQ ID NO: 6042 - protein, 603 aa, Photobacterium sp.
  source 1..603: note = Related to NZ_CP073578.1
MSDSNKHQSAETVQDPSPKLTRQQIYDRIRQSSKDDYILREMIRLGFWKSDKDQPSLTERFVAKRTALITRLRTLTQLDRLYSDPEKALAAMHKARKKAALEKREQTRIARNQTRFEKALAWYQRQREAFTFLGESVSGGLARKTSDPLRLSRYQLMHFQSVAEVAGSMAIPMSELRFLCYRKEVSPVSHYQDFEVAKKSGGTRIISAPMPRMKRAQYWLLDAVLTRIPVHDAAHGFVPERSIVSNARPHVGKAVVINLDLKDFFPTISYRRVKGMFHQLGYSEELATTFALIATKPVTQAVEMDGKIWHVAQGEHVLPQGSPCSPAISNLLCRRMDARLQGMADKLGFTYTRYADDLTFSSDDVSKVQSLLWRCKQIVADEGFVVHPEKTRVMRRHQRQEVTGVVVNDGLSVERKTLKQFRAVLRQVELDGPAGKQWGKGELFQSLAGYANFVAMVNPEKGIPLQKQVVRLKRQYGFSVPKGKMGELNKRLFRLKVARGESPRSRWWQPHEKPAPELALTQQQKAAQRQAAKADSVSPQVVTPAATSETDSETDPTAFSPMMWVMMMLTLPFALLWMLVTASWKTKLWVLSLGYVLYWLFFG

SEQ ID NO: 6043 - protein, 607 aa, Photobacterium aphoticum
  source 1..607: note = Related to BMYC01000011.1
MRNSDPSQNNSNNNNNSVLPPEPSPKLTRQQIYDRIRQSSKDEYILSEMIRLGFWQKDRTKPSIAEKFIEKRSALLSRLRELTRLNRLYQDPEKALLALHKTRKKAALEKREQIRINHNLARYEKALRWHKKQQTHFTYLGDAGYGDKALTAGLQQTTCDTARLTAHGLPAFSHVGELADAMGISTSELRFLCYQKDVSTVSHYQHFALSKKTGGTRLISAPMPRMKRAQYWLLDNVLNLLPIHDAAHGFIQGRSIVTNAKPHTNKQVVINLDLKDFFPSITYPRVKGIFKQSGYSEALATTFALIATKSDTQAVEMDGQTYHIANGKRELPQGSPCSPAITNVLCRRLDARLQGMAHKLGFTYTRYADDLTFSSDETDKIQYVLWRCQRIVTDEGFTLHPDKTRVMRKHQKQEVTGIVVNDGLSVDRPTLKRFRAVVRQIELDGHYGKHWGTGELFQSLTGYANFVAMVAPEKGIPLQKQVAHLKRQYNIPVAAGKITALNKRLFRLKAAKGEAPREAWWQPAEKPAPVLALTQQQMDAQKQQARQAAKANQANTHSAHPEMAPDHTNPAFISGGNETNTASPNRFGSPVVWTVVVVLLLLKIFVY

SEQ ID NO: 6044 - protein, 632 aa, Vibrio sp.
  source 1..632: note = Related to PIZL01000001.1
MSDSSSQSTSRSNSSNASHQEASVTDSAPKLTRQQIYDRIRESSKDEYILQEMIRLGFWNKDDEQPSLTQEFIERRSELTRKLRELSDLDSLYADPEKALEALHKERKKAALEKREQTRQALNQKRYDRALAWYNQQKETFTWLGDDVSLGLKNKENDDGRLEERELPTFENIAALAGAMGISVSELRFLAYQKDVSNVSHYQRFSIAKKTGGLRHISAPMPRLKRAQYWLLDNILAKLSVHDAAHGFVTGRSIVSNAQPHVGKAVVINMDLKDFFPSISYKRVKGLFQSQGYSEELATVFGLLTTESETQELEMDGQTWFVAQGERRLPQGSPCSPAITNVMCRRLDARLQGMADKLGFAYTRYADDLTFSTDSAEKAQALLWRAKQIVVSEGFTLHPDKTRVMRRHQKQEVTGVVVNEKLSIDRKTLKRFRATLKQIELDGPDGKHWGAGELFASMEGYANFVAMVDAEKGIPLQKTLVHLKRQHGVTTKHGKVTELNKRLLRVKAANGENPKEGWWQPEEKPAPELELTPNQIAERKRAIKRQRNQEQRENQGANSEWQDADFNQDNEANQGDGWSDLESDAKKKWTTREYILGLLFLPIVLVMLFFKAPWNIKCIVVGVLWLLYLYLN

SEQ ID NO: 6045 - protein, 616 aa, Vibrio nigripulchritudo
  source 1..616: note = Related to CAOA01000064.1
MSDTSHHSSQSDSQEATLSDSAPKLTRQEIYDRIRETSKDEYILQEMIRLGFWDKDEEQPNLTQEFIERRAELMRKMRELSQLDSLYSDPEKALEALHKERKKAALEKREQTRQARNQERYERALAWYHKQKESFTWLGDDVSLGLVNKESDAGKLENQDLPHFENIASLAQAMGISVSELRFLAYQKDVSNVSHYQRFTIAKKSGGERHISAPMPRLKRAQYWLLDNVLEKLTVHQAAHGFVSGKSIVTNAQPHVGKAVVINMDLKDFFPSISYKRVKGLFRAQGYSEELATVFGLLTTEPEVQELEMDGKTWFVAQGERRLPQGSPCSPAITNALCRRLDARLQGMADKLGFTYSRYADDLTFSTDEPDKVQSLLWRAKQIVSDEGFTLHPEKTRVMRRHQKQEVTGVVVNDKLSVDRKTLKRFRAVLKQIELDGPEGKTWGAGDLFRSLEGYANFVAMVDPEKGIPLQKTLVHLKRQYGIQTKHGKVTALNKRLLRAKAAKGEASRENWWQPEEKPEPELELTPNQKAEQKRAEQSARRAEQRANTESQNVESEQGDGWDELDSDANKVWTPREYVLVTLMLPLVLIHLFFRAPWNVKCIVVGVLWLLYLYLT

SEQ ID NO: 6046 - protein, 592 aa, Motilimonas cestriensis
  source 1..592: note = Related to NZ_JAIMJA010000004.1
MSESSTKLTRQEIYDKIRKSSKEEYILDEMKRLGFWRNDEEQPNLTQEFVEKRAQLMAQLRELSSQDELYSDPEKALAHLHQERKKAALEKREQVRQTRNKTRYENALNWYQKQQKEITYLGEKFSAGLSEKISDKSKLTSQGLPYFADSQALAQGMGISIGELRFLCYQKEVSQTSHYKKFAIEKKTGGKRHISAPMPRLKRAQYWLLENVLAPVKLHSAAHGFVPGRSILSNALPHINKGVVVNFDLKDFFPSISYARVKGLFCKQGYSEELGTLFALLATEPDTEAVAMDGQIWHIDQGPRILPQGAPCSPAITNILCRRLDARLAGMAEKLGFAYTRYADDLSFSSDEPNKVQSLLWRVKQIVTSEGFLLHPDKTKVMRRHQKQEVTGVVVNEKASVDRKTLKRFRAILHQIDLYGPEGKSWGPGALFPSLEGYANFVAMLDAQKGIPLQKQLVHIKRKYGVKTRSSKVTQLNKRLMRVKAGLGEAPRENWWQPAEKPEPILELTPKQQAAQKQARKVTGPVEQEYAESASEQNPQSEAEEDTKLSTKDYIFIGLFMPIALAQMIYKASWKTKIKLMVVGTIIWLLFG

SEQ ID NO: 6047 - protein, 569 aa, Citrobacter sp.
  source 1..569: note = Related to NZ_CP057483.1
MSESPKLTRQQLYERIRETSKEEVILAEMIRLGFWDGEQKKPDLTAEFIAQRAALEKRLAELGQQQQLYSDPQKALRELHKARKKAALEKREQTRIARNQARYERAQQWHQKQQSEISWLGEGFSFGLSDTTQNEARLKQQNLPLLADSQTLATLMGITINELRFLCFQKDVSRINHYRRFSLLKKSGGERLISAPMPRLKRAQYWILENILNRVKLHDAAHGFVAGRSILTNALPHVGRAVVINLDMENFFPTVSYRRVKGLFRQLGYGEQIATELALLTTEPETEQVVLDGENWFVQQGERFLPQGAPSSPAISNIICRRLDSRLHAMAHKLGFAYTRYADDMTFSCADNRGNVQQLLWRCKQIVQDEGFRVHPQKTRVMRKPQQQQVTGIVVNEKPSLDRKTLKRFRALLFQIAKDGMEGKRWGPGELMASIEGYANFVALVAPGKGIPLQKQVTDIKRQYGYATQPGRITALNKKLFRAKAARGESPRDSWWQAQGPSAPELEQTALQKQALRRAASAAEDVPSAAKNASVPDDFAETPPERPKKSSRLWWWFLAFVVYLIFRWA

SEQ ID NO: 6048 - protein, 567 aa, Citrobacter amalonaticus
  source 1..567: note = Related to NZ_CP011132.1
MSETPKLTRQQIYERIRETSKEEYIQAEMIRLGFWDATQEKPDLTTEFITRRAALEKQLAELGRKQQLYSDPQKALRELHKARKKAALEKREQTRIARNKARYERAQQWHEKQRSEITYLGAGYSFGLDETTHDDARLQQHHLPQLANSQALATAMGITLNELRFLCFQKEVSRINHYRRFSLMKKNGGQRLISAPMPRLKRAQYWILENILNRVPLHDAAHGFVTGRSILSNALPHVNQAIVVNLDMENFFPTVNYRRVKGVFRQLGYSEQIATELALLTTEPEAEQVVLDGENWFVQQGERFLPQGAPSSPALSNIICRRLDSRMHGMANKLGFTYTRYADDMTFSCADKSANVQQLLWRCKQIVQDEGFRLHSEKTRVMRKPQKQEVTGIVVNEKPSLDRKTLKRFRALLFQIAKDGIEGKRWGAGELMASLEGYANFVAQVAPDKGIPLQKQVTDLKRRFGYATRPGRITALNKTLFRAKAARGEAPRDNWWQAQGPSAPVLELTMQQKQAMRRPVSVTSPTSPNNDTPRTVNADAPAHQPARTSVKWWIILIAIILYFLMRK

SEQ ID NO: 6049 - protein, 536 aa, Phytobacter massiliensis
  source 1..536: note = Related to NZ_HE578945.1
MSESPKLTRQQIYERIRETSKEEYILAEMIRLGFWDASQEKPDLTAEFIAERAALQKKLASLGERQRLYDDPQKALRELHKTRKKAALEKREQTRIARNQARYERAQRWHQTQQSTITWLGEGYSFGLDDTTHNEARLAQQNLPPLADSQALASAMGITLNELRFLCFQKAVSRVNHYRRFSIAKKSGGERFISAPMPRMKRAQYWILENILNRVALHDAAHGFVAGRSILTNALPHVNRAIVVNLDMENFFPTVSYRRVKGLFRQLGYAEQLATELALLTTEPEAEQVALDGENWFIQQGERTLPQGAPSSPAISNIICRRLDSRLHAMAQKLGFTYTRYADDMTFSSADKTANVQQLLWRCKQIVNDEGFRLHPEKTRVMRKPQKQEVTGIVVNEKPSVDRKTLKRFRALLFQIAKDGTQGKRWGAGELMASLEGYANFVALIAPEKGIPLQKQVTDLKRQYGYVTQPGRITALNKKLFRARAARGEAPREKWWQAQGPAAPVLEQTPQQKQPAPQPAPVSSQPEPQSFAARRG

SEQ ID NO: 6050 - protein, 566 aa, Phytobacter diazotrophicus
  source 1..566: note = Related to NZ_CP051548.1
MSESSKLTRQQIYERIRETSKEEYILAEMIRLGFWDETQDKPALTAEFIAQRAALQKQLAELGQKQRLYDDPQKALRELHKTRKKAALEKREQTRIARNEARYARALQWHQKQQAEITWLGEGVSFGLADTAHNEARLQAQKLPLLADSQALASAMGITINELRFLCFQKNVSRVNHYRRFSLAKKNGGERLISAPMPRMKRAQYWILENILNRVKLHEAAHGFVTGRSILSNALPHVNQAIVVNLDMENFFPTVNYRRVKGLFRQLGYAEQLATELALLTTEPEVTQVALDGETWFVQEDARFLPQGAPTSPAISNIICRRLDSRLQAMAQKLGFVYTRYADDMTFSCAQPSANVQQLLWRCKQIVQDEGFKIHPEKTRVMRKPQKQEVTGIVVNEKPSVDRKTLKRFRALLFQIAKDGMEGKRWGSGELMASLEGYANFVAMVAPEKGIVLQKQVTDLKRQYGYTTQPGRITALNKQLFRAKAARGESPRDNWWQAQEAPPPVLEQTAQQQATQKATSSATEALHFDAQPETHAGQVPDKSRSPLRFFWVLILVLLIMILARMF

SEQ ID NO: 6051 - protein, 587 aa, Hahella chejuensis
  source 1..587: note = Related to NC_007645.1
MSEEKKLTRQEIYQRIRETSKDEYILSEMVRLGFWPDNSEKPTLSEAFIKKRTELQAALRELGQQQMLYSDPEKALKEMHKQRKQAALAKREETRRKRNEERFQRAQHWREVQAHQITYLGEGVSGGLEDATADEARLRSQNLPIINAAEELATAMGVTLNELRFLAYSKEVSKLSHYQQFAIAKKTGGVREISAPMPRMKRAQYWVLDNILAPLTLHEAAHGFVVERSIVSNAQPHVGKDVVINLDLKDFFPTVSYARIKGAFRHLGYSEQIATILGLLCSQPKTQEVEMDGQKWFVSEGERFLPQGAPTSPAISNVICRKLDRRLQSMAAKLGFTYTRYADDVTFSADGKSDDDVKRLLWRCRSIIKDEGFVVHPDKTRIMRKHRRQEVTGVVVNDKASVERKQLKRFRALLFQIDRDGPAGKSWGRGELFAAIDGFANYVAMVNPVKGVPLQQKVAQLKLKYGVKVKPSRVLALNKKRMRLKAAKGEAPREDWWQAQASAAPELEKTAEQVKEERKAEKAEQQTQAVPAASSADPAPVRTSTPVQSQQQAQPSAPAPEGESHAKTGWIMLAIGILIYLAMKMLG

SEQ ID NO: 6052 - protein, 575 aa, Agarilytica rhodophyticola
  source 1..575: note = Related to NZ_CP020038.1
MSDGNKLTRQQLYQRIRETSKDEYILSEMKRLGFWPEDSDKPSLAEEFINEKSEISKKLRELGQKQGLYSDPEAALKELHKQRKKQALERREQKRQERNQARYDRASRWYTTQQKLITYVGDHFSKSLNNVESHEDKLKQQGLPVLHSSKDLAGAMGITLNELRFLAYQKDVSAVNHYQHFEILKKTGGSRLISAPMPRLKRAQYWVLANVLEPLSIHDAAHGFVPKRSIVSNAIPHVGKDIVINLDLKDFFPTVTYPRIKGVFHTLGYSEHLATILGLLCTQSNIQEVELDGQTWFVGNGERYLPQGAPTSPNLTNILCRKLDARLNGMAEKLGFTYTRYADDLTFSSDSKDEQQVKKLLWRCRKIVQDEGFVIHPKKTRIMRRHKKQEVTGITVNDKMGVDKKTLKRFRAVLFQIDKDGPDGKTWGNGDIFCAIDGYANYVAMVSPDKGIALQQQVAHIKRKYGVNVKKGKVLSLNKKLLRLKAAAGEHPRQEWWQALPPAKPEKEKTAEEIKQSKVTDQQEKSKDRDNKNHWTQANTNLSQDDKKVSSTGYNMLKIFLFVTALAIAYSFLKN

SEQ ID NO: 6053 - protein, 574 aa, Aliikangiella coralliicola
  source 1..574: note = Related to NZ_ML660163.1
MSASSPGKLTRQQLYDLIRESSKDEYILSEMIRLGYWNEDSGKPSLPAELIARKGELEREFQALLKKQQQYQDPQKALKELHKQRKAEALKRREETKQNNNEARYQRAVNWHNKNQAEITYLGEDFSAGLQGSFTDRERLTNQELPVIDSSLALAKAMGISINELRFLSFGRKTSKTTHYQQFLIEKKTGGTRRISAPMPRLKRLQYWILGNILEKLPLHDTAHGFVAQRSIVTNAKPHVGADVVVNMDLKDFFPTVTYKRIKGLFCKLGYSEQVATVLALLCSEPEIDEVELDGETFYVARGERYLPQGAPTSPAISNLLCRNLDRRVFGASKKLDFTYTRYADDLTFSGTRKSAHQLRKLLWRVEQIVIDEGFVVHPDKTRIMRKNARQEVTGLVVNQKLSVDRKTLKQFRALLFQIEKDGIEGKVWGKGQLIPSIEGYANFVAMVNPEKGLALQKRVTQIKKQYGFEVKPGKLAALNKKIMRVKATRGEAPREDWWQAEPKPSPVKENTAEQLKAQKKAKAIEKKEAEQSLPEHSTNEQREIENTEDTNNIGTLMIYIAIGLLLIVIFLGS

SEQ ID NO: 6054 - protein, 567 aa, unidentified
  source 1..567: note = Related to JALJPK010000085.1; note = Pseudomonadales bacterium
MQTSAPGKLTRQQLYDLIKQSSKDGYILKEMIRLGFWNETTGKPSLTQEFITRKGELEKQYSQLLSLHHKYQSTESLLKDFHKQRKAKALLNREETKLKNKQIKFEKAQNWFKRNLTEILYLGENVSAGLNGKFTDHDKLKSNSLPVIENFETLAQSIGVSVSEIRFLSYDRKVSKVSHYQQFLIAKKTGGTRKISAPMPRLKHVQYWILTNILEKVAIHDSAHGFVTGKSIVTNAKPHVGADVVINMDLENFFPTVNYKRIKGVFCNLGYSEKISTVLALLCSESDNCEVVLDGQTYYRNQGERVLPQGAPTSPALTNILCRKLDRRMLGMSDKLGFKYTRYADDLTFSSSQQTAHNLQKLFWRVNQIIPDEGFILHPDKTRVMRRNNKQEVTGVVVNEKLSVDRKTLKKFRALLFQINKDGVGDKTWGKGALIPSIEGYANFVYMVNPIKGVALQKAVVLIKQKYGMPVKPHKLSLLNKKLMRLKAKEGLLPKKDWWIPKQKTTPLVELTQKQNEEAKIEHKQQITDDNRNVNILTPQSDKPKSYGYVFYVIAVVIFILFQIFNK

SEQ ID NO: 6055 - protein, 593 aa, Spartinivicinus ruber
  source 1..593: note = Related to NZ_CP048878.1
MSDQQSTPASPSRLTRQQLYDRIRESSKDEYILAEMKRLGFWDASEDRPSLSESLIIKQGELERELRELLAKQRQLKNPEKALKAMHKQRMKEARDKREVTRQHQAEERYQRSLAWYNKSQQTLSYLGEKVSSRLDSVEAQQARLLDNHLPIIKSYLQLATMMGVSLAELRFLAFSRNVSQVSHYQHFLLPKKNGGTRLISAPMPRLKRVQYWVQANILESVALHDAAHGFVTKRSIVSNAEPHVGKAVVINMDLADFFPTISYPRVKGVFSHLGYGEGIATVLALITTAQTVTPVELDGKQYFVGQGVRHLPQGAPSSPALTNIICRRLDKRILGTAQKLGFAYTRYADDLSFSSEQGEPAKVRQLLWRIKRIVKEEGFAVHPNKTRVMYRHKRQEVTGVVVNDKPSVDRRTLKRFRALLFQIEKDGITGKSWGTKSGKESAALIPSIDGYANYVAMVSPEKGVKLQQQVAKIKQQQGFQVSPKRVMALNRKLFKQKAMKGEAPRDSWWQPAEKQPPVKELTSLQLEAEKQQEKVECSAEQQADKKQPLVEQVQPPVQIHTKPKTQQFQFDKHHYWVIFWIGLLLLLLMIFN

SEQ ID NO: 6056 - protein, 589 aa, Pleionea sediminis
  source 1..589: note = Related to NZ_SUNB01000001.1
MSEISPGKLTRQQLYDRIRESSKDEYILEEMKRLGFWDESEQPPEAEELIKEKARLRKELNKLLRNKRLMDDPEKALELMHKERKKKALEKRKETKKERIKSAYERALNWFKLNQKEITYLGENTKIEISQTETNEQKLNQQNLPKFVESSELAEAMGLCLSELRFLTYTRDVSKVTHYQRFSLVKKSGGVRHISAPMPRLKRIQYWVKTNILDTLPLHDCAHGFVKERSIVSNAAPHIGQSIVINMDLKDFFPTITYKRVKGLFQQLGYNEKISILFALLTTEPHCDELSLDTETYYVAQGKRLLPQGAPTSPAIANLICRRLDRRISDCAKKLGFEYTRYADDLTFSIKDNDSDKVRKLLWRVKAIIKDEGFNLHPEKTRIMRSHQQQEVTGIVVNEKINLSRKKLKRLRATLFQIEKDGFSGKNWDDSKDILRSLTGFVNYYAMVDPAKSVKYKEQLKRIIQKHPYEISKTPFIGKLKKSVFIEKSKQGLSPWDDWWQPVEKTEPELILPKENEKQDSRRKATDSIESTSSSQSNRGSTRNRSSELPELIGKGFFTVTLIIIAVALAKVSPLILLLAGYLIYRLWK

SEQ ID NO: 6057 - protein, 580 aa, unidentified
  source 1..580: note = Related to CP059265.1; note = Candidatus Thiothrix singaporensis
MSQLTRQQLYDQIKAXPKDEYILSEMKRLGYWKEAEQPTLAESIIQRRGELQRQINALSSQASDPAAALKAIHQERMAAARQQRIDTKVKRETARYQRALAWHERRQQHIHYLGDAAGFQPSAAADVADAERLRSLNLPVLSNAAELAAAMGVTLNELRFLTYSNQVARICHYQHFAIQXKSGGVRLISAPMPRLKRLQYWVLDNILQPLELTEQAHGFVKGRSIVSNARPHVGXKVVINMDLQDFFPTVTYPRILGTFAQLGYNREVAALLALLCSEPDTQIVEMDGKRYYLNQSTRRLPQGAPTSPALSNVICRRLDRRLQGLAHKHGFTYTRYADDLTFSGDDSTAIRALLHWRATVTEEGFNPHPDKTRIMQQGRRQEVTGIVVNQQLSLERQALKRFRALLFQIEKDGYAGKSWGNGCNLLASIKSYAHYVRMVHPEKGERFLAQIAVIQQKHGKPDGNGRAWGRTTDTFRARSAQGQAPLDGLRVAPVRPAPQLEQLIQHRDVLPQVQAALGLQPVAEATSTDISPSASTEGQAAGESSGGLVSTLLSFYGGDKHAIDPAHNPAFSGRLFRQSL

SEQ ID NO: 6058 - protein, 556 aa, Thiothrix caldifontis
  source 1..556: note = Related to NZ_FNQP01000009.1
MSQLTRQQLYDKIKETSKDEYILSEMQRLGYWKEDAQPTLAASLIKRRGDLQRQINALSSQITDPQAALKAIHQERMAAARQQRIDTKVKREVDRYHRAQAWHEKQQNHIHYLGDAAGFKPSAAADVSDAERLNSLGLPVYSNAAELAAGMGITLNELRFLTYSNQVSRVCHYQHFAMQKKSGGTRLISAPMPRLKRLQYWVLDNILQPLELTEQAHGFVTGRSIVSNAQPHLAQKVVINMDLKDFFPTVTYPRIKGTFAQLGYNNEVASLLALLCSEADTQTVEMDGQRYYLNSTSRRLPQGAPTSPALSNVICRTLDKRLQGLATKHGFAYTRYADDLTFSGTDTAAVPALLYGAKATVTAEGFNVHPDKTRIMKQGSKQEVTGIVVNQHLSVDNKKLKQFRALLFQIDKDGYGDKSWGNGYNILASIKSYAHYVRMVNPEKGSQFLQQIAAIQQKHGKPNVAMKFSTTQFRERAAQGKLPLDAMHVAPIKPAPTLDDTIQHRDVLPQVEAALGLSVPEAVETEPESTPATTPETPNQPQGLVSTLMSLLRGKS

SEQ ID NO: 6059 - protein, 559 aa, Thiothrix sp.
  source 1..559: note = Related to SSFA01000023.1
MTNLTRQQIYDQIKATSKEQFILSEMQRLGYWPNPEAPTLHSELIKRKTQLQQGIRELSQQVDDPQAALKQLHKTRMAEALAKREQTKINRELKRYEKALSWHERRQNQLDYLGDAAGYKPSPNPQDSHSQTLLHYHLPVCSTGKELAALMGVTLNELRFLTYTNQVSTVQHYQQFALAKKTGGTRLISAPMPRLKRLQYWILEQVLQPLALTDQAHGFVQGRSIVTNARPHLGQAVVINLDLKDFFPTITYPRIKGVFEQLGYNHEIATLFALLCSEPITQTVELDGQRYYLAQNPRRLPQGAPTSPYLSNLITRQLDKRLQGLAQKYGFVYTRYADDLTFSSASTEAPTCGLLHWIKAIVQEEGFQLHPDKTRIMHKGRRQEVTGLVVNQQLNIERQTLKQFRALLFQIQKDGYVGKSWGKNRNLLASIKSYAHYVRMVNPVKGEQFLQQIAVIQQTHGVPAQTLKYSTQDFRQRSAQGQLPLATMQIAQASHKPQLEDIIQYSEVIEQIRAELKLAPPQTSLNTETSPPYPPPISEPASLIHNVISLFSGLFRGKL

SEQ ID NO: 6060 - protein, 576 aa, unidentified
  source 1..576: note = Related to JAKIVF010000151.1; note = Methylococcaceae bacterium
MTQLSRQELYDKIKETSKDEYILSEMQRLGYWKEGEKPSVAETLIKKKAELQTEINKLSREIKDPKEALKAIHKQRMAEARQRRIDTKVKQELKRFKSAEEWHKRKQNKIEYLGNACSTNSKSDETAKNTNSDKLRLHQLPTCSTAIQLAEAIAITLNELRFLCYTNEVSKITHYQRFGIHKKTGGVRLISAPMPRLKRLQYWVLDNILQKIPLSNNAHGFVPLRSIVTNAQPHVGKKVVINMDLKDFFPTVGYPRIKGLFANQGYGEEVSILLALICSEPDTQTVEMDGQRYYIHSKERFLPQGAPTSPAISNIICYRMDKRLQGLAKKYGFVYTRYADDLTFSSQDIDKIMPLLNWVKATVTEEGFVVHPEKTRIMHQGVRQEVTGIVVNEQLSVNRKHLKQFRALLFQIKKDGYGNKKWGKGGSLLPTLKGYAHFVKMVNPLKGQQFLTQIQEIIQLHGYPNETPKQGRSTSDFRKAAAQGKLPLGSMQVAQPTLPPDINKMIQHRDVLDLVREELGLPALEDPKQKKETGSSDKPMVQPLTAEDENRSHVNENDINSSGFFSRIKSLFGGDK

SEQ ID NO: 6061 - protein, 562 aa, unidentified
  source 1..562: note = Related to QOAQ01000092.1; note = Aquificaceae bacterium
MTQLSRQELYDKIKETSKDEYILSEMKRLGYWKEGDKPSVAATLIKRKTELQTEIYKLSREIKDPKAALQAIHKQRMAEARQRRVDTKVAYELRRYQRATDWYQRKLSTIDYLGSACVLTQEKKQKIKVLDTAKLARYQLPNISTAKELAEQMGVTLNELRFLCYTNEVSKITHYQRFGIHKKTGGTRMISAPMPRLKRLQYWVLDNLLQKIPLAEQAHGFVPSKSIVTNAKPHIGKKVVINMDLKNFFPTVSYPRIKGVFLSQGYNDEVATLFALICSEPETQTVEMDGQRYYIHSKQRYLPQGAPTSPNISNIICYKLDKRLQGLANKYGFVYTRYADDMTFSSNDASKVKALLNWVKATVTEEGFIIHPEKTRIMHQGARQEVTGLVVNEKLSVSRKQLKQFRALLYQIKKDGYDGKQWGKGGSLLPTIKGFAHFVKMVNAEKGEKFLANIKEIIDLHGYPDADKKQNKTSDDFRKAAAQGKLPLNSMRIATAPPPPDINTMIQNTDVLDLVRKELGLSENNPETTNDTAISSAQSEDNREEGSAGFLARLKTFLGGEK

SEQ ID NO: 6062 - protein, 528 aa, unidentified
  source 1..528: note = Related to JADMKE010000002.1; note = Candidatus Sericytochromatia bacterium
MGLSRQELYEQIKASSKEGYILAEMQRLGFWTESEPQPARELIARKAEIQQEIASLSAKIKDPEAALKLIHKQRMAAALEKRLQTRIKRELKRFQSAHLHHQNKQKKLITLGDAAHFGPKQQATQSEKLQAYKLPEIDTALELAEHAGITLNELRFLTYSRRVSKLSHYQRFEMAKKTGGTRLISAPMPRLKRLQYWILEHILNPLPVTPAAHGFVPQKGILSNARPHIGKKVVINLDLKDFFPTISYPRVKGLFLSLGYGNEVATLLSLLCTEAESQQVEIDGQRYFIAADQRRLPQGSPCSPAISNQICKRLDKRLAGLAQKWNFAYTRYADDLTFSADSSQYLGALFKGLRQILKAEGFVLHPDKTRIMHQGARQEVTGLVVNQGLSVSASTLKRFRALLFQLDKDGLNGKTWAGHSSTEPGFLERLQGFAQYIRMVQPEKGQKLCAHLQAIRQKYPDTGLLSAHSTLPKGKKTAFRQKSANAELPLPGQRVAPVPPPPRLAETILDRGILAEVEAAWQAQGGQV

SEQ ID NO: 6063 - protein, 554 aa, Saprospira grandis
  source 1..554: note = Related to CP002831.1
MQLLSILDQLGFGLSSPKLKVVFFCLNLLPMSDHRMTRQQIYDRIRQTSKEEYILEEMKRLGFWDTTEEAPKISEELIQKKGALRRELRELMEKQRMFRDKERMLAEMRKKRMADALARREETKERRKAEKEARAKAWQEKKERSIVFLGKDYSAGLSEEEADLAKLAALNLPAFKDIKELAEAMDISVGRLRYLCFQRKLSTVSHYERFYLAKKTGGKRLISAPRPMLKNAQYWLLENVLARLEMHEAAHGFVPERSIVSNAKLHEKKELVINMDLKDFFPTVTYPRVKGMFKGLGYSEQQSIIFALLTTEPEVDQVEIDGQLYYAQKGERYLPQGAPTSPAITNWLCRRMDRRFEGVAKKLGWTYSRYADDLSFSANDTSNISRIIWQAQQIIQDEGFVIHPKKLKIMRKGRRQEVTGLTVNEQVAVDRKTLKKFRACLHTIETKGYQAAEWGQGFILASIKGFANYVRMVQAEKGQALCEQVDRILAKEENKQAWKAYFANPSRKKYAYEAQKQQATIEANAVDFGSSGLAESLTPVDPQQKDEEQWWSLW

SEQ ID NO: 6064 - protein, 500 aa, unidentified
  source 1..500: note = Related to JABWAJ010000099.1; note = Saprospiraceae bacterium
MTRQEIWDRIKELGGRDEFILHEMKRLGFWDVSEGVPQLSESLREQRKSLEGELKEALQQQAVYKNKKKMLRDMRQKRMAEAKARRVETKERRERQRAEKAAAWAEAQQQDIGWLGPAVSAGLQQKESNVPQLESFGLPVFNGVKGLAEAMNLPLNELRFLAFDRQVSRTCHYQRFKVAKKTGGFREISAPAPRLKKAQHWILDHLLYKLQLHEAAHGFVPQRSILSNALPHVGAQVVINMDVKDFFPSVSYRRVKGVFQSLGYSEQLATILGLICTEPQTDEVTLDGQRFFVAKGDRRLPQGAPTSPAITNILCRGLDRRFEGMAKALGWTYTRYADDLTFSKKATDARDVNRVLWQARQIVENEGFVLHPDKIKVMRKGTRQEVTGVVVNEKPNVSRAKLKQFRAVLHRIETQGLSAADFGKGQVLESIQGFANYVWMINPEKGAALKAQVKNILAKPELQQVLAQKNTYPEKGKVAIFTPYKDKEVQPLSTDWWRLW

SEQ ID NO: 6065 - protein, 517 aa, Sulfurovum sp.
  source 1..517: note = Related to CACVAP010000086.1
MTRQELYDEIKKTSKDSYILSEMKRLGFWDSAKPKVAQELIEKKTALQKELNGLSTKIRNPEAVIKDIHKQRMADALLRREETKAKKEKIFQENLAKRQEKKNSELGFIGHAFMADLDEKESNQKLLNENNLFLIKDAKDLASKMGITLKELRFLTHTQKLSNRTDYVHFKMVKKSGGFREISAPKPQLKRLQYWILENILNKVAVSNEAHGFVAKRSIVSNAKPHLQKALVINCDLENFFPTLSYARVKGLFKSLGYSVELATILAILTTEAEQKEVLLDGEKLYLYTGKRYLPQGSPASPMITNLICRKLDKRMSGISKSLDFNYTRYADDMTFSSDTYLNINKMMFWIKGIVKEEGFILHPKKTKIMKKGARHEVTGIVVNEKLSVNRKNLKKFRALLYQIEESGLEGKRWQGKSENLMASVWGYANFINMVDPEKGAKYKKQVEVLLEKYPLGNLGSSSGEFRAKSAKGEQPWESKVQEIEAKTLEPEMQVKEVAEQKETPSFVNNILSMFRK

SEQ ID NO: 6066 - protein, 520 aa, Sulfurovum sp.
  source 1..520: note = Related to CACVAX010000056.1
MTRQELYDEIKKTSKDSYILTEMKRLGFWDNAKPKMPEELIEKKTELQHELNQLSTKIKNPASVIKEIHKQRMADALVRREETKAKREAQAQKKAKERAEKKENKLGFIGHSFIHDDETSAKLELLVTNNLFLIKDAKDLANKMGIDLKALRFLTYTQKLSRQSNYVHFKMAKKTGGFREISAPKPQLKRLQYWILENILNKVAVHEKAHGFVTNKSIMSNAQPHIGKAVVINCDLENFFPTLDYGRVKGLFKSLGYSAEVATILAILTTEAQQKEVTLDGEKLYLYTGKRYLPQGSPASPMITNLICRKLDKRMSGIADSLAFTYTRYADDMTFSATAYQNINKMMFWIKKVTKEEGFILHSKKTKIMKKGACHEVTGIVVNEKLSVNRKELKKFRALLYQIEQHGLEGKSWQGKTENLMASVLGYANFINMVDPVKGADYLKRVKALLQKYPMPSLGLSDKTFRIKSAEGKQPWESKPVFLVTEETRVVSSKELGEEASKTTLENPSFLNNILDMFRK

SEQ ID NO: 6067 - protein, 521 aa, unidentified
  source 1..521: note = Related to DQOI01000098.1; note = Campylobacterales bacterium
MTRQELYDEIKKTSKDSYILSEMKRLGFWNNSKPKVATELIEKKTKLQQELNQLSTKIKNPEAVIKDIHKQRMADALVRREETKAKREAKEQEAIKNRREKKENNIGFIGGSFISDINEQEANTELLKSNNLFLIKDSRDLANKMGINLKQLRFLTYTQKLSNRTDYVRFKMAKKTGGFREISAPKPKLKRLQYWILDNILNKVEVSEQTHGFVVKRSIISNATPHINRAVVINCDLQNFFPTLSYPRVKGLFKSLGYSAEIATILAILTTEAEQKEVVLDGEKLYLYTGKRYLPQGSPASPMITNLICRKMDKRMQGIATTLNFTYTRYADDMTFSANEYPNINKMLYWVKGITKEEGFTLHPEKTRIMKKGSCQEVTGVVVNEKASVNKKELKKFRALLYQIEQTGIEGKSWHGKSENLVAVIWGYANFIKMVDSEKGAKYMAQVKAIMEKYPSLNITSTTNEFRVKSAKGEQPWEDEIIEEIEEVTEVVTDQTKTNVQEKEVPTTPSYINNILNMFRK

SEQ ID NO: 6068 - protein, 629 aa, Leucothrix arctica
  source 1..629: note = Related to NZ_QGKL01000042.1
MFNSAPGQLTRQELYDKIRETSKDEYILAEMKRLGFWESDDDKPEVPETIIKRRGELQRQLNDLLKQQRLYSDPEEALKALRKERMQAALQKRVETRKKKADERHERALTWHEKQQHTISWLGEAVSLGLTAPTADSNASHQGSTTSLSSDQAVSAHGANTQNEAVNNASGMKHQDLPTFDNHKALAESIGITLNELRFLSFQRSTSKVSHYQHFQIAKKTGGFREISAPMPRLKRAQYWVLDNILCHVPLHEAAHGFVAGRSILTNAKPHVGQAVVVNLDLQNFFPTISYRRIKGLFHKMGYDESIATVLALLCSEADTQKMELDGEQWFVQQGEQHLPQGAPTSPTISNIICRSLDVRLQGLAKKHGFNYSRYADDMTFSGDKTARESLRKLLWGVQAIVADEGFILHPDKTRIMNKGQQQEVTGIVVNDYPSIDRKTLRRFRALLHQVEQTGIQGKSWNGVSEPEHLLRSMLGFSNFVAMVLPEKGEAFKQQAKALYEKHSNKVGTKTIGQLRKAEFRKRAAAGQAPWESWKEAPVKIAPVREKTVDELQEERNQVLAERREAKKIEKEQQDRQRSRRGGFPGASRSDSRREDDRWNLPEDSSGDNGPNVIIRFLGFIGSLFTGKK

SEQ ID NO: 6069 - protein, 559 aa, unidentified
  source 1..559: note = Related to PDPH01000009.1; note = Proteobacteria bacterium
MSNSNSRQQWYDRIRASSKDAVILAEMKRLGFWQDTDVPTLSETIIQRRSELQSELSRLYHQKNLYQHPEQALKAMRKQRMQKAREQRALTQRKQAELRQQRARNWYEQHQNGIVWLGEGISAGLQDLSSDIERLQAHDLPVLHSPKMLAEAMGITLNELRFLAYQRKTSRINHYQRFQIVKKTGGLRDIAAPMPRLKRVQYWLLDNILHKLALHNAAHGFVLGRSIISNAQPHTAKALVINLDLENFFPSIRYARVKGLFKSLGYSESLATVLGLLCTEAAVDEIILDGETWFVMRGERHLPQGAPTSPMISNLLTRSLDRRLQGIATKYGYAYTRYADDLSFSCEKPYTANVTRLLWAVRQTVQEEGFKLHPDKTRLMHQGRRQEVTGLVVNQHLSLERKTLRRFRALLQQIEHTGWQGKHWNGVTDPIRLQQFVWGYAHFVAMVLPDKGAQFKAQLNRIQHIHFGGVVNKKYQSAQNSKAQFRVLSAKAQAPLVSWKQAQARPLVLLETIQQPLAQTQHEPVEQAASGIIEQQSAVTEVKQAPLAGLVAWLRSLLR

SEQ ID NO: 6070 - protein, 634 aa, Ideonella sp.
  source 1..634: note = Related to PTEU01000001.1
MSERTPTRAELLARIAQSSKDAVVLAEMQRLGFWPKDTTQPTLEAALIEREAELAQALNGLQEELRVKGDPQAALKAMRQERMARAREQREAHAQAREQQRYERALRWHQARTQQAGFLGLGVSGGLQAEADPAACAARLERHGLPVLNTALELAEAMGLSVPELKFLCFHREVATTTHYRRFNLPKKTGGVRTISAPMPRLKRAQYWVLDQVLAKVACHEAAHGFVPGRSIVSNAAPHCGQAVVINLDLKDFFPSIHFPRIKGVFKGLGYGEAVASMLALLCSENACDELEVDGERFFVGGKGRDRVLPQGAPTSPMLTNILCRKLDRRLQGLAQKLGFTYTRYADDLTFSASDEGAARVGSLLRQVHHVLRSEGFTPHPDKQRVMRQGARQEVTGVVVNAKPSVSRTERRKLRAALHRANTQGLGAATWQGQPATNEVLTGYARFVRMVSAQQGQPLLQQALALPSAKTAATAARGNSFRQRATQGQAPLRQQGGEWWQVIPPPVPQLALTAGQIKAARQERLNAERAARQSALQAQRLADGNSSASRPSAASTGASAAEHTEHQNTAAPVAWWRFFFQLFIIIKLAASFKSALVLMLGALILGQALMTRSLGWGRFALTVIVLALVGSLLR

SEQ ID NO: 6071 - protein, 633 aa, Ideonella paludis
  source 1..633: note = Related to NZ_JAGQDG010000004.1
MTERTPTRAELLARIALSSKDAVVLAEMQRLGFWPKDAAQPTLESALIQREAELQQALNELQDELRVKGDPQAALQAMRQARMARAREQREAHAQVREKARYERALRWHQARDTEVGFLGLGVSGGLQADADPAGTTARLVRSGLPALSTPLELAQAMGLGLPELKFLCFHREVARTTHYRRFDLPKKTGGVRTISAPMPRLKRAQYWVLDQILVKVPCHDAAHGFMPGRSIVSNAAPHCAQAVVINLDLKDFFPSIHFPRIKGVFQGLGYGEAVASLLALLCSENVCDELEVDGERFFVGGKGRERVLPQGAPTSPMLTNILCRKLDRRLQGLADKLGFTYTRYADDLTFSASEEGATRVGSLLRQVHHVLRSEGFTPHPDKQRVMRQGARQEVTGVVVNAKPSVSRTERRKLRAALHRAKTQGLAAATWQGQAASRDVLVGYARFVRMVSAPQGQALLQQALALPGTAPSAAAARADAFRVMAAKGQAPQRRQGAWWQPTPPPLPQLALTAQQVKTARQERLNAERAARQAAKRPAAPAQGRDANTQAPGMSHTQGHTPDAPTTSAPPVSWWRFFLQLFILIRVAVGLKSALFLMLGALCLGHALMTRRQGWIRFALTLVILAVLSSFTKL

SEQ ID NO: 6072 - protein, 634 aa, unidentified
  source 1..634: note = Related to NZ_QUSW01000004.1; note = Proposed Albitalea terrae
MSERVPTRAELLARIALSSKDAVVLSEMQRLGFWPQNATQPTIEAALIEREVELQKALSELQDELRVKGDPQAALQAMRKERMARAREQREANAQARERQRHERAMRWHEARKTEAGYLGDGVSGGLQVDAEAAAVKARLQSRNLPALSTPLELAQAMGLTLPELKFLCFHREVARTTHYRRFSLPKKTGGVRTISAPMPRLKRAQYWVLDNLLAKVPCHDAAHGFLPGRSIVTNAAPHCAKAVVINLDLKDFFPSIHFPRIKGVFQGLGYGESVASLLALLCSENACDELEVDGERFFVGGKGRDRVLPQGAPTSPMLTNILCRKLDRRLQGLASKLGFAYTRYADDLTFSAPAESADKVGRLLRQVHHVLHDEGFTPHPDKQRVMRRGARQEVTGVVVNAKPSVSREERRKLRAALHRAGQQGVEAATWQGHAATRDVLVGYARFVKMVDARQGQPLLQQALALPGANASLAAGKPDVFRIQAAKGEAPARKQGAWWQPAPSPEPQLALTAMQIKTARQERLNAERAARNEAKRQEQIARGEAPAPRRPQPSAEAMASAAQMTGAVHKPIAWWRYAIQLVIVIRLAVGLKSPLVFMLGMLWVGYAVMTRQLGWWRFAIAILGIAILGSVLNV

SEQ ID NO: 6073 - protein, 628 aa, unidentified
  source 1..628: note = Related to RXJW01000018.1; note = Burkholderiales bacterium
MSERMPTRAELLARIAASSKEDVVLAEMRRLGYWPGEAGQPVIQAALLEREAELQQALSALQEELRVKGDPQAALQAMRRERMAQAREQREARAQARERERYERALRWHERRKMEAGYLGPGVSGGLGAEVDPEAVKARLAAAGLPALTTPSELAQAMGLSLPELRFLCFHREVARTTHYRRFQLPKKTGGVRTISSPMPRLKRAQYWVLDNLLAKVPSHAAAHGFLPGRSIVSNAAPHCGQDVVINLDLKDFFPSIHFPRIKGVFRGLGYGDAVASLLALLCSENVCDELSVDGERFFVGGKGRERVLPQGAPTSPMLTNLLCRKLDRRLQGLALKLGFSYTRYADDLSFSAAGDAAQRVGRLLRQVHHVLRDEGFTPHPDKQRVMRRGARQEVTGVVVNDKPSVSRAARRQLRAALHRAGRQGVQAATWQGEAATRDVLVGYARFVHMVNAAQGQPLLKQALALPGASSHAPRPDAFRAQAVKGVAPARRSGPWWEVVPAPEPQLALTAGQMQAARQARLNAERAQRSGKPAVAPSAQPATATPGARPVARPAPVAEQPVPWKRYGLQVFGYAFMALVLHSAAFLFLALIWHSQSLKKRDLGWGRFGLGVFVLSIVAVMLKGLLAR

SEQ ID NO: 6074 - protein, 638 aa, Aquabacterium sp.
  source 1..638: note = Related to SCTF01000217.1
MSDRIPTRAELIARIMLSSKDAVVLAEMQRLGFWPADAGKPTLESALIQREVELEQALQGLYAQLRVKGDPEAALKAMREERMARAREQREATAQARERRRFERALRWHEARKTDIGYLGAGVSGGLQPPPAAAPARTLQPGLPPLASPLELAQAMGIALGELKFLGFHREVARSTHYRRFTLPKKTGGERTISAPMPRLKRAQYWVLDNILAKVPCHDAAHGFLPGRSIVTNAAPHCARAVVINLDLKDFFPSIGYPRIKGVFQGLGYDERVAGVLALLCSENACDELEVDGERFFVGGKGRDRVLPQGAPTSPMLTNILCRKLDRRLQGLADKMGYTYTRYADDLTFSAPPEAADRVGRLLRQVDHVLHDEGFTPHPDKQRVMRAGSRQEVTGVVVNQKPSVSRDERRRLRAALHNAQRNGIEAATWQGRPATRETLVGYARFVQMVDAHQGAGLFAQALALPGGAHAARPARAGAFRRSAAQGQAPALARGAWWQPAERPAPRLAQTAGQMKAARQERLNAERAERNAAAKPARDAAREEARRHEQQERRAAQRAAAETARQSLRQQPALTWRHWLQYAIQLYIVIRVATGMKSAVVFAAGMAWVGYSMMTRKTGWLRFIVAMVVIALVGAMIRL

SEQ ID NO: 6075 - protein, 628 aa, Caenimonas sp.
  source 1..628: note = Related to VOBQ01000016.1
MSAPQPTRAELLERLRKSSKDAVILEEMQRLGFWPAGSGAPTVEEAMIQREVELAKALEQVRSQLGTRTDPESALKQMRKERMAEARARREANAQAREQRRLDNALRWHERSGQEIAYLGDQVSAGLYPGHAAVRPERLARHGLPLFETPLQLATAMGVPLAELKFLGFHREVARTSHYRRFRLPKKTGGERTISAPMPRLKRAQYWVLDNILARVPVHAAAHGFVPGRSITSNAAPHCGQAVVINLDLKDFFPGVAFPRIRGVFRGLGYGEDVATVLALLCSENPADELVVDGELFFVGRKGRDRTLPQGAPTSPMLTNVLCRKLDRRLQGLAGRFGFAYTRYADDLTFSAPPEGSASVGRLLRQVHHILHDEGFTPHPDKQRVMRSGARQEVTGVVVNREPSVARSSRRRLRAALHRAQKSGVAQAHWEGAPANAGQLQGHAQFVRSVNARQGAPLVAQARMLVRSPHTLAAAGSGAAFRQRAAAGQAPMRPGDRAWWSPAAKAAPQLQLTQEQKKAERAERRARRRDEARAAAQPARGERAAGAGPGPFTTPPEIPISWWRFGFQLFFVLWFASATRSSLVFMGGAAWFGWSLAQRRQGWPRFLLGMLIVFLASVVIQGFWRHRY

SEQ ID NO: 6076 - protein, 621 aa, Rhizobacter gummiphilus
  source 1..621: note = Related to CP015118.1
MSERVPTRAELLARIQASSKDAVVLAEMQRLGFWPAGSGTPTLEAALIEREVELTKALDGLHAELRVKGDPEAALLAMRKERMAQARERREATAQAREQRRFERAQRWHEARKTDAGYLGAGVSAGLQAPAAEGRALAPGLPPLASPLALAQAMGIALPELKFLCFHREVARTTHYRRFTLPKKTGGERTISAPMPRLKRAQYWVLDNVLAKVPLHGAAHGFVPGRSIVSNAAPHTGKAVVINLDLKDFFPSVTYPRIKGVFRALGYGEHVATTLALLCSENAADELEVDGERFFVGGKGRDRVLPQGAPTSPMLTNILCRRLDRRLKGLAAKLGFTYTRYADDLTFSAAPEGTTQVGQLLRRVHHVLRDEGFTPHPDKQRVMRASSRQEVTGIVVNEKPSVSRTERRRLRAALHTAQRKGLEAATWQGQPATRDTLVGYARFVQMVDARQGAALLPRALALPGSAAAVSPFPSRFRRQAAKGEAPTLASGTWWQPAEPAAPTLALTAGQVKAARQERLNAERAARRADAEAEVERMSATEDVAHGEDADDTPTTAQPPIRWWSLAIQFFLVVQLASGAKSAIVFTLGIAWLVFSLVTRKTGWWRFVFAMMCILAIVAGLK

SEQ ID NO: 6077 - protein, 657 aa, Mitsuaria noduli
  source 1..657: note = Related to NIOE01000004.1
MSDRVLTRAEIIERIRASSKDAVVLEEMQRMGFWPAGDGKPGIEAALIEREIELTRALDEVQATLRTHSDPEAAMKAMREQRMAESRARREATAQAREQRRHERALRWHAARRTDAGYLGAGVSGGLQSPAADAIHTTDATGVTGEPGAKPRALLDGLPALATPLDLAGAMGLTLPELKFLCFHREVARTTHYRRFLLPKKTGGQRTISAPMPRLKRAQYWVLDQLLAKVPCHAAAHGFLPGRGIVSNAAPHTGRAVVINLDIQDFFPTITFPRIKGVFRGLGYDERVATMLALLCSENPCDELEVDGERFFVGGKGRDRVLPQGAPTSPMLTNVLCRKMDRRLQGLADKLGFTYTRYADDLTFSASGEGAAKVGTLLRQARHVLLDEGFTPHPDKQRVMRAGSRQEVTGVVVNEKPSVSREERRKLRAALHKATRDGVEAATWHGHPATREVLVGYGRFVAMVDRQQGATLLKQALALPGGSAKKRSAFGALFRKKAAEGEAPTLARGAWWQPADRPEPVLQQTAAQIRAARQERINAARTERRGGAAPKPDQYQQRRQEQSNRAAENAARWSAATSAASGAAPRAGHPINWGLYARQFGVMTLAAFLIASWLVFFGGLAHLALRIKTRSTGWGEFWIGLILLIAAAVKFFPHSTA

SEQ ID NO: 6078 - protein, 638 aa, Mitsuaria sp.
  source 1..638: note = Related to JACHYU010000002.1
MSDRVPTRAEIVERIRASSKDAFVLEEMQRLGFWPAGEGKPSIEAALIQRELELMKALEDMQQELRSHSDPEAALKRMREERLAQARAKREATAQAREQRRHERALRWHEARKTDAGYLGEGVSGGLRPAAAGAPARPLADGLPTLATPLELARAMGLTLPELKFLCFHREVARTSHYRRFLLPKKTGGQRTISAPMPRLKRAQYWVLDQVLAKVPSHAAAHGFLPGRSIVTNATPHAGREVVINLDIQDFFPTITFPRIKGVFRGLGYDERVATMLALLCSENPCDELEVDGERFFVGGKGRDRVLPQGAPTSPMLTNVLCRKMDRRLQGIADKLGFAYTRYADDLTFSASGEGAGQVGTLLRQVRHVLKDEGFTPHPDKQRVMRAGSRQEVTGVVVNDKPSVSREERRKLRAALHKASREGVEAATWQGQPATREVLVGYGRFVAMVDREQGAPLLKQALALPGGAAKRRSAFGALFRQKAAAGEAPVLARGAWWQPAEPPEPVLQQTAGQIKAARQARLNDERTARRGGKPPAPSRADQRRAEQAQRLADHEAQRAARRSAGAAPGAAGADRPWLLYVKQFALLLGIAAGLKSELILYAGVIHLLLRIKSRDRGWWEFWLGIGLLVLVNALLFRR

SEQ ID NO: 6079 - protein, 647 aa, Roseateles terrae
  source 1..647: note = Related to NZ_JACHXO010000001.1
MTERMPTRADLIERIRTSSKDAVVLQEMQRLGFWPQGEAQPTLEAALIEREAEVTQALQGLQERLRVIQNPEAALQAMRKQRMQESLIRREAAAQLREQRRHERALRWHEARKTQVPYLGAGVSGGLSLPTAQAPARALQAGLPSLDTPMALAQAMGLTLPELKFLTFHREVARTHHYRRFLLPKKTGGHRTISAPMPRLKRAQYWVLDNVLAQVPCHAAAHGFLPGRSILTNAKPHVGQDVVINLDIQNFFPTITFPRIKGVFQGLGYPEPVATMLALLCSENPCDELVVDGEAFFVGGKGRDRVLPQGAPTSPMLTNVLCRRMDRRLQGLAHKLGFTYTRYADDLTFSGSGEAAALVGKLLRQVRHVLKDEGFTPHPAKQHVMRAGARQQVTGVVVNDQPSVSRQERRKLRAALHRARHQGMEAATWHDQPATREVLLGYSRFVAMVDAAQGAPLIAQAMRLPGPAAPPRSGDAAAFRTKSAEGQAPQLKRGSWWQPAERPAPVLQLTDAQRKDARRDKRAAALGQPSPAAVGGAPSRAAVASAGLAGTPVPGATGGASAASARGAADAAHPANATKLPPPPWAQYGFQSSLLLFLWIAGVSSFVVVGGFAHMAFRFKKREGGWNGFWTGLGVLLLIQWLVRALT

SEQ ID NO: 6080 - protein, 623 aa, Rhizobacter sp.
  source 1..623: note = Related to LMDI01000056.1
MTARQPTRAELIERIAASSKDAVVLDEMRRFGFWPADAGKPSVEAALIEREAELVQALNRLQAVVRERGDPVAALKAMRKARMAQARERRETTAQAREQKRHERALRWHAARASHAGYLGQGVSGGLQAPTDAEAALARLREGGLPLLATPQALAEAMGLSVPELKFLSFHREVARVTHYRRFALPKKTGGERIISAPMPRLKRAQYWVLDNVLAKVPCHAAAHGFLPGRSIVTNAAPHAGQGVVINLDLKDFFPGVAYPRIKGVFAALGYPEAVATVLALLCSENVSDTLEVDGEPFHVGGTARERVLPQGAPTSPMLTNILCRRLDRRLQGLAAKLGFRYTRYADDLTFSASGDGEALVGRLLRQVHHVLKDEGFTPHPDKQHVMRRGARQEVTGVVVNDGPSVSRTQRRALRAALHRAGTAGGGQATWNGTPASRDTLLGQAQFVRMVNATQGGKLVTAARALPVGGEAVRPRAADTFRQRSARGEAPLRAEGAWWVPAPRPVPQLQLTAGQIQAQRQAARQARQQAARATEPAPAATETATETATAEGDTPVLTPPQVAVPWVTFGIQAGLMMLVAARSGSALALLLASGWLGYALLRRKFGWLRYAVALAVLTRLTLG

SEQ ID NO: 6081 - protein, 640 aa, Ideonella azotifigens
  source 1..640: note = Related to NZ_JAJNKD010000004.1
MSGERQPTRAELIARIAASSKDAVVLKEMQRSGFWPADAAAPTVEAALIQREAELVQVLNKLQAELREKGDPQGALKAMRQQRMAEARERREATAQKLERERYERAVQWRERSRHEIGYLGQGVSAGLQARADNAGSHEKLQREGLPLLDTPQALADAMGVPVAELRFLAFHREVARTQHYRRFSLPKKTGGVRTISAPMPRLKRAQYWVLDNLLAKVPVHAAAHGFLPGKSIVSNAAPHVGQAVVINLDLKDFFPSVSFPRIKGVFRALGYGEATATLLALLCSENVCDELQVDGERFFVGRTARERVLPQGAPTSPMLTNILCRTLDKRLQGIATKLGFTYTRYADDLSFSASGNAAGLTGRLLRQVHHILKAEGFTPHPDKQHVMHAGRRQEVTGVVVNQQPAVSREQRRALRAALHRAKHKGLDAATWQGEPAARNVLLGYAQFVAMVNARHGAPLLAQAKALPSAATPAAKVPPSQFRQHAAAGKAPPRANGLWWQPAPKPEPVLLKTAGQIKAERRAHLAAQRAERDAARKAAEIASSPRRALRAAMQAAAAAPAPEGGAPQETHAPLLPLIRWPLVIAQAALLVYLSVKLKSPGLFLAGGLWLGWRVMRRKFGWPSYFLALFVIGFVAGILHL

SEQ ID NO: 6082 - protein, 630 aa, unidentified
  source 1..630: note = Related to nan
MSDRQPTRAELIARIAASTKDAVVLQEMQRLGFWPQGSGEPGIEAALIEREAALVQRLNALQAELKIVGDPQAALQAMRRERMAAAKARREATAQAREQRRHERALQWLERSRDAIGHLGHGVSAGLSPQPLEADDRRRLEATGLPCIDTPLALAQAMGIGVAELKFLCFHREVARTQHYRRFGIPKKTGGVRTISAPMPRLKRAQYWVLDALLAKVPLHAAAHGFVPGRSIVSNAAPHAGRDLVINLDLKDFFPSITFARIKGVFRRLGYPEQIATLLGLLCSENVCDELQVDGERFYVGRTARERVLPQGAPTSPMLTNILCRRLDRRLQGVAAKLGFTYTRYADDLTFSACGEAAGRSDRLLRQVHFILRDEGFTPHPDKQRVMRAASRQEVTGIVVNERPGVSREQRRALRAALHRAQQKGMEAATWQGQPARKDVLVGFAQFVAMVQPAQGQALLARAKALPATGTKAAAAAPSRFREFAGQGKAPPRAAGPWWEPAPKPLPVLQKTAGQLREERRARLAEARALREGRPPRTAATPTAPSASGSPPSSATAPTGPNAKAGPVNWDAWLLQLGMMVLMSVRLHSAVFFLLGAIWMGSRLVRRRFGWPSFIAVLLAVGLAAEWLKP

SEQ ID NO: 6083 - protein, 671 aa, Diaphorobacter sp.
  source 1..671: note = Related to NZ_CP049905.1
MSNPQPTRAEIFERIKQSSKQEVILEEMQRLGFWPRSEGQPEVAADLIQREGELQRELAELNKKLAVKRNPERALREMRKQRMKDARDKREVTKRAQAQQRYDKALLWHEKRASHVAYLGPGVSASLHENSSATQEQGDKGKPKRARDRAVPDLQRLTLNGLPALISAAQLAESMGVSVAELRFLSFHREVARTNHYHSFTLPKKTGGERLISAPMPRLKRAQYWVLDNVLAKMPAHDAAHGFLAGRSIISNAKPHAGQDVVINLDVKDFFPSIAFGRIKGVFRQLGYGESIATVFALLCSENRAQAWQVDGERLFVGGKARERVLPQGAPTSPMLTNLLCRRMDRRLLGLAKQLGFVYTRYADDLTFSASGEPARDNVGKLLSRVRWILRDEGFTPHPDKERVMRKGRRQEVTGLVVNSDTPSVSRETRRRLRAALHRASQPDAASKPAHWQGHTAQPSQLLGLATFVHQIDPKQGKTLLADAQQLMRSPIDRANDAAKSASRADAAQQSFRVLAAAGKPPVLADGKNWWQPAPPATPVLEKTDQQRREERQATRRQQAAAAAPPPSSTRRNERPQQAAHEQQGDAQPQNEAPPRFDPDQYAPPPRNVMTYWAQIAISFFLGSILHNRLITIFAMVAVIALYYMRRQRWDVFMGILVVATLLGYLVRGMG

SEQ ID NO: 6084 - protein, 673 aa, Diaphorobacter sp.
  source 1..673: note = Related to NZ_CP049910.1
MSNPQPTRAEIYERISQSSKQEVILEEMQRLGFWAKDSGQPQLAEELIRREGELQRELSELHKQLAVRRDPERALREMRKQRMKDARDKREVTKRAQAQQRYEKALAWHDKRATHVGYLGPGVSASLQDADEPIAQSDKKPKRARDRAVPDLTRLAVNGLPALTSAAQLAQSMGVSVAELRFLSFHREVARSHHYHSFTLPKKTGGERLISAPMPRLKRAQYWVLDNVLAKMPAHDAAHGFLAGRSIISNAKPHAGQDVVINLDVKDFFPSIAFGRIKGVFRQLGYGEKIATVFALLCSENRAQVWQVDGEKLFVGGKARERVLPQGAPTSPMLTNLLCRRMDRRLQGLAAQLGFVYTRYADDLTFSASGEAAHDNVGRLLGRVRWILRDEGFTPHPDKERVMRKGRRQEVTGLVVNGDTPSVSRETRRRLRAALHRASQPGAAAKPAHWEGHAAQPSQLLGLATFVHQIDARQGKPLLASAQQLMRNPIDRANDALLAASRADRATTTNAGDFRRLSAAGHPPVRADGKTWWQPAEPSAPVLEKTDQQRREDRKAARQSAQPQPQLQLQPQTGGNANGTARTSQSGNRQQNASQTAPQSDPPKERGTRNMMVYWAQIAITFFLGSILHNRLITIFAMVAVIALYYMRKQRWDVFMGILVVATLLGYLVRGVG

SEQ ID NO: 6085 - protein, 678 aa, Diaphorobacter aerolatus
  source 1..678: note = Related to NZ_CP060783.1
MSNPQPTRAEIYERIAQSSKQEVILDEMQRLGFWPKAEGQPQLAAELIHREGELQRELSELNQQLGVRRDPERALREMRKQRMKNAREKRETTKREQAKKRHERALAWHARRASHVGYLGPGVSAALVDGPLTQQEQEQTSRRTRDRAIPDLPRLARHGLPALSSAAQLAESMGVSVAELRFLSFHREVARTHHYHSFTLPKKTGGERLISAPMPRLKRAQYWVLDNVLNKIPAHEAAHGFLAGRSIISNAAPHAGQDVVINLDVKDFFPSIAFARIKGVFRQLGYGEGVATVLALLCSENRAQAWQVDGERLFVGGKARERVLPQGAPTSPMVTNLLCRRMDRRLQGLARQLGFVYTRYADDLTFSASGEAARDHVGKLLGRVRWILRDEGFTPHPDKERVMRKGRRQEVTGLVVNGPSPSVSRKTRRRLRAALHRASRSAADASTSTQAHWQGQQAQPSQLLGLAQFVHQINARQGRQLLADAQQLMRSPLDRANDALLAASRQDQRSASSSSPASFRALAAAGRAPVRTNGEPWWQPAAALEPVLEQTDLQRREARQLARHGASSASGASSNRRSSSDSHFGRGPQSGSSRQEDQGNASGRFSFDDAAGRDDQGASKDKPAGRLGTYWMQMVICFVMGSILHNRLITIFAMIAVIVLYYMRRQRWDVFMGVLVGL

SEQ ID NO: 6086 - protein, 673 aa, Diaphorobacter sp.
  source 1..673: note = Related to NZ_CP060714.1
MSAPQPTRAEIYDRIKTSSKQEVILEEMQRMGFWPQGEGEPQVAADLIQREGELQREMSELREQLAVRRNPERALREMRKQRMKQARDQREETRRRHAQERHDKALAWHGTRASHMGYLGPGVSAALHAPGQDGSADGASGRKPARERSAPDLRRLALNGLPALTSGAQLAEAMGVSVAELRFLSFHREVARTHHYHSFTLPKKTGGERQISAPMPRLKRAQYWVLDNVLAKMPAHDAAHGFLAGRSIVSNARPHAGQDVVINLDVKDFFPSIAFGRIKGVFRQLGYGEGIATVLALLCSENRAQAWSVDGERLFVGGKARERVLPQGAPTSPMLTNLLCRRLDRRLQGLAAQLGFAYTRYADDLTFSASGDAARDHVGKLLSRVRWILHDEGFTPHPDKERVMRKGRRQEVTGLVVNGSQPGVSRQMRRKLRAALHRASHAAPGDAPAAHWQGQAAQPSQLLGLAQFVQQVDAQQGKALLASARQLVRDPVARVNDALREAAAEDRLAAASEAAVSFRQAAASGRSPVRANGEGWWQPEQKAAPVLEQTDQQRREARQQARRQSLAAASPASPETAPGNGARRVQGVPAEGVSPAQPGKAPEASGLPPVRRMLRYWSQMGLCFLLGSILHNRLITIFAMVMVIALYYMRKQRWDLFAGVLVIATLLGYLVRS

SEQ ID NO: 6087 - protein, 669 aa, Delftia lacustris
  source 1..669: note = Related to CP065748.1
MSQPQPTRAEIYERIKASSKQEVILEEMQRLGFWPKDEGQPQLAAAHIQREGELQRELAELRQQIAVRQNPERALRQMRKERMQKALAQREETKRRQAQERHDKALAWHARRSTHVGYLGPGVSAALQDAARDGTERRQADPQRLARHGLPQLADAAQLAQAMGITVAELRFLGFHREVARTHHYHSFTLPKKTGGERLISAPMPRLKRAQYWVLDNILAKVPAHDAAHGFLAGRSIVSNAAPHAGHDVVINLDVKDFFPSIAFGRIKGVFRHLGYGEAMATLLALLCSENRAQAWQVDGEKLFVGGKARERVLPQGAPTSPMLTNLLCRRLDRRLLGLARQLGFVYTRYADDLTFSASGEAARDNVGRLLGRVRWILRDEGFTPHPDKERVMRKGRRQEVTGLVVNADKPGVSRQTRRRLRAALHRATQAGTGLPGQSVQPAQVPHWQGQPAHASQLLGMAQFVHQVDPVQGGPLLAQARQLTRSPVDRANDALLEASRQDRAAARAKPPANATFRRLAAGGQAPALASGKPWWQPAAPAAPVLEKTDQQRREQRQEERQAARQAAGPAPGAASTLPAASTSPSPSPSPAAPDPNPPASKRPPMAGLLTYWAQIVICFLLGTVFQARLITLIGIVLVVILRYRRIQRWDVFGAAMVVAVLVGLGLRLS

SEQ ID NO: 6088 - protein, 631 aa, Delftia lacustris
  source 1..631: note = Related to NZ_CP069318.1
MSQPQPTRAEIYERIKASSKQEVILEEMQRLGFWPKGEGQPQLAAAHIQREGELQRELAELRQQIAVRQNPERALRQMRKERMQKALAQREETKRRQAQERHDKALAWHARRSTHVGYLGPGVSAALQDAARDGTERRQADPQRLARHGLPQLADAAQLAQAMGITVAELRFLGFHREVARTHHYHSFTLPKKTGGERLISAPMPRLKRAQYWVLDNILAKVPAHDAAHGFLAGRSIVSNAAPHAGHDVVINLDVKDFFPSIAFGRIKGVFRHLGYGEAMATLLALLCSENRAQAWQVDGEKLFVGGKARERVLPQGAPTSPMLTNLLCRRLDRRLLGLARQLGFVYTRYADDLTFSASGEAARDNVGRLLGRVRWILRDEGFTPHPDKERVMRKGRRQEVTGLVVNADKPGVSRQTRRRLRAALHRATQAGTGLPGLPGQSVQPAQAPHWQGQPAHASQLLGMAQFVHQVDPVQGGPLLAQARQLTRSPVDRANDALLEASRQDRAAARAKPPQTPRSGAWQPAGRHLRWPAASHGGSRPHPQRPCWRRPTSSGASSARRNGRPPGRRLALPPASQAPCPRHRPLHRHRHHRPHRTRIRPHRKGRRWPACSPTGRRSRSASCWAPCSRPG

SEQ ID NO: 6089 - protein, 660 aa, Delftia tsuruhatensis
  source 1..660: note = Related to NZ_LR813084.1
MSQPQPTRAEIYERIKASSKQEVILEEMQRLGFWPKGEGQPQLAAAHIQREGELHRELAELRRQLAVRQDPERALRQMRKERMQKALARREETRRRQARERHDKALAWHARRDTHVGYLGPGVSAGLHEPRDEAQQPAARDRRQADPQRLARHGLPELADAAQLATAMGITVAELRFLGFHREVARTHHYHSFTLPKKTGGQRLISAPMPRLKRAQYWVLDNILAKVPAHDAAHGFLAGRSIVSNAAPHAGHDVVINLDVKDFFPSIAFGRIKGVFRQLGYGEAMATLLALLCSENRAQAWQVDGEKLFVGGKARERVLPQGAPTSPMLTNLLCRRLDRRLLGLARQLGFTYTRYADDLTFSASGQAAQDHVGRLLGRVRWILRDEGFTPHPDKERVMRRGRRQEVTGLVVNGEQPGVSRETRRRLRAALHRAAQAVPGQRPHWQGHAAQPSQLLGLAQFVHQVRPAQGGALLRQARQLLRSPLERANEALIEASRQDRARAPEAQAFRQRAAAGQAPALASGKPWWQPAAPAAPVLEKTDQQRREERQEQRQQQRQEQQQAARAQAHAAAAPAPQAASAPALPQEPAPPPPAKSALPGLLTYWAQIIICFVLGTVFQTRLVTLIGIVLTVILKWRRLQRWDVFAGAMVIAVLLGLVLKP

SEQ ID NO: 6090 - protein, 690 aa, Comamonas composti
  source 1..690: note = Related to NZ_AUCQ01000016.1
MRCSTFWRLLIGSTAAATKEGRMSQQSTSRALTRAEIYERIKASSRQEVILEEMQRLGFWPKADGEPRLAAEHIEREAHLQRELAELRAQIAVRENPERALRQMRKQRMQQALAQREETKRQQARLRHEKALDWHARRATHVGYLGPGVSAALSPAASQGSPARKAALTDAPKLIGSGLPVLESAAQMAQAMGVTVAELRFLSFHREVARSHHYHSFTLPKKTGGQRLISAPMPRLKRAQYWVLDNILGRVPAHEAAHGFLAGRSILSNALPHLGRDVVINLDVRDFFPSISFARIKGVFVRLGYGEAVATVLALLCSENRAQAWQVDGERLFIGGKARERVLPQGAPTSPMLTNLLCRRLDRRLQGLASQLGFAYTRYADDLTFSASGEAARDNVGRLLGRVRWILRDEGFTPHPEKERVMRKGRRQEVTGVVVNNAQPGSSRQMRKQLRAALHQAARHGAGASDKPAHWQGQTAQVSQLLGLAQFVHQINPRQGLALVEQARSLGKGPLESANQALTQAAREDRERKAASAGFRRSAAQGQAPVRANGQPWWQPAPAEPPVLEQTDQQRRELRQQARREMHSLQAGSSAQAASGERAMAEGPTPAPAVQSQAAHETAPPTSGPALRRLLTYWAQIVVCFVLGNLLHTRVVTLVGIALVVVLYYRRKQGWGLFFAAMVLAVLVGMVFKQ

SEQ ID NO: 6091 - protein, 674 aa, Lampropedia aestuarii
  source 1..674: note = Related to NZ_SSWX01000040.1
MSTPQPSRAQIYERIKASSKQEVVLEEMQRMGFWPKDAGQPQPAAELIQREGELQRELQTLRNQFAARKDPERALREMRKQRMQAARTQREATKRKQAQQRHDKALAWHRERATHIGYLGPGISAGLQTPAQDEAAVKSTSERQRRGPDMARLARHGLPELTSGAQLAEAMGVSVAELRFLSFHREVARSHHYHSFTLPKKTGGERLISAPMPRLKRAQYWVLDQVLAKIPAHDAAHGFLAGRSIISNAQPHTGQDVVINLDVKDFFPSIAFGRIKGVFRQLGYGESVASVLALLCSENRAQAWLVDGERLFVGGKARERVLPQGAPTSPMLTNLLCRRLDRRLQGLAAQLGFAYTRYADDLTFSASGEAAQERVGALLRRVRWILRDEGFTPHPDKERVMRKGRRQEVTGLVVNGAAPSVSRQTRRQLRAALHQATQAGSASAAVAPHWQGQAVQPSQLLGLAQFVHQVDAKQGQALLASAQQLAAVPGARVNQDLADAAARDRRAATRPLPFRQAAAAAQAPVRANGQAWWQPEEKAAPVLEHTDQQRKEQRQQLRREAAAAQTPDAAWGRAEPHNRSAERNSSQEPASHVAPNRASSRANKGKPATPRSLPRLGMHILLGIAQGMSLNKPLITVFALALAITLYYMKKQRWGIFIGLVLVVSWLVIGFTAY

SEQ ID NO: 6092 - protein, 665 aa, Xenophilus sp.
  source 1..665: note = Related to NZ_CAKAKO010000003.1
MAAPAPTRAELLERIRASSKDAVVLAEMQRLGFWPRDEARPAPATELIEREAALMRELGELQAELHLRGDPEKALRAMRQERLAAARAQRDSRARERAQRQYERAQQWHAQRQQRIGYLGAGVSAGLERPADRPAAHVPLRAGRSERLARHGLPALDSPQALARAMGVALGELRFLSFHREVGRHTHYRRFTLPKKSGGERLISAPMPRLKRAQYWVLDNILAKVPAHDAAHGFLPGRSVVGNAQPHCGQEVVVNLDVKDFFPSIGFGRIKGVFTHLGYAEPVATVLALLCSENRADELQVDGERWFVGGAAGQRVLPQGAPTSPMLTNLLCRRLDRRLAGLARTLGFAYTRYADDLSFSASGEAAQRVGPLLRRVRWILRDEGFEPHPDKERVMRKGARQEVTGIVVNAAQPGVSRQSRRALRAALHRARTAGAGPAHWQGEPASRERLLGYAHFVQGVNEAQGRALVRAAEALPLASRAAASPAAAPGTAAGDFRIRAAQGEAPVRAQGPWWQPASPPAPVRQRTDGEIREARAAQRQAAAEARRAAQAGAAVAAPAGRSGNGSPARSGAPASVDTARQARNARAAGRGRKADASPRSRKTYWLQLFVVWLAGTLSGSGFVTVFGLIYLLGAYWARHQRWSHFSLAMLAILVLVPVLRSIGIL

SEQ ID NO: 6093 - protein, 708 aa, unidentified
  source 1..708: note = Related to SEAX01000108.1; note = Comamonadaceae bacterium
MAAPQPTRAELIERIRASSKDAVVLAEMQRLGFWPGGESQPEPAAELIEREAALIRELGELQAELQLKGDPDKALRAMRQERLAAARAQRESKARERAQRQYERALQWHAQRQQRIGYLGAGVSAGLERPDGQAAHAPLRPARPERLAQHGLPALEHPQALALAMGIELGELRFLSFHREVARHTHYRRFTLPKKSGGERQISAPMPRLKRAQYWVLDNILAKVPTHDAAHGFLPGRSIVGNALPHCAQDVVINLDVKDFFPSIGFGRIKGVFMRLGYGEPVATVLALLCSENRADELQVDGERWFVGGTAGQRLLPQGAPTSPMLTNLLCRRLDRRLTGLAQALGFNYTRYADDLSFSASGDAAQRVGSLLRRVRWTLRDEGFEPHPDKERVMRKGARQEVTGIVVNAPQPGVSRQSRRALRAALHRSHAEGPDQAHWQGQSASRERLLGYAHFVQGVNEDQGRALVMAAEALPLASRAADGVGAAADVDAVGADAAAAATDATTPAAAVGGSRALDAAAAAAGTTMAIGLFKAGKADFRARAAQGLAPVRVDGPWWQPAPPPQPVRQRTDGEIREARAARRQAAAEARRAAQPGAAAPANARHPTQAGARAQATVDAARQARRGGPTAPGADDRTADAAKPPRSAKTYWMQLFVVWLAGSFTRNGLVTVLGLIYLLGTYWMRHQRWSHFAIAMAAIVALATLMRSL

SEQ ID NO: 6094 - protein, 709 aa, Comamonas serinivorans
  source 1..709: note = Related to NZ_CP021455.1
MSAPQPTRAELLERIRASSKDAVVLAEMQRLGFWPQGEGEPRLAAELIEREAELSQQLNALRQEAAQYADPEQALRRMRRERMAAARAQREATRRQRHEARHERALAWHAERDRHIGWLGEGVSAALQPVARLPADPAPRSAQPSADQADPSANAEHAAEPAGQARAATADRGGAARASTPRTDRLARHDLPLLTDAPALADAMGIGVRELRFLATHREVSRSTHYQRFTVPKKTGGERLISAPMPRLKRAQYWVLDNILAKVPVHAAAHGFLPGHGIVGNARPHADQDVVINLDLQDFFPSVGLPRVKGVFQHLGYGEAVATVLALLCTEARADTLRIDGETVHIAGRARDRVLPQGAPSSPQLTNILCRRLDRRLAALAATLGFAYTRYADDLSFSASGEAADRVGELLRRARWIVRDEGFTPHPTKQAVMRRGRQQTVTGLVVNGAAPSVSRRQRRRLRAALHRAHTQGLAQAHWQQQPVTRAQLIGWAQFVHQVQPAQAGALLSQAQALLPAAHEASAATVNALAQAASARPAGGGRLSFRAAAAQGQTPPLASGRWWQIAPRPTPVRVLTDQERREQRQARRAAQAAAAEPATTAAGVGPAGARPGQGGRRLSDPRTEDAGRAGVPAPDGHAPQSRTRRRLGTYVLQLMAAWGLGNVVFHDRLFTQVALVMLVFLYLMRRQSWALWGGTMLLAALVAWSLRFLG

SEQ ID NO: 6095 - protein, 640 aa, Massilia armeniaca
  source 1..640: note = Related to CP028324.1
MLAFRVRLPAGSLPMSAPPPTSMTRQELYERLRTATREEVTLSEMQRLGFWPKDDPGVTAAQALIQREAELSRALRELSSELRGTEDPALALKAMRKERMAKARARREETKQRSARERFERASAWHHRHAGEILYLGEEVSAGLNEARSDGDKLARAALPALHDARELAQAMGLSLQELRFLAFDRRASRISHYRRFAMPKKTGGERIISAPMPRLKRSQYWVLDNVLARAPVHPAAHGFLKGRSIVSNAAPHVAQAVVINVDLKDFFPSIDMRRVAGVFGQLGYSKQVATTLALLCTEAATEQVSVDGETFFVARGARVLPQGAPTSPALTNILCRRLDARLQGAAAKLGFSYTRYADDLTFSGPEATRKLAGKLLWRVRQIVADEGFTPHPHKQHVMRASQRQSVTGIVVNEKPTIERDTLRRFRATLFQVEKDGPAGRQWNGNPNVLAALEGYAQFIRMVDPAKGAPLLARVRAARERWSDAPAASLPGPARRGGDFRALSAQGKAPWEGFWQAAPPAPPVLEQTQEQVTLAKKETRRWASVAPVVEPSAAAADVATDAVEDGPQVRAPWRALLSQFLIALVLALTYRTPLPVAGILLLSRTSRRDGRPHWTRFICAMVLLVALADVLHRWDLGLLS

SEQ ID NO: 6096 - protein, 614 aa, Massilia plicata
  source 1..614: note = Related to NZ_CP038026.1
MNAKSPASMSRQDLYERLRTSSREEVTLAEMQRLGFWPANAAGRPDVEELIRREAELSSALRELGSELRAVEDPAVALRAMRKERMAKAKARRETRQRRARERFERASAWHQRHASEILYLGEGVSAGLNDTHSDGDRLARAALPPLNDARELAQAMGLTLQELRFLAFDRRVSRISHYRRFAMPKKTGGERIISAPMPRLKRSQYWVLDNVLARAPVHPAAHGFLAGRSIVSNAAPHAGRAVVVNVDLKDFFPSIDMRRVAGVFGQLGYSKQVATTLALLCTESATEEVSVDGETFHVAYGPRVLPQGAPTSPALTNILCRRLDARLQGAAAKLGFAYTRYADDLTFSGTGESRKLAGKLLWRVRQIVIDEGFTPHPDKQHVMRDSQRQSVTGIVVNEKPTIDRPTLRRFRATLFQVEKDGPDGKAWNGNTNVLAALEGYAQFVRMVDPAKGGPLLQRVRAARERWSTPAGTPAATHSTGDFRALSAQGKAPWPGFWQAGPAPAPVVEKTQVQVTLAKKAVQQEQKERVAALADAQPDTMLEAPPQALLPWRALLPQFVTAFLLALTYRTPLPLAGMLLLARKSRRDGRLGWGRFLGVMVAVVVLHGLLRRWN

SEQ ID NO: 6097 - protein, 612 aa, Massilia umbonata
  source 1..612: note = Related to CP040017.1
MSDNTPAPMTRAALYARLRTQSREEVTLAEMQRLGFWPENDPGKAVAEQLIQRESELVRALRELGSDLRVAEDPALALKAMHKERKAKARARREETRERRARERFERANAWHQRRAGEILYLGQGVSAGLGEARSDADKLARAALPAMHDAKDLAQAMGLSLPELRFLAFDRRVSRISHYRRFAVPKKTGGERIISAPMPRLKRGQYWVLDNLLARAAVHPAAHGFRAGRSIVTNAGPHVGRAVVINVDLKDFFPSIGMQRVAGVFRQLGYSKQIATILALLCTESATEQVSIDGETFHVAHGPRVLPQGAPTSPALTNILCRRLDARLEGAAAKLGFAYTRYADDLTFSGGEETRRLAGKLLWRVRQIVADEGFTPHPDKQHVMRDSQRQGVTGIVVNEKPAVDRTTLRRFRATLFQVERDGPAGKAWNGNANVLAALEGYAQFIRMVDPAKGTPLLARVRAARERWSDTGSPAVTVAKAISAGNFRALSAQGKAPWPGFWQAGMAPAPVLEKTQEQVVAMKKEARQLARSHAATSPTPGGKARNARSLWHALLLQILIACFLAIAFRSPWPIIAMLALFYLSRRDRSAYWTRFIGIQTLAVAGMLALMKH

SEQ ID NO: 6098 - protein, 623 aa, Massilia sp.
  source 1..623: note = Related to WSES01000020.1
MSDYPTSTREALYARIRASSRTEVTLEEMKRLGFWPEDDTSLAEAEQLIKREAELQQALSALGRELREVEDPALALKRMRKERMARAKAKREETRQRRARERHERALAWHARRAKELLYLGAGVSAGLNEARSDADRLARLSLPSMHDAQDLANAMGLSLEELRFLAFERRVSRISHYRRFAMPKKAGGVRIISAPMPRLKRAQYWVLDNVLARAPVHPAAHGFLAGRSIVSNAAPHVGQAVVINVDLKDFFPSIALPRVRGVFRQLGYGKQVATTLALLCTESATETVQVDGETFHVAHGPRVLPQGAPTSPALTNILCRRLDARLQGAAARLGFRYTRYADDLTFSGDESVRKLAAKLLWRVRQIVIDEGFTPHPDKQHVMRSHARQSVTGIVVNEKPAVDRDTLRRFRAVLFQVEKDGPAGKQWNGNDNVLAALEGYAHFIRMVDVEKGAPLLARVRAARARWNGDAAAPDAVARRAGGQFRMLAAQGKAPWPGFWQAGTPPAPVLEKTQEQVKTERTLAREEARPRKAAASPVPADDAIARRAERTARRNPLLIGGGRMTWYAVALQGVVALLLSRKLDSNTPILAMLALYWLSVRYRRMLWVPFIVVMLLIWAVLAPR

SEQ ID NO: 6099 - protein, 603 aa, Massilia buxea
  source 1..603: note = Related to BMKG01000047.1
MYERVRASSREEVTLAEMQRLGFWPANDPGLAAAEELIRREAELSQALRALGTDVRIAEDPVLALKAMRKERMAKARARREETRQRRARERFERASAWHRRQACEILYLGEGVSAGLNESRSNVDKLARAALPALDDAQDLARAMGLTLQELRFLAFDRRVSRITHYRRFALPKKTGGERIISAPMPRLKRAQYWVLDKLLAHAPVHPAAHGFLRGRSIVSNAAPHVGQAVVINLDLKDFFPSIGMPRIRGVFTQLGYSKQVATTLALLCTEAATEEVSVDGETFHVAHGPRVLPQGAPSSPALTNLLCRRLDARLQGAAAKLGFAYTRYADDLTFSGGEATRKLAGKLLWRVKQIVIDEGFTPHPDKQHVMRDSQRQSVTGLVVNAKPSLERDTLRRFRATLFQVEKDGPDGKAWNGNTNVLAALEGYANFVRMVDPAKGTPLLARVRAARERWTGVPQAHRAPSLSKRSSDFRALSAQGKAPWEGFWQAAAPPPPELERTAEQLAQDKKAARRQRPASPAAEPSGDLGVVDVPATPGLPPVPWSAIGVQLGLALAYGIDQGKLLPLAFTVGLAFMAWRDRDPHWLRFGGVIVLMVLLSVLR

SEQ ID NO: 6100 - protein, 642 aa, Massilia violaceinigra
  source 1..642: note = Related to NZ_CP024608.1
MTSPTPSPSELTRAQLYERIRASSKEEVVLTEMQRLGFWPADSGKPSVESALIRREAELTQALQRLGSELHHLQNPEAALRMLRKERMAKAKARREETRQKRALVRFEKAQAWRQRREHEVLYLGAGVSGGLSRADSDAGKLAGLAMPVLHKADDLAQAMGITLSELRFLAFERRVSRISHYRRFAMPKKTGGERIISAPMPRLKRAQYWVLDNVLARAPLHQAAHGFVPGRSIVSNAAPHVGQAVVINLDLKDFFPSIGMPRIKGVFAQLGYSEQLATVLALLCTEAPTDKVRIDGERFFVAHGSRALPQGAPSSPALTNILCRRLDARLQACAAKLGFKYTRYADDLTFSGDADARKLAGKLLWRAKQIVIDEGFTPHPDKQHVMRDAQRQMVTGIVVNQKPSLERETLRRFRATLFQLEKDGPEGKQWNGNTNVIDALEGYAQFIRMVDPVKGLPLLVRVRAARARWGAAGIDMKLMQSKRSSAFRALSAQGKAPWDGWWQATLASAPVLEKTAAQLAVEKKERKAAEAPTVPPAPVNMKKPAAAQTPVATPAAAVHAPPASDATANPAPGAKPDGDNNFQVAIAVQVALICAFALATQRVLPSACMAVIVLQSAMLRKPRWGWFLFIILIWSAVTLKW

SEQ ID NO: 6101 - protein, 631 aa, Pseudoduganella violaceinigra
  source 1..631: note = Related to NZ_AUDI01000031.1
MSATESKPITTRAELMERLRSSSRQEVVLGEMQRLGFWPANKGEPTELEEVVRREAELSSTLNRLSQELRTIQDPEAALKAMRKERLAKARQRREETRLRRAQERFDRATAWHRRRSTELLYLGEGVSAGLNQAESDAGKLARWSLPVMNNASELAAAMGVTLPELRFLSFERRVSRISHYRRFAMPKKTGGERIISAPMPRVKRLQYWVLDNILAKVPLHSAAHGFVPGRSIVSNAQPHVGKAVVINLDLKNFFPSIALPRIKGVFRELGYSDQLATTLGLICTETPTEEVSVDGEKFFVATGERALPQGAPSSPALTNILCRRLDARVQSCAAKLGFIYTRYADDLTFSGDAAARKLAGKLLWRVKQIIADEGFTPHPEKQHVMSLSQCQSVTGIVVNKKLSLDRDTLRRFRATLFQVEKDGPAGKQWNGNENVIDALVGYAQFIKMVDAERGAPLLQKARMVRQKWNTEAPVVSEAAARASSGFRKLSAQGKEPWAGFWQAAGSPAPVLEKTQQQLKEEKLAKREKPAEKPKAAAHADGQAARQQGVTASPGTQAPAQGGRGMFAGRPWVSIIIQVYFAFTLCLNFRTPLPLVVAIVLGYQAWRDYSGHWLRYFGAMAVAVVLGLWLR

SEQ ID NO: 6102 - protein, 625 aa, Duganella sp.
  source 1..625: note = Related to LMFZ01000021.1
MSATESKPITTRAELMERLRNSSRQEVVLGEMQRLGFWPANTGQPTELEEVVKREAELSGALQRLGQELRTIQDPEQALKAMRKERLSKARQRREETRLKRARERFERATAWHRRQSTELLYLGEGVSAGLNHAESNAEKLARWSLPAMNNASELATAMGITLPELRFLSFERRVSRISHYRRFAMPKKTGGERIISAPMPRVKRLQYWVLDNILAKVPLHPAAHGFIPGRSIVSNAQPHVGKAVVINLDLKNFFPSVNLPRIKGVFRELGYSEQLASTLGLICTETPVEEVSVDGEKFFVATGERALPQGAPSSPALTNILCRRLDARAQSCAAKLGFTYTRYADDLTFSGDAAARKLAGKLLWRVKQIIADEGFTPHPEKQHVMSDAHCQSVTGIVVNKKLSLDRGTLRRFRATLFQVEKDGPAGKQWNGNDNVIDALEGYAQFIKMVDADKGAPLLQQVRAARAKWISPAPAASVTAVRRSSGFRALSAQGKEPWAGFWQAAAAPAPMLEKTQQQLALEKAGAGRKAAAPASAPSRPAARAAAEAPASAPVQGGRGTFTGRPWVAVIIQVYFAITLCLNFRTPLPFVVAVVLAVLAWRNYSAKWPRYFGAMFAAVLAGVLLR

SEQ ID NO: 6103 - protein, 637 aa, Massilia guangdongensis
  source 1..637: note = Related to NZ_WWCJ01000033.1
MSATESKPITTRAELMERLRTSSRQEVVLEEMQRLGFWPSGTGQPSELEQLVQREAELSSALLKLGQELRTVQDPEAALKAMRKERLTKARARREETRQRRARERFERATAWHQRRSTELLYLGEGVSAGLNQAEGDAEKLARWSLPALHNAQELASAMGVTLPELRFLSFERRVSRISHYRRFAMPKKSGGERIISAPMPRVKRLQYWVLDNILAKVPLHPAAHGFVPGRSIVSNAQPHVGKAVVVNLDLKNFFPSIGLPRIKGIFRELGYSEQLATTLGLLCTETPSEEVSVDGEKFFVATGERALPQGAPSSPALTNILCRRLDARVQSCAAKLGFTYTRYADDLTFSGDAAARKLAGKLLWRVKQIIADEGFTPHPEKQHVMGAGHCQSVTGIVVNQKLSLERETLRRFRATLFQVEKDGPAGKQWNGNANVIDALEGYAQFIRMVDAEKGAPLLQRVRAARARWIAQAQDGGEQAARRSSGFRALSAQGKEPWAGFWQAQAPAAPELEKTQQQVKQEKLEHRQAQKAKPASGRPAVAAGAGPSARATRRQAPEAPPAEQEEPYKFSDRPWLGILIQLYLAFSLCRLYHTPLPLVFAVMLAIPAWRNYRAYWLRYFSYMCLAVLLGIVLRKLL

SEQ ID NO: 6104 - protein, 555 aa, Vandammella animalimorsus
  source 1..555: note = Related to NZ_NSJF01000005.1
MRRQRLQAARQRREATRQARAQARYERARSWHERRQHSVLYLGQGVSGGLQHSDNQPERLARWQLPQPANPQQLAQLMGVSVAELRFLAYDRAVARVSHYRSFDLPKKSGGLRRISAPMPRLKRLQYWLLDNILSKVPVHDAAHGFRPGRSICSNAQPHVGKAVVINLDLQDFFPSIAYPRIKGVFRALGYSEQLASIMGLLCTQRPTQAVQLDGQTYHIATGARHLPQGAPSSPALTNILCRRLDRRLHGMAAKLGFAYTRYADDLSFSADAPAQHLVGKLLWRARQIIADEGFTLHPDKLHVMRSARRQQVTGLVVNAKPSIDRSTFKRFRATVFQVEKDGPQGKSWNGNDNVLDALLGYAHFLHMVDPQRGQPWLQRVQALRVAAQAPAQSQPSPEPQQILELESAAKASQAGRGRSAFRRASAQGQAPWAHWWQPAQPPAPVLEPTEAQRQAQRQAQRRQQAQAALPTAAQPQRQGALEPQQPPEEAQHASQRNPRMLLEQTLALLVLLFMLRKPSLLLLGLLIHLAYHLLHRSSWWLFLPLLLASLLVPF

SEQ ID NO: 6105 - protein, 627 aa, Chitinibacter sp.
  source 1..627: note = Related to NZ_VIRW01000011.1
MSQPSQSNPNQSNSAQPPNSREAILQRMRNSSKDEVILEEMRRQGFWPKDEPSPEQAAALALIEREGELVRALHDLSQQLHQVEEPQAALKAMRKERMRLAREKREVTRRQQAQRRYDRALAWHTQQQNDITYLGEDVSQGLADPRSDEARLASKGLPHFSSVAALAQAMGVTVAELRFLSFSRNVTRISHYRRFTVPKKTGGVRLISAPMPRLKRLQYWILEQILLKLPVHAAAQGFVAGRSIVSNATPHTGQAVVVNFDLQDFFPSIHWQRVSGLFQSMGYSKQLATILALICSETPCDEVAVDGAHYFVQTGVRRLPQGAPSSPALTNLLCRRLDTRLSALAQRLGFRYTRYADDMTFSAADDSQLPRLLWQAKRVIREEGFTLHPDKQKVMRRHARQEVTGIVVNQRPAVCRETLRRFRAVLFQVEQTGPTGKHWNGNENVLAALAGYAQFIVMVDAEKGRPLLARVHAAQLKWSAPEAARSSYYRDFRTASSKGIAPKGITQMAQRAIPIIELTQEQHQQAKQSAQQPNSQRAVIPADPDVVLLEQQQAPPLAAHANTPVSIYLQIAAAFLALMLIGLLSSNYLLSAGSIVWVWYCMQKRKFSWWGFVLVLIVCRWLWQQIE

SEQ ID NO: 6106 - protein, 638 aa, Chitinivorax sp.
  source 1..638: note = Related to NZ_SCOH01000042.1
MSNATQTSREAVLARIQASSKDSVILEEMQRLGFWPAGSGTPDQQRATELISQEQALLSELRELNQKLSIAKDPVAALKALNKQRMAEAKARREQTRLAAAQRRYEKAAAWHARRALDIGYLGEGVSQSLSDARTDPHRLAARELPVLDSPKVLADAMGITVEELRFLTFHRSVSRISHYRRFGIPKKTGGLRMISAPMPRLKRAQYWVLDRVLAKLPVHDAAHGFVPGRSIVSNATPHAGQAVVVNFDLKDFFPSISYQRVRGLFQTFGYSRQLATLFAMICTELPTDEVSIDGLHFHVQNGERHLPQGAPCSPTITNLLCRRLDTRLAGLAKRLGFIYTRYADDMTFSADAASAGNLPRLLWQVKRIIAEEGFTLHPDKQRIMRNSARQEVTGVVVNHHPTVCRETLRRFRATLYQVEKDGPQGKAWNGNGDVLNALAGYARFVKMVDPAKGGPLCAKVAAVQAKWGDNASQPRGQYYRLFREASVAGKALPSHQWQAKRQPAPTLEKTATQLQQEKQATRQAESDQAAAVAAETIASAAALPTTHTQSGELIERNAVSADAIPPNVHEDVPASVYLQLAMQFVLMLVSGLLTGNVLMAMASVGWMWFGFKRRRANWWLWLGVYFACRLLWRLTTA

SEQ ID NO: 6107 - protein, 624 aa, Chitinimonas sp.
  source 1..624: note = Related to JAEUND010000226.1
MSDAAQTSREAVIARIRNSSKDAVVLEEMRRLGFWPQGQASPGEGEVAALIEQEAALIQELQQINRNLARVRDPQAALLEMKKERMAAAKRRREETRQRHAQLRYQRATAWHARMQQDIVYLGAGVSAGLDDARHDTARLASKQLPLLDGPQALAAAMGVPLAELRFLAYHRSVSRISHYRRFGIAKKTGGVRLISAPMPRLKRAQYWVLDRILARLPLHEAAHGFVPGRSIVGNALPHVGRAVVLNLDLQNFFPSIAYPRVRGLFQSFGYSRQMATLLALICTETPSEEVELDGNRYHVQTGERCLPQGAPSSPAITNLLCRRLDKRLTATAAKLGFSYTRYADDMTFSADAPQADGLARLLWRVKRIIADEGFTLHPDKQRIMRAASRQEVTGVVVNRQPAICRDTLRRFRATMFQVEKDGPLGKQWNGNSNVIAALEGYARFIAMVDPAKGEPLCQRAALLRAKWGSVLPAPASTGYRRAFRAASAEGRQTPGRIWLPAERPVPQLEQTDQQQREQRAAAREAAQPSPVPQTTASRANATPPAAQPQGANPAAIGWVQQYYGLLAVGQFMALLAIGVLGRFWLLPLCGLVLMLYALRTRHISGWHFALALVVGILFDGVLH

SEQ ID NO: 6108 - protein, 635 aa, Uliginosibacterium gangwonense
  source 1..635: note = Related to NZ_KB892857.1
MSYQETPELQALRERIRASTKDAVVLEEMRRLGYWPKDEAIPDSRDAASEIGQIIQREGELVGELHKMAQDLHRLSDPQQALQEMRKQRMAAARAKREETRRRHAEERHQRAAAWHAQRQKSIAWLGEEVSTGLADVRTDAARLHAKSLPVIESIGELARLMGVPLAELRFLGYQRSVSRINHYHRFGIAKKTGGVRVISAPMPRMKRAQYWVLDKLLVSQPVSASAHGFVPGKSIVDNARVHAGHDVVINFDLKDFFPSIHYPRVKGLFSSFGYSDSVATLLALLCTEAPTETVEMDGQRYHVQTGPRCLPQGAPTSPAITNLLCRKLDRRLEGSAKKLGFSYTRYADDMTFSAPAEARSKLGQMLWCAKQIIADEGFILHPDKQRVMHAGRRQEVTGLVVNERPAVPRETLRRFRATLFQVEKDGPEGKSWNGNGNVIAALDGYARFIYMVDADKGAPLLARIAQLKERWSGAPVRKAPGLLSGPAFRRAAGEGKAPRENWWTPAEQAAPVVEKTDQQRAEDRAAAKAAIRLQKAEAQATAAPASSEQAETAPPPASLAPEEAAKARALSASDSIQILIQSIVMVLAGLVTHNYLVLLGAVVWFFLSMSKRKRYNWLIWAVVYIACRILGGVH

SEQ ID NO: 6109 - protein, 667 aa, Undibacterium hunanense
  source 1..667: note = Related to NZ_JACOGF010000004.1
MTQNKQSASVTSPPLSQMTRDELYAHVRTTTKDAVVLQEMRRLGFWPADTGKPSVTEELIQREAQLSSMLRELTSQLQHVHDPKAALRDMRKQRMAAAKEKREQTRQKHAQLRHAKALAWQEKRQNDIGYLGEAVSSGLNYTTTDIEKLARYQLPVLQKAPELATALGIPLAELRFMSFQRKVSQVSHYQRFSIPKKTGGLRYISAPMPRLKRCQYWVLDHILSKVPCHPAAHGFLPQHSILSNALPHVGQAVVINLDLKDFFPSIEYARVKGVFKSLGYGDQIATLLGLLCTEQASEEVRVDTQRYFVAGKKRSLPQGAPSSPMITNILCHGLDKRLHAAASKLGFVYTRYADDLTFSSKQKERPPVGKLLWRVKQIIADEGFTLHPDKQRIMRHSQKQEVTGIVVNHSPTIDARTLHRFRATLHKVEKNGPAGYHWNGNTDVLSALEGYARYICMVNPAKGQPWLQRVKQLRVVYAAPTSVPAHSARPPRLSLRQQVAAGNTPLRANGKDWWQVKEAAVPVLELTAQQLAEQKQAEKQAEKQALKEAKQGKDTQAKAPVRENQTQSYAQRQVVTPQPVRANASKRNRDDAAPVSDEQPVVFKLRPIPWWSILLQFVACIMVTISLRSIFPVTLGLSLLAISIITRRSMMVWVMVVLVLSVLLINS

SEQ ID NO: 6110 - protein, 658 aa, Undibacterium sp.
  source 1..658: note = Related to JAKZHX010000005.1
MTQQQQSAPVKPLSQMTRDELYAHLRTTTKDAVVLQEMRRLGFWPADTGKPTLTDEIITREAELSTTLRALSEQLHRVQDPKAALREMRRQRMAAAKEKREQTRQKHAQLRYAKALAWQEKRKTDIVYLGEGVSGGLNYTATNTDKLARHQLPLLQSASELATAIGIPLAELRFMSFQRQVSQVSHYQRFAIPKKTGGQRIISAPMPRLKRCQYWVLDHILAKVPCHPAAHGFLPQHSILSNATPHVGQAVVINLDLKDFFPSIDYQRVKGVFKSLGYGDHIATVLGLLCTEQASEEVRVDRQKYYVAGKKRSLPQGAPSSPMITNILCHTLDKRLHAAATKLGFVYTRYADDLTFSSKQKERPPVGKLLWRVKQIIADEGFTLHPDKQRIMRYSQKQEVTGIVVNHSPTIDAKTLHRFRATVHQVEKKGPAGLHWNGNTDVLAALEGYARYICMVNPAKGQPWLQKIKQLRAQHAAPAVTRPTRPSLRQQLAEGKTPERANGQDWWQIKEPAAPVLELTTQQVAEAKKALKQEAVQATKAAKASRQGTATPDYGRQQTAGRTAPVNLNVSAGNTRPGQADDGNQTYNATEQSKLNNKRNARLFAILFQLFLCVFFTLQLKSLYPVILGLPLLALSIISGRSKFMWIMLVLVACVLFR

SEQ ID NO: 6111 - protein, 651 aa, Undibacterium pigrum
  source 1..651: note = Related to NZ_QJKB01000012.1
MTQQQQPSAQSASDKPLSQMTRDELYAHLRTTTKDAVVLQEMRRLGFWPADSGKPSVTDELITRESQLINELNTLTDKLRRVQDPKAALRDMRKQRMAAAKEKRELTKQKHAQLRHARALAWQEKRQNDIGYLGEGVSTGLNYTSTNTDKLARYQLPALQKSLDLATAIGIPLAELRFMSFQRKVSQVSHYQRFAIPKKTGGQRFISAPMPRLKRCQYWVLDHILAKVPCHPAAHGFLPQHSILSNALPHVGQAVVINLDLKDFFPSIEYPRVKGVFKSLGYGDQIATLLGLLCTEQATEEVRVDKQKYFVAGKKRSLPQGAPSSPMITNILCHTLDKRLHTAATKLGFVYTRYADDLTFSSKQKERPPVGKLLWRVKQIIADEGFILHPDKQHIMRHSQKQEVTGIVVNHSPTIDAKTLHRFRATLHQVEKNGPAGYHWNGNTDVLGALEGYARYVCMVNPVKGQPWLQRIKALRARYAPQYATQSATHPARPTLRQQVASGKTPQRANGKDWWQVQEAAAPVLEQTAQQIAEEKKVVRQAEKEEKKAAAMPQSVQPDVAGNTGNQAANTANPANTENLTAAEKNKLNKRLYGTLGRVFQVLLCAIFSASLHSLYPLTFGIALVALSLISGRSSLVWVMVMLVLSVVLLS

SEQ ID NO: 6112 - protein, 641 aa, Variovorax guangxiensis
  source 1..641: note = Related to NZ_RXFT01000001.1
MTMQSPASSSSIPDSALTREELYERIRKSSKQEVVLEEMQRLGFWPRDAAQPTVEEQLIRREGELQTALSKLGSELRGIEDRDRALKIMRKERMARARERREETRQRAAQGRHARAVAWHERRQRELLYVGDGVSGGLNDAHSDSQALARNALPALDHVSDLAQAMGIGLGELRFLAWHREVSSVSHYQRFTMPKKSGGERHISAPMPRLKRAQYWVLDNILAKMPVHEAAHGFMPGRSILTNAAPHVGRDVVINLDLKDFFPSIGMRRVRGVFRQLGYSSQVASLLALVCTEAPTDEVQLDGNRYFVARGDRVLPQGAPTSPMITNLLCRRLDARLSASAAKLGFRYTRYADDLTFSAGPEHSRDTAKLLWRAKQIVASEGLTLHPDKQQVMRKHRQQHVTGIVVNDKLSVDRDTLRRFRAVLHQAERNGLQGLQWNGNSDVIGALRGYANFIAMTDAARGEPYLQRVRALAAKHEGGAAPKTQASQRRLGAGEFRKQSAAGKAPWPAWWQPAEAAAPVLEKTAEQIAEEKKAQREAARPQPVAASPAPARAPATAQPAAAPAAKQAPGALSQIGWVASMMLQALYVVSVFLSGTSPLIWLMTGGVAIGNFVQRKSGWLRFIVAIFISSALASLVHSMKN

SEQ ID NO: 6113 - protein, 659 aa, Variovorax sp.
  source 1..659: note = Related to NZ_CP060295.1
MQPPASSSSVPDSALTREQLYERLRGSSKQEVILEEMQRLGFWPQDAAQPTVESQLIRRESELQTALGKLGEELRGISDRDKALKMMRKERMAKARERREETRQRLAQGRHARALAWHERHQRELLYVGDGVSGGLNEAQSDSQALARNALPALNHAGDLAGAMGIDLGELRFLAWHREVANVSHYQRFTIAKKSGGERHISAPMPRLKRAQYWVLDNILAKMPVHEAVHGFLPGRSILTNAVPHVGQDVVINLDLKDFFPSIGMRRVRGVFRQLGYSSQVASLLALVCTEAPTDEVQLDGRRYFVARGERVLPQGAPTSPMLTNLLCRRLDARLAASAAKLGFRYTRYADDLSFSADSQHSRDTGKLLWRVKQIVASEGLTVHPDKQQVMRKHQQQHVTGIVVNDKLSLDRDTLRRFRAVLHLAERQGPQGLQWNGNVDVIGALRGYANFIAMTDAARGAPYLQRVRALAAKHKGSAMTTPIAPASPVASQQPQRQVAPDQFRKQSAAGQAPWPAWWQPAQASAPVLEKTAEQLAAEKKAKRDAERAEAAAKAAAATAASAPVPRAAAAPAVAPSSPEAPTPEAPKRLESQFVLTVSLMLQSAYVVMSLLTSRSLVVLLPVGAIVIGNWIQRKSGWMRFLIVLIAASGLSGLVRHLTQ

SEQ ID NO: 6114 - protein, 646 aa, Variovorax paradoxus
  source 1..646: note = Related to NZ_CP091716.1
MQSPPASSIPDSALTREQLYERIRKGSKQEVILEEMQRLGFWPQEAAQPTVEVQLIRREGELQAALSKLGDELRGIEDRDKALKTMRKERMAKARERREETRQRLAQDRHARAIAWHERRQRELLYVGEGVSGGLGEAQSDAEVLARNALPALHHAGDLAQAMGIGLGELRFLAWHRDVANVSHYQRFTIAKKSGGERHISAPMPRMKRAQYWVLDNILAKMPVHDAVHGFLPGRSILTNAAPHVGQDVVINLDLKDFFPSIGMRRVRGVFRQLGYSSQVASLLALVCTEAPTDEVQLDGRRYFVARGERVLPQGAPTSPMLTNLLCRRLDARLAASAAKLGFRYTRYADDLSFSAGPAHSRDTAKLLWRVKQIVASEGLTVHPDKQQVMRRHRQQHVTGIVVNDKLSLDRDTMRRFRAVLHQAESRGPQGLRWNGNSDVIGALRGYANFIAMTDAARGAPYVERVRALAAKHGDGKATAPAVQQTQPSQRSLPAGQFRKQSAAGQAPWPEWWQPAQAPAPILEKTAEQIAEEKKAQREAARAQAAPPAVARPAQTQQAPAAQPAATTSTPAAPGALSHIGWIASMMFQALYVVTTFLAGSSPLIWLLTGGVFISNFLRRKSGWGGFLAAVVVSSAVASLVHSMRK

SEQ ID NO: 6115 - protein, 642 aa, Variovorax paradoxus
  source 1..642: note = Related to CP063166.1
MTPPSPSSVPDSALTREQLYERIRASSKQEVVLEEMQRLGFWPRDTAQPTVEAQLIRREGELQTALRDLGDELRGIEDRETALKSMRKERMARARERREETRQRLAQQRHARALDWHGRRQRELLYLGEGVSGGLNEARSDEQSLARHALPALHDATDLARAMGLELGELRFLAWHREVARVSHYQRFTVPKKTGGERRISAPMPRLKRAQYWVLDNVLAKVPVHEAVHGFLPGRSILSNAAPHVGQAVVVNLDLQDFFPSIGLRRVRGVFRQLGYSPQVATLFALLATEAPTDEVELDGERYVVARGERVLPQGAPTSPMLTNVLCRRLDARLAACAARLGFRYTRYADDLSFSADAEHGRDVGKLLWRAKQIVASEGFVVHPDKQQVMRRHQQQHVTGIVVNDKLSTDRDTLRRFRAVLHQAERHGPQGLHWNGQHDLVAALRGYANFIAMADPARAEPYLRRVKALAAKHASAPATAATPARAPLPAGHFRRQSAAGLAPLPTWWQPARAPEPVLEKTPEQIAAEKKAKREAERERQRAQEEPQRVEQAPPRTAEPAAAPQTAKPRSTLSLLGLWVSIAIQGTYVLGFLLSLRDAWLIGLMTGAIWVANIYQRKAGWMRFFIALIAGSGLSAVLRKMWS

SEQ ID NO: 6116 - protein, 635 aa, Undibacterium luofuense
  source 1..635: note = Related to NZ_JAGSPN010000003.1
MLTMTANSTTPAKPLSQMTRDELYAHVRSQGKDLIVLREMQRLGYWPQSTDIPAPEEELLEREKFLTQRLLDMQSELAKISDPEKALRLLQRERMDAARERREQTRREKIKQRYEKAQAFWQRRQTGIDYIGEDLSAGLVQQQSNVQRLQQYGLPEFHDAAGLASFLNISLPELRFLSFQRKVSRYSHYQYFSLKKKTGGLREIAAPMPRIKRVQYRILDALLQKVPVHDAAHGFVGGKSVLSNAIPHTGQAIVINLDVKDFFPSVGWRRVKGIFRQLGYSEQAATLLSMLCTELPVSPVKIDGQQWLVARADRRLPQGAPTSPALTNLLCFGMDKRLQQLAQRLGFRYTRYADDLTFSAAEPKAPVGKLLWRVSKLMTAEGFTLHPDKQRVMRAHQRQEVTGIVVNQHPSLNRDTLHRFRSLLNKLEKQGPAGLHWNGNTDVLRAAEGFARYLMMVQPSKGAVALQRVHRLKKQWSGAPAFTGGNVWRKTAADGGVPLRKNGAQWWKASTTPAPVQEKTDLQRREQRMQEKHAQLAPDASNDAALPENRQAAPVNHTTQNAGANQSVSKLPPVISAGTMIADLIAGLTLSILMGVATPLLLTLLSFYATFRFRRNFRPLLLGVLILLLILHVMK

SEQ ID NO: 6117 - protein, 638 aa, Undibacterium squillarum
  source 1..638: note = Related to NZ_BMYU01000002.1
MTANSTSSAKPLSQMTRDELYAHVSAQGKDLVVLREMQRLGYWPQQQDIPAPEQALLEREQVLTKRLRDMQSELAQISDPEKALRMLQRERMQAAREQREQTKRQHAQRRFEKAHAVWQRRQTDIDYIGDNLSAGLLQRTSDTQRLQRHGLPEIHDAAGLAAFLGISLHELRFLSFQRRVSRYSHYQYFSLKKKTGGLREIAAPMPRIKRVQYRILDALLQKVPVHDAAHGFVYGKSVLSNAQPHTGKAVVINLDVKDFFPSVGWRRVKGIFRQLGYSEQVATLLSMLCTELPVSPVDIDGQRWLVARADRRLPQGAPTSPALTNLLCFGMDQRLQKLAQRLGFQYSRYADDLTFSAADPKAPVGKLLWRVQQRMTAEGFTLHPEKQRVMRAHQRQEVTGIVVNQHPALNRETLHRFRALLNKLEKHGPAGLHWNGNSDVLRAAEGFARYLMMVQPSKGAPALQRIHRMKQQWGAAAAGTANVLWRKIAADGGVPPRSEGQAWWSAALPPEPVPELTDLQRREQRRQPAGTEKISEPVSQSRSGTDYDAGSPDAAPAQVFPENAEQTSMNLSKLPPSVSAGTMLTDLIAGLVLSILLKGALPLMMSLLSLYASFRWKRSFRPLLALAFVLLWLWHLSR

SEQ ID NO: 6118 - protein, 606 aa, Methylobacterium goesingense
  source 1..606: note = Related to JAFGZG010000009.1
MTVRPGSLTRQQLYDRIRESSKDEVVLEEMIRLGYWPDGVDQPNLPDDLIRRRGEITREISDLHRREALWRDPEAALKAMHKRRKKAALVRRAETRLRGARDRHERALAWHERRKTEILYLGEGVSAGLSAQEAAPVSPANGLPPLASPAALARAIGISLGELRFLAYDRALTSVSHYQRFTIPKKTGGVRAISAPMPRLKRAQYWVLDVVLAQVPVHEAAHGFVPGRSILTNAAAHVGRDVVVNLDLKDFFPSLDYRRIKGKFRGLGYAEPVATVLALLCTEPDVDAVEIDGQQLYAARGPRRLPQGAPTSPALTNLVCTRLDARLSGLARSLGFAYTRYADDMTFSASGEAAAKVGPLLKYVHEIVAKEGFTVHPDKTRVMRRGRHQEVTGLTVNERVAVPRETLRRFRALLHGIERHGPIGRRWGRSADGAVLGAALGFARFVRMVTPEVGTPLVARARSLAERHGTQPEQARPRVAAFRERSAQGVPPREGGWVPAEPPVPHPDPLLVQAEAAQAEAARRAEGAADRRVVPPIGRQPPAPQPVSGQATDDADAAGMRPWMVVVGVFVLFQAAALLHPGLGLFVLAAALTIGLRRWLRRRRGK

SEQ ID NO: 6119 - protein, 602 aa, Methylobacterium bullatum
  source 1..602: note = Related to BPQF01000021.1
MSVQPGSLTRQQLYDRIRESSKDEVVLEEMIRLGYWPAGKDQPNLPEEVIRRRGELARELTELHRSAALWTNPDAALKAMHKRRKKAALERRRETKLNGARGRHERALAWHGRRNREILYLGEGVSAGLSGGDAGASRADGLPELASPGAVAEAMGIGLGELRFLAYDRALATVSHYQRFTIPKKTGGLRAISAPMPRLKRAQYWILDAVLAHAGIHDAAHGFVPGRSILTNAALHVGRDVVVNLDLKDFFPTLDYRRIKGKFRGLGYAEPVATVLALLCTEPDVDEVEIDGQRLYAARGPRRLPQGAPTSPALTNLVCTRLDARLTGLAASLGFTYTRYADDMTFSASGEAAGKTGALLKYVHEIVAGEGFTVHPDKTRVMRRGRHQEVTGLTVNERVAVPRETLRRFRALLHGIEGHGPAGRRWGRSEGQAVLGAALGFARFVRMVTPEAGAPLVAQARRLAETHGAPQQSAQPRITPFRAQSARGVPPREGWWSPAERPPPQPDPILLEAERPAISAPGRSGLPSIGRRPAPPPDQPRPGSPPGGDIEEDTPLKPWMAVLGVFVLFQAGAIVHPVIGLLVLAAALVIAIRRWLRRRRRR

SEQ ID NO: 6120 - protein, 606 aa, Methylobacterium sp.
  source 1..606: note = Related to JACHWM010000004.1
MSAQPGSLTRQQLYDRIRESSKDEVVLEEMIRLGYWPEGADQPNLPEDLIRRRGEISRAITDLHRREALWRNPDAALKEMHRRRKKAALKRRRETKLRNAQGRHERALAWHARRDDELLYLGEGVSAGLSRPAHPAREPTPGLPALASPKVLAQAMGISLNELRFLAYDRALATVSHYQRFTIPKKAGGLRTISAPMPRLKRAQYWVLDALLARAPVHEAAHGFVPGRSIVTNAGAHVGRDVVVNLDLKDFFPSLDYRRIKGKFRGLGYAEPVATVLALICTEPDVDAVEIDGQTLYAARGPRRLPQGAPTSPALTNLVCTRLDARLSGLARSLGFTYTRYADDLTFSASGEASGKVGALLKYVHEIVAAEGFTVHPDKTRVMRRGRHQEVTGLTVNERVAVPRETLRRFRALLHGLERHGPTGRRWGGSGENGVLRAALGFAHFVRMVTPDAGAPLVARAQALAEPNGVQVPAARPRMSEFRARAARGVEPLPRWWESAARPVPEPDPILAQAAAEAAAPARRATPSGRSFVPVIGRSSAPSSVDPAPAPQVDPEAAPMKPWMVALGVFVLFQAGVVIHPVIGILVLAAALLIGLRRWLRRRRDQ

SEQ ID NO: 6121 - protein, 632 aa, Methylobacterium radiotolerans
  source 1..632: note = Related to CP001001.1
MSQQPGSLTRQQLYDRIRESSKDEVILEEMIRLGFWPDGEAQPNPPDDLIRRRGEIARALADLHRREAAWRDPEAALKEMHRRRKTAALERRRETRLRNARDRHARAQAWHARREAEILHLGDGVSAGLSAGLAHAAPDAGTPARGPAPGLPPLASPKALAEAMGIGLGELRFLAYDRALSTVSHYRRFTIPKKAGGLRRISAPMPRLKRAQYWILDALLAHAPVHPAAHGFVPGRSIVTNAAAHVGRDVVVNLDLKDFFPSLDYRRIKGKFRGLGYAEPVATVLALLCTEPDVDAVEIDGARLYAARGPRRLPQGAPTSPALTNLVCTRLDARLSGLAGSLGFTYTRYADDLTFSASGEAAGKVGALLKYVHAIVAGEGFTVHPDKTRVMRRGRHQEVTGLTVNERVGVPRETLRRFRALLHGLERHGPVGRRWGAAGEAGVLRAAVGFAQFVRMVTPETGAPLLARARALADRHADRPSARPGARPLPDFRARSARGEVPLARWWAPAPRPAPEPDPILAEAEAAAAREAEEAAARAAARAAAPVPGRSGVPVSGRPRLGAPEPTARAEVAPDTGAEPDDAPMKPWKVILGIFVLFQAAALLHPALGLLVLAVALLLGLRRLLRRWRRRR

SEQ ID NO: 6122 - protein, 604 aa, Methylobacterium fujisawaense
  source 1..604: note = Related to NZ_JACJIM010000008.1
MSPQPGSLTRQQLYDRIRESSKDEVILEEMIRLGFWPDGAEQPNPPEDLIRRRGEIARALADLHRREAAWRDPEAALKEMHRRRKTAALERRRETKLRNARDRHARAQAWHARREAEILHLGGGVSAGLANADAPARGPAPGLPALASPKALAEAMGIGLGELRFLAYDRALSAVSHYRCFTIPKKAGGLRRISAPMPRLKRAQYWILDALLAHVPVHGAAHGFVPGRSIVTNAAAHVGRDVVVNLDLKDFFPSLDYRRIKGKFRGLGYAEPVATVLALLCTEPDVDAVEIDGARLYAARGPRRLPQGAPTSPALTNLVCTRLDARLTGLAASLGFTYTRYADDLTFSASGAAAGKVGALLKYVHAIVAGEGFTVHPDKTRVMRRGRHQEVTGLTVNERVGVPRETLRRFRALLHGLDRHGPAGRRWGAAGEGDVLRAAVGFAQFVRMVTPETGAPLVAQARALADRHGLRPAVRPQPDFRARSARGAMPLARWWAPAPRPAPEPDPILAEAEAAAAPVPGRSGVPASGRPRFGTPEPVAPAQAAPGTVAEADDAPMKPWKVVLGVFVLFQAGALLHPALGLLVLVVALVLGLRRLLRRWRRRR

SEQ ID NO: 6123 - protein, 601 aa, Methylobacterium gossipiicola
  source 1..601: note = Related to NZ_FOPM01000031.1
MSAQPGSLTRQQLYDRIRESSKDEVVLEEMIRLGYWPDGADQPNLSDDLIRRRGEITRALGDLHRREALWRDPDAALKEMHRRRKKAALERRRETKLCNARDRHARALAWHARRDDELLYLGEDVSAGLSAAAEGREPLAGLPVLADPKAVAQAMGISMAELRFLAYDRALATVSHYRRFTIPKKTGGLRTISAPMPRLKRAQYWVLDAVLTHAPTHEAAHGFVPGRSIVTNASAHVGQDVVVNLDLKDFFPSLDYRRIKGKFRGLGYAEPVATVLALICTEPDVDAVELDGQSLYAARGPRRLPQGAPSSPALTNLICTRLDARLSGLGRNLGFTYTRYADDLTFSASGAAAAKVGALLAHVHEIVAAEGFTVHPDKTRVMRRGRHQEVTGLTVNERVGVPRETLRRFRALLHGLERHGPAGRAWGRSGEDGVLRAALGFARFVRMVTPEVGAPLVARAKALAERDGVPATAIRPRVSPFRERAARGVAPLPNWWEPAARPAPEPDPILAEAAARLASGAPTGRSGVPAIGRTTAAPANEPVPAPKDDPDAAPMKPWMVVVGLFVLFNAGAVIHPALGFTTLAVALVIGLVRWLKRRRTR

SEQ ID NO: 6124 - protein, 613 aa, Methylobacterium dankookense
  source 1..613: note = Related to NZ_CABFVH010000047.1
MTLRPGSLTRQQLYDRIREGSKDEVVLEEMIRLGYWPDGAEQPNPPAELIRRRGEISRAIADLHRREALWRDPDAALKEMHRRRKKAALERRRETKLRGARGRHERALAWHARRDAEILHLGEGVSAGLSGTDADPRALKAGLPALANPKAVAEAMGISLGELRFLAYDRPLSTVSHYRRFTIPKKTGGERTISAPMPRLKRAQYWVLDALLARAPLHEAAHGFVPGRSIVTNAAAHVGRDVVVNLDLKDFFPTLDYRRIKGKFRGLGYAEPVATVLALICTEPDVDAVEIDGQRLYAARGPRRLPQGAPTSPALTNLVCTRLDARLAGLAASLGFAYTRYADDLTFSASGEAAGKVGPLLKYVHAIVAAEGFTVHPDKTRVMRRGRHQEVTGLTVNERVAVPRETLRRFRALLHGIERHGPAGRRWGKGGDGTVLQAALGFARFVRMVTPEAGAPLVAQVRALAERHGARQAPAQPRIATFRARSADGVAPLARWWIPAARPLPAPDPIIAEAEAAEAEARRKRQDGPGRVPGRSGLPAVGLRPAPAPEPARQADPVQGDRDGTPMKPWMAVLGVFVLFQAAAVLHPGLGLLVLVAALAIGLRRWLRRRRGR

SEQ ID NO: 6125 - protein, 601 aa, Methylobacterium sp.
  source 1..601: note = Related to NZ_CAKLBV010000001.1
MSAQPGSLTRQQLYDRIRETSKDEVILEEMVRLGFWPDGAERPNLPDALIRRRGEIVRTLGELHLREALWSDPDAALKEMHRRRKKAALERRRETKLRNARGRHERALAWHARRDEDLFHLGEGVSAGLSAPDAAGHAPAPGLPALASPKALADAMGIGMGELRFLAYDRALTAVSHYRRFTIPKKAGGERLISAPMPRLKRAQYWVLDALLAHAPVHEAAQGFVPGRSILTNARAHVGRDVVVNLDLKDFFPTLDYRRVKGKFRGLGYAEPVATVLALLCTEPDVDAVEIDGQRLYAARGPRRLPQGAPTSPALTNLICTRLDQRLSGLGRSLGFTYTRYADDLTFSASGEAAGRVGPLLKYVGEIVASEGFTVHPDKTRVMRRGRHQEVTGLTVNEQVAVPRETLRRFRALLHALERHGPTGRRWGRSADAGVPRAALGFARFVAMITPEAGAPLVAQARRLAERHRAGAAMARPVIPVFRSRAAQGAAPWEPWWRPAKPQAPTPDPILIEAEAEAAALRETEGDRPRRRTSARSWLPSIGRSTDTALAGTGRAPMKPWMIALGVFVLVQAATVIHPALGGLVLIAALGVVLWRWFRRR

SEQ ID NO: 6126 - protein, 611 aa, Methylorubrum rhodinum
  source 1..611: note = Related to NZ_JACHOP010000028.1
MSTQPGSLTRQQLYDRIRESSKDEVILEEMIRLGFWPDGADRPNVPADLIRRRGEISRELADLHRREALWRDPEAALKEMHRRRKKAALERRRETKLRNARTRHERALAWHARRNEDVLHLGEGVSAGLLAPDETGREPGPGLPRLANPKALAQAMGIPMGELRFLAYDRALATVSHYRRFTIPKKTGGTRLISAPMPRLKRAQYWVLDALLAHAPVHESAHGFVPGRSIVTNASAHVGRDVVVNLDLKDFFPTLDYRRVKGKFRGLGYAEPVATVLALLCTEPDTDDIEIDGQRLHAARGPRRLPQGAPTSPALTNLICIRLDRRLTGLARNLGFTYTRYADDLTFSASGTAAEKVGPLLKYVGEIVAAEGFTVHPDKTRVMRRGRHQEVTGLTVNERVAVPRETLRRFRALLHALDRNGPAGRSWGRSADHAVLRAALGFAHFVRMVTPEAGAPLVAQTRRLAERHGVGVGEARPRIPSFRQRSAEGAVPLARWWSPAEPSAPRPDPILAEAEAEAAKAAEHARRPAAPGRSGLPSIGRAGPSGAARPLGDPEPPSGSGADGGTMKPWMVVLGVFVLFQAGAVVHPVIGLLVLVAAVVIGLRRWFRRRR

SEQ ID NO: 6127 - protein, 598 aa, Methylobacterium nodulans
  source 1..598: note = Related to NC_011894.1
MTAQPGALTRQQLYDRIRETSKDEVILEEMIRLGFWPQGETQPSPPEELIRRRGEIARELAALHTAEARWRDPEAALKEMHKRRKKAALERRKETKRRGAEQRHARALAWHERRAEELVFLGDGVSAGLRADAAAPPAPRPGLPVLATPKALADAIGIPLAELRFLAYDRALSRISHYWRFTIPKKAGGVRLISAPMPRLKRAQYWILDNLLAHAPVHDAAHGFVPGRSIVTNAAAHVGRAVVVNLDLKDFFPTLSFRRVKGKFRGLGYAEPVATVLALLCTEPDVDEVEIDGERLFAARGPRRLPQGAPTSPLFTNLICARLDARLSGLARSMGFTYTRYADDLTFSGAAAEKIGALIGLVGEIVAAEGFVVHPDKTRIMRRGSRQEVTGLTVNERVAVPRDVLRRFRALLHQIEATGPAGKSWGQTRDVMAAARGFACFVRMVTPEAGEPLVATVRRLGERHGLTGTAPAPAAFRAKAAAGEPPLARWWIPAAPPAPEPEAVLREPAPPQPAKPMRSALDLASLRADLRDRAAPPAGPAQDPGEPAMKPWVAVIGVLVLWSAASAINPALGTIVLIAAIVIATRWLIRRWRRRRRR

SEQ ID NO: 6128 - protein, 606 aa, Methylopila capsulata
  source 1..606: note = Related to NZ_JAFBCY010000002.1
MSAQPGELTRQQLYDRIRESSKDEVILEEMIRLGFWPRNANKPDVPEALIRRRGEIDRELAALHAQEARWRDPDAALKEMHKRRKKAAMERRKETKRGHAQTRYERAVAWRERRATEILYLGEGVSGGLGGTDPARPLKAGLPEITSPKALADAIGVPLAELRFLAYDRKLSRISHYQRFAIAKKTGGVRQISAPMPRLKRAQYWILDALLGHAAVHDAAHGFVRGRSIVTNAARHVGRDVVVNLDLKDFFPTLDFRRVKGKFRGLGYAEPVATVLALICTEPDVDEIEIDGERLFAARGPRRLPQGAPTSPLLTNLICARLDARLTGLAASLGFVYTRYADDMTFSASGEAAAKVGAMLKFVNEIVAAEGFVVHPDKTRVMRRGGRQEVTGLVVNERVAVPRDVLRRFRALLHQIEATGPAGKRWGKARDVMDAATGFACFVRMVTPEIGEELLATVRRLDARHGAARAGAAPSKSPHGDFRGKAAAGVAPLARWWTPAEPPPPEPEPILREPEAAPEPDPPTSPQRPRSALDIAGLRAEMRDRAASAPEPQPDETEMKPWVAAIGIFVLLNVAFGIHPLLGLIALVATVVMVIRRALRRRRRRR

SEQ ID NO: 6129 - protein, 610 aa, Methylobacterium brachythecii
  source 1..610: note = Related to NZ_JACIDN010000003.1
MTVQPGSLTRQQLYDRIRESSKDEVILEEMIRLGFWPGDEAQPNLPAELIKRRGDIHREISELHKKERLWSDPETALKEMHKRRKKEALARRKETKLRNARGRHDRALAWHERRKSDVLYLGEGVSAGLHSDGVAKPLKPGLPALGSPKALAEAMGIPLAELRFLAFDRALSRISHYQRFTIPKKTGGERLISAPMPRLKRAQYWVLDAILDKVAVHEAAHGFVPGRSILTNAGAHVGREVVVNLDLKDFFPSLTFKRVKGKFRGLGYPEPVATVLALLCTEPDVDELELDGERLFAAKGPRRLPQGAPTSPMLTNLVCIRLDKRLAALAASLGFTYTRYADDMTFSASGEGAAKVSALLKYVGEIVTAEGFTVHPDKTRVMRRGRHQEVTGLTVNERVAVPRETLRRFRALLHQIGKNGPEGRHWGKARDVFDAALGFSFFVRMVSPAIGDPLIAEVRSLAARHGHAPKAVPEPTAFRAKSARGEAPLARWWIPAERPAPEPEAILIEPPKPAPRPAQANAPRSAIGAAAGMRARMQQEGPSGAWNQGSGRQTVEDGSIGSAFRRLPRRTYKILGILMLFGLVASVSPRLAALGLIFLIGYVIAERKKR

SEQ ID NO: 6130 - protein, 599 aa, Methylobacterium variabile
  source 1..599: note = Related to NZ_LABY01000112.1
MTVRPGSLTRQQLYDRIRESSKDEVVLEEMIRLGFWPGDAAQPDLPAALIKRRGEIHREIADLHAEERLWRDPETALKAMHKRRKTEALARRRETRLRHAQGRHDRALAWHARRGSEVLFLGPEVSAGLHSHAARRPLLPGLPDLATPKALADAMGLPLAELRFLAYDRALARISHYQRFTIPKKTGGERLISAPMPRLKRAQYWVLDAILAKVPVHEAAHGFVPGRSILTNAGAHVGRDVVVNLDLENFFPTLTFRRVKGKFRGLGYPESVATVLALLCTEPDVDELELDGERLFAARGPRRLPQGAPTSPMLTNLVCTRLDRRLAALAASLGFTYTRYADDMTFSASGEGAAKVSVLLRGVGTVVAAEGFTLHPDKTRVMRRGRRQEVTGLTVNERVAVPRDTLRRFRALLHQIDRSGPAGKRWGVARHVFDAAFGFACFVRMVSPATGDPLVSEVRRLSARHGTAQRAVPEASAFRARAARGETPLARWWSPAERPPPTPEPILLESPDPAPSTVPQSAIGAAAGAQTADRDGVWGRMPDDLPPGKAGLSRIVSGLLTLAGGLVLFVALLRISPPLALLGALVLAGLYAAGFFRRR

SEQ ID NO: 6131 - protein, 609 aa, Enterovirga rhinocerotis
  source 1..609: note = Related to NZ_SNZR01000011.1
MTVQPGSLTRQQLYDRIRESSKDEVVLEEMIRLGFWPGNEKQPNLPADLIKRRGEIQREIGELYRQQRLWRDPESALKEMHKRRKKEALLRRKETRRRNAAARHERALAWHERRKTEILYLGAGVSGGLGANEPELGRSPRDGLPEVATPKALADAMGIPLGELRFLAYDRALSRVSHYQRFTIPKKTGGERLISAPMPRLKRAQYWVLDNLLAKAPLHEAAHGFVPGRSILTNAGVHVGREVVVNLDLKDFFPSLTFRRVKGKFRGLGYPEAVATVLALLCTEPDVDELDLDGERLFAARGPRRLPQGAPTSPALTNLVCIRLDKRLTALAGSLGFAYTRYADDMTFSASGEGAAKVAVLLKMVGEIVADEGFTVHPDKTRVMRRGRRQEVTGLTVNERVAVPRDTLRRFRALLHGIDKQGPEGKSWGVARDVFDGALGFAFFVRMVTPEIGEPLVAQVRALAARHGGRDVAAPAISAFRAKAARGEAPLDRWWQPAERPAPKPEPVLAGAAPAPAPNGIRSAPGAAAGTGRPSPEATSVWGPGPARSAPESGSPSVTGSLWRLSIGLLKLAALLMLFSAGMVFAPRLAILGVFALIGVLAYRFIRRG

SEQ ID NO: 6132 - protein, 595 aa, Reyranella sp.
  source 1..595: note = Related to VOHA01000021.1
MTEPGTLTRQQLYDRIRESSKDEVILEEMIRLGFWPPGADQPDVPADLIRRRADLQREIADLHRQEALWRDPEAALKEMHKRRKKAALQRRAETKLRNAKGRHERALAWHERRQQELLYLGDGVSTGLHQTGTAMAPKAGLPSIASPKALAEAIGVSLSELRFLAYDRAVTRVSHYQRFTIPKKAGGERLISAPMPRLKRAQYWVLDNLLAKAVVHDAAHGFVPGRSILTNATPHVGRDVVVNLDLKDFFPTLTFRRVKGKFRGLGYSEAVATVLALICTEPDVDELEVDGERLFATRGPRRVPQGAPTSPVLTNVICFKLDARLSGLARALGFTYTRYADDMTFSASGEAAKKVGALLKYVREIVTAEGFVVHPDKTRVMRRGAHQEVTGLTVNERVAVPRDTLRRFRALLHQIETSGPVGKTWGAARDVLDAALGFAFFVRMVTPSSGEVLVTQVRALAARHGATPVPAVAPRDFRVKAARGETPLGRWWIPRERPAPAPEPVIVAHEAAAQAAAAPGTSRATSAGQAQLPPAFTPAPAAPAAKRGGTLATIGKWILGLLVFIVLMGIHPVLGGLFIAAVVGYMATRKRGGRD

SEQ ID NO: 6133 - protein, 523 aa, Bradyrhizobium jicamae
  source 1..523: note = Related to NZ_LLXZ01000195.1
MTETVSPGTMTRQELYDRIRQSSRDEVILEEMIRLGFWPDEGAPAPAAETIRERAEAMRELSELQRQNATLADPVRALKEMHKRRKAEAMARRQETKRRNAEARQTRAFAWFERRKRDVLYLGEDVSPGLHSRTTTIPLHDGLPPLADAKALADAIGVPLGELRFLAFNRKVASVNHYQRFTIPKKSGGERLISAPMPRLKRAQYWVLDNILARVPLHDAAHGFAPQRSILTNARNHVGRDVVINLDLKDFFPTLTYARVKGLFEALGYAEAVAIPLALLCTEPVVDEVTLDGERHFIADGPRLLPQGAPTSPAITNLICRRLDRRLMGLARTLGFVYSRYADDLTFSASGEAVKKIGTLLKAVHGIVEAEGFKVHPDKTRVMRRSTRQEVTGLTVNEALAVPRDLLRRYRAVLQQVERHGPDGKHFGPGKDVIRSLLGFGHFAVMVDPESGTPLLQRAQRLAAQYAPTRSERLPTRAAFRKAASAGQTPPGRQWTPAERPPPAPDPVLVALARQEEKTRAAQ

SEQ ID NO: 6134 - protein, 604 aa, Bradyrhizobium tropiciagri
  source 1..604: note = Related to NZ_LFLZ01000017.1
MNETVAPGTLTRQELYDRIRQSSKDEVILEEMIRLGFWPDGEDAPAPAADAIRGRAEAMRELTELQRQNATLADPERALKEMHKRRKAEAMARRQETKRRNAEARQSRAFAWYDRRKRDVLYLGEDVSLGLHTRTTTTPLRDGLPPLADAKALADAMGVPLGELRFLAFNRKVASVNHYQRFTIPKKSGGERLISAPMPRLKRAQYWVLDNILARVPLHEAAHGFAAQRSILTNARNHVGRDVVINLDLKDFFPTLTYARVKGLFEALGYAEAVAIPLALLCTEPMVDEVALDGERHFVADGPRLLPQGAPTSPAITNLICRKLDRRLVGLARTLGFVYSRYADDLTFSGSGEAVRKIGTLLKAVHGIVAAEGFTVHPDKTRVMRRSSRQEVTGLTVNEAVAVPRDLLRRYRAVLQQVERHGPAGKHFGPGKDVIRSLLGFGHFAVMVDPESGAPLLQRALRLAPQHAPARSARRPTRAAFRKAAAAGQTPPGRQWTPAERPPPAPDPVLVALARQDAKKRAAQARAAAPSPSRPPNVPPPPPGVTRPDGPPPAARPATAPSGKRPWFVTALVILLALALLPLPGGPAMAGALLFLYFSRWWKR

SEQ ID NO: 6135 - protein, 474 aa, Bradyrhizobium sp.
  source 1..474: note = Related to CP069300.1
MIRLGFWPDGEDAPAPAADVIRARADAMRELTELQRQNAMLGDPQRALKEMHKRRKAEAMARRQETKRRNAEARQSRAFAWYDRRKRDVLYLGEDVSRGLHARTTATLLRDGLPPLADAKALADAMGVPLGELRFLAFNRKVASVNHYQRFTIPKKSGGERLISAPMPRLKRAQYWVLENILARVPLHDAAHGFAPQRSILTNARNHVGRDVVINLDLKDFFPTLTYARVKGLFEALGYAEAVAIPLALLCTEPMVDQVALDGERHFIADGPRLLPQGAPTSPAITNLICRKLDKRLVRLSRVLGFVYSRCADDLTFSGSGEAVKKIGTLIKAVHGIVAAEGFNVHPDKTRVMRRSSRQEVTGLTVNEAVAVPRDLLVALARQDEKKRAAHARVTAPIPSRVPNVPSPPADATRAAGPQAAPATGPATAPSKKRQPWFVTALVILVALAFLPLPGGPAIAGAMLFLYFSRWWRR

SEQ ID NO: 6136 - protein, 611 aa, Labrys sp.
  source 1..611: note = Related to NZ_CP043489.1
MNQTVAPGTLTRQELYDRIRESSKDEVILEEMIRLGFWPDGTAAPSPAAAAIRERGEAMRELGELQRQNALWSDPERAIKEMHKRRKAEALAQRTETRRRHAQARQDRAEAWHIRRQREVLYLGEGVSAGLSADPIRRSLLPGLPDIADAKALADGIGIPLSELRFLTYSRKVSSVSHYQRFRIPKKTGGERLISAPMPRLKRAQYWVLDNILARVGLHEAAHGFVPQRSILTNARNHVGKDVVVNLDLKDFFPTLTYARVKGMFRSLGYAEKAAIPLALLCTEAKVDEVHLDGERHFVGDGRRLLPQGAPTSPTITNLICRYLDRRLDGLANELGFTYSRYADDLTFSGSGEAVRKIGTLLKAVQSIVTAEGFTIHPDKTRIMRRSGHQEVTGLTVNERVAVPRPLLRRYRAVLQQVEKHGPAGRHFGPGKDVVRSLLGFGQFAAMIDPDKGRALLERARRLASQSTANSKLSRSGGQAAFRAAAAAGRAPAGCHWTPTERTAPALDPVLAALEREEAKKAEQAQRKAHASQQAMAQSALRRPSAEPAGQARGQAQGSSGQPARKKLRFTPKRLLMIAAIVIFPTLIPGVGPFIAGLLLYLYLRWMWKQG

SEQ ID NO: 6137 - protein, 544 aa, unidentified
  source 1..544: note = Related to JACMJA010000359.1; note = Verrucomicrobia bacterium
MSILPENTQPRTRQELYDLIRQTSRDEFVLNEMIRLGFWKKNEGQPSLPEQLIRQETQLHQELKTLVSEKKRLDDQQKMLKEMRKKRMLESRLKREETKKRRELERQQKAENWKNKKTTEIGYLGENVSSGLNFTASNPEKLSRYNIPFFTNAVSLAQALNISVGELRFLAFSREVSKVNHYHRFQIPKKTGGQRLISAPMPRLKKVQTWILENVLEKIELHTSAHGFVASRSIVSNAIPHLKAETVVNLDLKNFFPTLTYARIKGLFLGLGYSEAMATLLGLLCTEPETDAVILDKETWFVASGERFLPQGSPASPALTNIICATLDKRLQGLAQKLGFVYTRYADDLTFSATGEGTKNIHKIISLTQKIVEDEGFSVHPDKTRIMRKGSKKEVTGIVVNEKPSVDRTTLRKFRALLHQMEKEGFAGKSWGHTPDVLAAVEGYANFVKMVDAEKGDKFKQQIKGIIAKWGDSIPTPVRKVYPKKEKQTVSPVFETMTILPTSETQISENQVVIPQVTIPETANKDTSNEKPEEKKTFWKTWKK

SEQ ID NO: 6138 - protein, 525 aa, Catalinimonas alkaloidigena
  source 1..525: note = Related to NZ_FNFO01000004.1
MAEETPPQPRTRQELYDQVRQSSREAVTLREMARMGFWPKGQGIPPIPQALLEKQQALQQELQPLVEQSRKMEDRVRMLKELRKKRMAESRQKRKETKERRERERQARQAAWEQRKTHEILYLGEGVSGGLSQTDDDAQKLQHYQLPRFENAKALAEDMGITVNALRFLAYNRPVSTLTHYQRFTMPKKTGGQRLISAPMPRLKDAQYWVLHHLLQLLPVHEAVHGFCAGRSIVSNARPHVGRQVVLNFDLKDFFPTLTYTRIKGLFCALGYAEAIATPLALLCTEPDTDEVTLDGQTYYVANGERYLPQGAPTSPALTNLICLRLDRRLTGLATKLGFTYTRYADDLTFSADAEGMKHINTLRVMLHRIVEEEGFQVHPDKSRVMRKGSKQEVTGIVVNEKPGVDRATLRRFRALLFQIEKDGIAGKRWGTSPDVVAAIHGYANFVAMVDPEKGKALQERVARIIATVAPHFKKRPRKTYPARSGKWLQTASSEASSSEASTDSGNVNAIPEPPAAKKPWWKFW

SEQ ID NO: 6139 - protein, 542 aa, unidentified
  source 1..542: note = Related to CADCTQ010000349.1; note = Cytophagales bacterium
MAEQSNLPEGTRPADRQELYDLIRRTSKDDFILRDMKRLGFWPDDAGQPTLPEQVIFRETDLNRELSALLTEKRRLEEQEAMLKELRKQRLAESRLKREETKQKREQARKDKAADWQRKKQSGILYLGEGVSGGLNETAADPGKLAGLNLPVLTDAASVALAMQVPVGQLRFLAFSRQVSRTTHYQRFYVPKKTGGERLISAPMPRLKAAQAWILANILDRVPSHEAVHGFLPGRSIVTNAAPHVGAGVVINLDLKDFFPSITYRRVKGVFRALGYSESVATILGLLCTEPQVDQAELDGETWYVATGERHLPQGSPASPAITNILCATLDRRLQGLARKRGFSYTRYADDLTFSASGEGTKNINILKNAVKAIIESEDLTLHPDKTRIMRMGSRKEVTGVVVNDKPGVDRTTLRRFRALLHQIELKGPQGKKWGHSADLLAAIEGYANFVLMVDAEKGKKLKAQVKAIAQKYGDAMPRRPRKVYPKKEKPAAPTPATATVAALPPTPPPPPVPAQPPVPGPDASAPESAEPKKTWWKLWKK

SEQ ID NO: 6140 - protein, 535 aa, Ferruginibacter sp.
  source 1..535: note = Related to JACMKY010000311.1
MSSDSEPLRPATRQELYDRLRQAGTRDAFLLEEMKRLGFWPSNHEVPNVSEQFILREADLARELRALYSEHRRLEDEAAMLRELRKQRLAESRQRREVTKLRRERERKDRADQRKKRQESEIGYLGEGVSGGLNHPEADEARLARFHLPVLTDAQSVAGSLGVSVGELRFLAFSRAVSRTNHYQRFYLPKKTGGRRLISAPMPRLKAAQYWILENILRLVPVHDAAHGFVGGRSIVSNARPHVGAQVVINLDLKDFFPTVTYPRVRGVFRKLGYSEAAATILALLCTEPDVDQAELDGETWFIADGERHLPQGAPTSPALTNLLCTRLDRRLAGLAAKLGFAYTRYADDLTFSASGERTKNVNKLRSLVHLIVEGEDFRVHPDKTRVMRPGSRKEVTGIIVNDKPGVDRTTLRKFRALLHQIEQEGIAGKRWGHTDDVLAAIQGYARFVAMVDAQKGQVLTARVKAIIDQIEPAFAKRPRKTYPQGARRWIKKMVVAETPTASGVPANPSAPTPNPEKPQGIVWKLLGKLGGKKK

SEQ ID NO: 6141 - protein, 516 aa, unidentified
  source 1..516: note = Related to JADLDL010000134.1; note = Saprospiraceae bacterium
MAEQSNLPDGARPTTRQELYDLLRRDGLNRDSFVLQDMKRLGFWPDTKDQPSVPEQFLNRESQLYRELNALVTEKRRVEDREQLLKELRKQRMAESRRKREETKKRRIEAARLRAENWEKRKETEINYLGEGVSGGLNDTATDTERLALAQLPVLSDPAAIAAAMNIRVSELRFLAFSRAVSKTSHYRRFLIPKKTGGFRQISAPMYRLKDAQYWILQQILDKVPLHEAAHGFVPARSIVSNARPHVGAGVVINADLQNFFPSITYPRVKGVFRKLGYSDAAASTLGLLCTEPAIDEVVLDGENWFVAAGERFLPQGAPTSPAITNILCRQMDRRLQGLAQKLGFTYTRYADDLTFSASGEGEKKVNLLLKFVRQIIENEGFVLHPDKTRVMRTGRRKEVTGIVVNEKPGVDRKTLRRFRALLHQLETEGPAGKTWGHTPNLLAAIEGYANYVFMVDPEKGAALKAQVRQVAGALTRAPRKRYPARKKLAGSAPLPETPTAAPTEQESAKPWWKFW

SEQ ID NO: 6142 - protein, 467 aa, unidentified
  source 1..467: note = Related to KI932172.1; note = Candidatus Entotheonella factor
MPDEQPQTRQALYDRIRESSKWEVILEEMIRFGFWPAEGTLPDDPADEIRQRGELERELKALRTEQARLKNQAMMLREMRRRRLEASRLKQKENRERRERERQERAAAWQERKSREIGYLGPGVSGGLQAVESDTDRLESFGLPVLHTPAQLAEAMGLRVGALRFLAFSRDVSRTSHYVRFKMPKKTGGERLISALMPRLKQAQRWILDHLLVRLTPHDASHGFRHGRSIVSNARPHTGCAVVVNMDMKDFFPTVDYPRVKGFYRALGYSEAVSTVLALLCTEAETEEVVLDGITWYVTLGERHLPQGAPTSPAISNLICRRLDQRLSGIAGTLGLTYTRYADDLTFSAEAADAPMIGKLLRQTRFVVEAEGFELHPAKTRVMRRHQRQDVTGVVVNQQPAVARKTLKRFRALLHQIETTGPDGKHWGGNPNVLHSIQGFANYVYMVDPDKGAVLKQRVQRILASQR

SEQ ID NO: 6143 - protein, 467 aa, unidentified
  source 1..467: note = Related to PPXO01000342.1; note = Candidatus Entotheonella serta
MSEEQPQTRQALYDRIRESSLGEVILGEMIRHGFWPAENKIPEDPPEEAQQRGELERELKALRTEQARLKNQAAMLRELRRRRLQASRLKQQENRERHERERQARAAAWQERKARDISYLGSGVSGGLHGTESPAARLEQLGLPVFHTPSQLAEAMGLRVGTLRFLAFHRDVSRTSHYIRFKLPKKTGGERLISAPMPRLKQAQHWVLSNLLVKLTSHDASHEFRHARSLVTNAQPHTGQAVVINMDMKDFFPTVSYPRVKGFFQALGYSEAVGTVLGLICTEAETEEVVLDDTSWYVALGERHLPQGAPTSPAISNLICRRLDQRLHGIARKFGMIYTRYADDLTFSAEAEAPAAIGKLLRQTRFVVEAEGSQLHPTKTRVMRHHQRQDVTGGVVNQQPAVARKTLKRFRALLHQIETTGPDGKQWGGNPNVLHSIQGFANYVYMVDPDKGTALKQRVQRILAMQS

SEQ ID NO: 6144 - protein, 347 aa, Chroococcidiopsis thermalis
  source 1..347: note = Related to NC_019695.1
MVVKHQATIPRLTEGSIEQLRKRGLPECNTDEEIALAMGISVEKLHFLAGDRSISSTSLYSRFQISKKTGAARTITAPTPELKAAQRWILKHILDKIEIHDAAHGFCRDRSIVTNATPHVGRDVIVKLDLQNFFQLITYKRVKELFHGFGYSETAATIFGLICTIATTNNSNKTSCKNIEKRHLPEGAPTSPAISNLVCDRLDTHLTKLANNLGFRYTRYADDLTFSCYGAAHKVDKLIQESKSIVTQESFTVNSDKTQVLSKSVQQIVTGIVVNQQLNLSRKTLKAFRATLYQIEREGLSGKKWGNSNNLIATITGFANYVAMVNPSKGAEFLASVERIKQKCDRS

SEQ ID NO: 6145 - protein, 348 aa, Scytonema millei
  source 1..348: note = Related to JTJC03000001.1
MVVKHQATIPRLIEGSIEQLRKKGFPECNTDEEIAMAMRISVEKLRFLAGDRNLSSNSLYSRFQIFKKTGEARTISAPTPELKAAQRWILKQILEKIEIHDAAHGFCRDRSIVTNASPHVGKDVIVKLDLQNFFQSILYKRVKELFCSFGYSETAATIFSLICTVTKIDINGKNSCNDIEKRHLPQGSPTSPAISNLVCDRLDTHLTKLAHNFGFCYTRYADDLTFSSFEKTSRQVNNLIHGSKLIITEEGFTVNPDKIKVLSKSVQQEITGIIVNQQLNLSRKTLKAFRATLYQIEQEGLSGKKWGNSNNLIAAITGFANYVAMVNPSKGAEFLASVERIKQKCDRS

SEQ ID NO: 6146 - protein, 348 aa, unidentified
  source 1..348: note = Related to NDGV01000134.1; note = cyanobacterium TDX16
MNIQPQVTISRLTEGSIEQLRKRGLPECNTDEEIALAMGIGVEKLYFLTNKYPTSSTSHYFRFQISKKTGETRTISAPSPELKAIQKWILKHILEKIEIHDAAHGFCRNRSIVTNARPHVGRDVIVKLDLQNFFQSILYKRVKELFCSFGYFETAATIFSLICTVAEINVNNKINYKDTEKRHLPQGSPTSPAISNLVCDRLDTYLTKLANNLGFCYTRYADDLTFSGFENASHKINNLIHESQLIITEEGFTINPDKIKVLNKSVQQEITGIIVNQQLNLSRKTLKAFRTTLYQIEQEGLSGKKWGNSTDLIAAITGFANYVAMVNPSKGAEFLASVERIKQKCDRP

SEQ ID NO: 6147 - protein, 354 aa, Cyanosarcina radialis
  source 1..354: note = Related to JAHHHA010000036.1
MSPSDEGDLNRLWSKGLPECNSEAEIALVMEMSIEKLRSLAFNYPTSSTTNYHRFQILKKPGESRAISAPMSDLKVAQKWISTRILEKIQVHDAAHGFRRNRSIVTNAKPHVSADIIVKIDLQDFFRSISYQRVKKLFLDVDYSETAARIFGLICTVNETEEIEIDGKINYKTIGKRHLPQGSPASPAISNIICYDLDRRLSQVAQELGFCYTRYADDLTFSGSRDVKSKISKLISETRTLIESEGFTINPNKTQILGTSVQQKVTGVVINKKLNVAKKTLKAFRATLYQIEREGLAGKRWGNSTDIMAAITGFANYVAMVNPNKGVELLTSIKRIEQKYAPPESPRFTIEEEF

SEQ ID NO: 6148 - protein, 317 aa, Chondrocystis sp.
  source 1..317: note = Related to NZ_AP018281.1
MYNTEAELALSMNISVKQLRWLAFKPFTYPVIHYSRFQIAKKTGETRTIYAPKPYLKTAQIYILKNILDNLAVHDAAHGFRRHRSIITNAQPHVGADIIIKLDLENFFSSITYKHVQKLFLSLGYSQSIGTLLSLICTIKDVETCHPRCLPSGSPASPTISNLVCYNLDQNLSQIASDLGFTYTRYADDLTFSGKRDRANISTLIKQLLAVIAQFGFKINPNKIQILPKSVRQEVTGIVVNHKLNISQTKLKAFRATLHQIEQDGLSGKKWGNSPNLIASITGFSNYVAMINPEKGGELLESVERIKQKHILNTPVL

SEQ ID NO: 6149 - protein, 354 aa, Oscillatoria nigro-viridis
  source 1..354: note = Related to NC_019729.1
MASKATYKLHVTSVSAEGHPKNLQLHGLAECNTAEEIALAMGISRGKLRFLTLNSPASTITHYTRFKISKKTGEERSIVAPGPNLKSAQRWILDNILEKLEVHSAAHGFCKKRSTVTNAKPHVGADILVKIDLQNFFQSISYKRVKGLFSGLGYSETAANIFGLICTAFEIKEIEKEGQINYTASGDRHLPQGSPASPAISNLICRHLDSRIAIVAKNLGFCYTRYADDLTFSGCGEAARRISNLMKEIKLIIAAEGFSINRDKTKIMGRSVQQEVTGIVVNTQLNISKKTLKAFRATLYQIEQEGLSGKKWGNSTNLIASIAGFANYVSMVDPSKGAELQLRVARIKQKYEGK

SEQ ID NO: 6150 - protein, 357 aa, Nostoc sp.
  source 1..357: note = Related to LWTK01000036.1
MYGTNLITIPLAMDGNSERLETDKSVVLRSHGLAEYNTVTEIACAMGITPGQLRFLTSSFSGSQVKHYVHFQISKKTGGERLISAPKPNLKAAQKWILQNILEKLEVHNSAHGFCKNRSIVTNAQPHVGNDVIVNIDLQNFFEAITYKRVKELFSGFGYSETAAKIFAVICTTSEIEIHGQANDITSGNRHLPQGSPASPAISNLICYHLDSRIAAMAENLGFCYTRYADDLTFSASGQASHKIYNLIKNVKLIINSEGFTVNFHKTNILSKSVQQEVTGVVVNTKLNISKKTLKAFRATLYQIEQEGLSGKHWGNSTNIIAAITGFANYVAMINPDKGAELRSRVERIKQKYECQE

SEQ ID NO: 6151 - protein, 349 aa, Nostoc linckia
  source 1..349: note = Related to LAHB01000047.1
MYATNLTTTPLAIEGNSAVLRSHGLAEYHSAAEIACAMGINPGQLRFLTSSFPGSEVKHYVHFKISKKTGGERLISAPKPHLKAAQRWILENILEKLEVHHAAHGFCKNRSIVTNAQPHVGADVIVHIDLQNFFQSITYKRVKELFSGCGYSGIAANIFALICTTSEIEIHEQAHNISIENRHLPQGSPTSPVISNLICYHLDRRMVKMAENLEFSYTRYADDLTFSASGQASERRYKLIKNAKLIINSEGFTVNSHKTNILGKSVQQQVTGVVVNTQLNISKKTLKAFRATLYQIEQEGLSGKHWGNSPNIIAAITGFANYVAMINPNKGAELRSRVERIKEKYESQE

SEQ ID NO: 6152 - protein, 361 aa, Nostoc punctiforme
  source 1..361: note = Related to NC_010628.1
MYSQNLTTIPLATESNLERLETDNLALLRSHGLAEYNTAEEIAFAMVISLEKLHFLTTSTSLTRHYLPFKISKKTGGKRIISAPKPELKAAQRWILENILEKLEVHNAAHGFCKNRSIVTNAKPHVGANVIVNIDLQNFFQSISYKRIKELFSGFGYSESTATIFGLICTTAEIAINGQINHTASENRHLPQGSPASPAISNLVCRNLDIRLAAIAENLGFCYTRYADDLTFSTSEDASSKISNLIKNTKFIIHGENFTVNDNKTKISSKSVQQEVTGVIVNTQLNISKKTLKAFRATLYQIEQEGLSGKSWGKSTNLIAAITGFANYVAMINPDKGAEFKSSVERIKQKYGGSQTDEVRF

SEQ ID NO: 6153 - protein, 346 aa, Nostoc piscinale
  source 1..346: note = Related to NZ_CP012036.1
MSCQNYTQNNIEQLKKCNLDVYNNAEQIAAAMEISIDKLRFLTFTSKTSQISHYIYFKTAKKLAGDRIISAPMPDLKRAQYWILQNILQKIAIHDAAHGFCGDRSIITNANPHVGAEIIMNIDLQDFFSAITYQRVKGLFQSFGYASSVATIFGLLCTAPVVEERNLDGKTDFVEFKQRHLPQGSPASPAITNIICRNLDQRLCAIAEKFGFTYTRYVDDLTFSASGENLQHTKNIIKQVQSIISDEGFAINPDKTRILRNSQQQEVTGIIVNQKINISRKKLKSFRATLHQIENEGLEGKHWGNSSNLIASITGFANFVAMVNPEKGAEFQQQIQRIQEKYGKNK

SEQ ID NO: 6154 - protein, 346 aa, Nostoc sp.
  source 1..346: note = Related to AP018318.1
MNFQNHNQNNIEQLKKYNLDVYNNAEQIAASIEISIARLHFLAFNSQTSHISHYIHFKTAKKIAGTRIISAPLPDLKRAQYWILHNILQKIAIHNAAHGFCGDRSIITNATPHIGAEVIINIDLQDFFSAITYPRVKGLFQSFGYSSYVATIFGLLCTAPVVEERNVDGEINFVELKQRHLPQGSPASPAITNIICRSLDERLSAIATQFGFTYTRYVDDLTFSASGEQIKHTSSFIKQAQSIISDEGFAINPDKTRILRNSQQQKVTGIIVNQKINISRKKLKSFRATLHQIENEGLEGKYWGKSSNLVASITGFANFVAMVNPEKGAEFQQQIQRIQKKYGKKN

SEQ ID NO: 6155 - protein, 347 aa, Nostoc sp.
  source 1..347: note = Related to JAIVFW010000047.1
MDLQNNTQENIEQLKKYGLDAYNTAEEIAAAMEISFDRLRFLVFNSKNSTVSHYIHFKTAKKTEGERIISAPLPDLKRTQHWILKNILQKIGIHDAAHGFCRDRSIVTNATPHVGAEVIINIDLQDFFSAISYQRVKGLFQSFGYSSSIATIFSLLCTTPAVAERDLDGKADFVKLKQRLLPQGSPASPAITNIICGSLDDLLSAIAQKSGFTYTRYVDDLTFSTSGESIKYISNIIQQTQSIVSDEGFTINSEKTRILRNSQQQEVTGIIVNEKINISRKKLKNFRATLYQIEHEGLEGKHWGNSPNLIASITGFANFVAVYRRLVTGKNPGLSATTPSPWVKAPC

SEQ ID NO: 6156 - protein, 351 aa, Nostoc sp.
  source 1..351: note = Related to MTAV01000048.1
MGLQSNKQGNIDYLNNYGLDAYNTAEQIAAAMEISVDKLRFLAFNGKTSTVSHYIHFKTAKKNVGQRIISAPLPDLKRAQHWILKSILQKIEIHDAAHGFCCDRSIVTNATPHVGAEVVIKFDLQDFFSRISYQRVKGLFQSFGYSPAVAAIFGLLCITAAVEERELDGKTYFVELKHRQLPQGSPASPAITNIICRNLDRRLMAIADKYGFTYTRYVDDLTFSASAENVKHISNIIKQTQSIVADEGFAINQEKTRILRNSQQQEVTGIVVNEKINISRKTLKSFRATLYQIENEGFEGKHWGNSGKLIASITGFANYVAMVNPQKGAEFQEQIKRIQKKYEIKHSSENQ

SEQ ID NO: 6157 - protein, 469 aa, Calothrix parasitica
  source 1..469: note = Related to NZ_AP018227.1
MSEQPRTRQELYEQVRKVGKEEFILEEMIRYGFWSPQGTIPEDPADEIRRASQIRKELQELRRESSRLHNEQQLRKDALKRRLAESRKKQQETKERRERERLERAEAWKQRKQREIIYLGEEVSAGLNHAESNLERLRNNNLPLCNTAEEIAVAMGINIGKLRFLAFNRKTSTVSHYIRFKMPKKTGGERFISAPMPNLKQAQHWILTNILDKLNVHEAAHGFCRQRSIITNATPHVEKDVVINFDLKDFFPSISYKRVKGLFHSFGYSETAATIFALLCTSADVEKLQLDARTYYVAVGDRYLPQGSPASPAISNLLCRRLDKRLTGMAEKLGFTYTRYADDLTFSADGESLRHICNILKRTESIVTHEGLRINQDKTRVLRNTRQQEVTGIVVNEKLSVCRKTLRKFRATLFQIEKEGLEGKKWGNSTNLIAAITGYANFVAMVNPERGQEFQKQVKRIKAKYLGNW

SEQ ID NO: 6158 - protein, 466 aa, Calothrix desertica
  source 1..466: note = Related to NZ_VLKB01000009.1
MSDQPRTRQELYDRIRQTGKDEFILEEMIRFGFWAPQGTIPEDPADEIRRQGEIRRELETLRQQSSQLRNEKELRKQMLKQRLEESRRKQKETKERREQERLERAAAWQEKRQKDIIYLGEDVSGGLNNTEANIERLQSHNLPLCNTALEIAEAMGVTIGKLRFLAFNRKTSTISHYIRFKVPKKTGGERLISAPMPNLKQAQYWILENILNKLEVHDAAHGFRENRSIITNATPHVGADVIINFDLKDFFPSISYKRVKGLFQSFGYSEAAATIFGLICTAADIEQVELDGKTYYVALDDRHLPQGSPASPAITNLLCRRLDRRLQGMAENIGFTYSRYADDLTFSAKTENRRHICNIMRRTESIVTHEGFNINHDKTRVLRNTNQQEVTGIIVNNKLNISKKVLKKFRATLHQIEQEGLQGKHWGNSHDTLAAITGFANFVAMVNPEKGAEFQQQVQRIKKKRK

SEQ ID NO: 6159 - protein, 469 aa, Scytonematopsis contorta
  source 1..469: note = Related to JAHHIC010000071.1
MTDQPRTRQELYDRIRTMGREEFILEEMIRYGFWPAEGTMPEDPADEIRHRGELERELRELRQENNRLHNEQAFKKEMLKQRLEESRRKRQETKERRERERQERAEAWKQKKQKEITYLGEEVSAGLNNTQSNEERLRSNKLPLCNTSEELATLMGISLGKLRFLAFNRKTSTVSHYIRFRMPKKTGGERIISAPMPSLKAAQHWILENILQKLQIHDAAHGFTKERSIVTNATPHVGADVIINLDLKDFFPSISYKRVKGLFTSFGYSEATATILALICTAAQVEELELDGKTYYVALGDRQLPQGSPASPAITNLLCRRLDKRLTTMSGQLGFTYTRYADDLTFSGSGDSLRHICNILRRTESIVTHEGFTVNQEKTRVLRKSRQQEVTGVVVNQKLSVCKKTLKQFRATLYQIEKEGLEGKHWGGSPDLLAAITGYANFVAMVNPEKGLELQKQVQQIKKKYRRPR

SEQ ID NO: 6160 - protein, 469 aa, Calothrix desertica
  source 1..469: note = Related to NZ_VLKB01000007.1
MSDQPRNREELYQYISKVGREKFILEDMQRYGFWQGDSPQGSEEDTRRQLEIQREINELGRQSSKLQNEKLLRELSLKKRLEESRRRRQETKERQERERQERAEAWRQRKEKEILYLGEDVSGDLNNTEGNEERLNSLSLPVCNTAEQIAAAMEITVGKLRFLAFNRKTSTVSHYIRFKMPKKTGGERIISAPMPQLKQAQHWILASILEKLELHDAAHGFRRERSIVSNATPHVGAEVIINFDLKDFFPSISYKRVKGLFRSFGYSGAAATIFALICTAAEVEELELDGQNYYVAVGDRFLPQGSPASPAISNLLCRRLDRRLTEMAEKLGFAYTRYADDLTFSASGDSLNSICNILRRTESIVTHEGFTINQDKTRIQRKYNQQEVTGVVVNEKPSVCRKTLNRFRATLYQIEKSGIEGKHWGNTSNTIAAITGFADFVAMVNPEKGAEFQEQVKRIKEKLKQNTLS

SEQ ID NO: 6161 - protein, 469 aa, Calothrix sp.
  source 1..469: note = Related to NZ_AP018172.1
MSDQRRSREELSKLIREVGKEEFILEEMLRYGFWKGESLRELDAEIHRQEEIRRELETLRQQSLQLQDEQLLRQQSLKKRLEESRRKRQETKERRERERQERAEAWKQKKEKEIVYLGEAVSADLNNTQGNQEKLNSLGLPVCNTAEEIATAMGVTVGKLRFLAFNRNTSTVSHYIRFKMPKKTGGERIIFAPMPNLKQAQHWILENILQKLEIHDAAHGFRRERSIVTNATPHVGAEVIINFDLKDFFPSISYKRVKGLFRSFGYSGAAATIFALLCTAAEVEELELDGQNYYVAVGERHLPQGSPASPAISNLLCRRLDSRLTAMAEKLEFIYTRYADDLTFSVSGESRRYICNILRRTESIVIHEGFTINQEKTRILRKSSQQEVTGLVVNNKLSISKKTLNRFRATLYQIETEGLEGKHWGNSSNLIAAITGFANFVAMVNPEKGAEFLERIKRIKKKFRRNNIE

SEQ ID NO: 6162 - protein, 470 aa, Chlorogloeopsis fritschii
  source 1..470: note = Related to JACYLT010000232.1
MTDQPRTREELYDRIRKMGREEFILEEMIRYGFWPAQGTIPQDPADEIRRAGEIRRELEQLRRESSRLQNEKALRKQMLKQRLEESRRKQQETKERRERERQERAQAWNQKKQQEIIYLGEGVSAGLNNSQGNEERLRSLGLPLCNTAEEIAAAMEISVGKLRFLAFDRKTATVSHYIRFKIPKKTGGERLISAPMPNLKQAQHWILENILQKLQVHDAAHGFRIQRSIVTNATSHVGADVIINFDLKDFFPAISYKRVKGLFLSFGYSEAAATIFGLLCTAAEVEELELDGKTYYVALGERHLPQGSPASPAITNLLCRRLDRKLTTMAESLGFNYTRYADDITFSASGDSLRHICNIIKRTESIVTYEGFAINQDKTRILRKSRQQEVTGVVVNNKLNVSKKILKQFRATLYQIEKDGLEGKHWGNSPNLIAAISGFANFVAMVNPEKGAEFQQQVQRIKKKYARRKN

SEQ ID NO: 6163 - protein, 470 aa, Chlorogloeopsis fritschii
  source 1..470: note = Related to RSCJ01000007.1
MTDQPRTREELYDRIRKMGREEFILEEMIRYGFWPAQGSMPQDPADEIRRAGEIRRELEQLRRESSRLQNEKALRKQMLKQRLEESRRKQQETKERRERERQERAQAWNRKKQQEIIYLGEGVSAGLNNSQGNEERLRLLNLPLCNTAEEIAAAMEISVGKLRFLAFDRKTATVSHYIRFKIPKKTGGERLISAPMPNLKQVQHWILENILQKLQVHDAAHGFRIQRSIVTNATPHVGADVIINFDLKDFFPAISYKRVKGLFLSFGYSEAAATIFSLLCTAAEVEELELDGKTYYVALGERHLPQGSPASPAITNLLCRRLDRKLTIMAGSLGFNYTRYADDITFSTSGDSLRHICNLLKRTESIVTYEGFAINQDKTRILRKSRQQEVTGVVVNNKLNVSKKILKQFRATLYQIEKDGLEGKHWGNSPNLIAAISGFANFVAMVNPEKGAEFQQQVQRIKKKYARRKK

SEQ ID NO: 6164 - protein, 469 aa, Tolypothrix bouteillei
  source 1..469: note = Related to NZ_JHEG04000001.1
MTDQPRTRQELYERIRQIGREEFILEEMIRYGFWPAEGTIPQDPADEIRRVGEIRRELEELRQESSRLHNEKELRKEMLKQRLAESRRKRQETKERRERERQERAEAWKQKKQQEIVYLGEGVSAGLNETEGDSERLQSYGLPLCNTANEIATAMGINVGKLRFLAFDRKTSTVSHYIRFKMPKKTGGERLISAPLPSLKQAQHWILGNILQKLEVHEAAHGFRCDRSIVTNATPHVGADVIINFDLKDFFPSISYKRVKGLFRSFGYSEAAATIFSLLCTAAEVEELELDGKTYYVALEERHLPQGSPASPAITNLLCRRLDKRLTAIAQELGFSYTRYADDLTFSASGDSLRHICNLLKRTESAVIYEGFAINQEKTRILRKSSQQEVTGVVVNDKLNISKKTLKQFRATLYQIEKDGLEGKSWGNSSDVLAAVSGFANFVVMVNPEKGAEFQQQIQRIRKKYKQKK

SEQ ID NO: 6165 - protein, 470 aa, Hassallia byssoidea
  source 1..470: note = Related to NZ_JTCM02000014.1
MSDQPRTRQELYDRIRQVGTEEFILEEMIRYGFWSAQGEMPQDPADEIRRAGEIRRELNELRQESRKLQDEKELRKRLLKQRLEESKRKRQETKERREQERRSRAEVWKQKQQQDIIYLGEDVSAGLNNTQGNEERLHSYNLPLCNNAEQIAAAMGITVGKLRFLAFDRKTSTVSHYIRFRMPKKTGGERIISAPMPNLKQAQHWILANILEKLELHDAAHGFRRDRSIVTNATPHVGADVIINFDLKDFFPSISYKRVKGLFHSFGYSEAAATIFGLVSTAAEVESLEIDGKTYYVAVDERHLPQGSPASPAITNLLCRRLDRRLTAMAEKLGFTYTRYADDLTFSASGDSLRHICNILKRTESIVTHEGFTINQEKTRILRKSRQQEVTGVVVNDKPNVDNKTLKRFRATLFQIEKDGLEGKHWGNANLIAAIAGFANFVAMVNPEKGAEFQQQVQRIKNKYVRNGRS

SEQ ID NO: 6166 - protein, 478 aa, Aetokthonos hydrillicola
  source 1..478: note = Related to NZ_JAAKGC010000016.1
MTDQPRTRQELYDRVRQVGKEEFILEEMIRYGFWFAQGELPQDPADEIRRAGEIQRELQQLRQENNRLHNEKALRKQMLKQRLEESRRKRQENKERREKQRKEKSEAWNQKKQHEIIYLGEGVSGGLNNTEGNQERLQSYGLPLGDTPEQIAAMMGISMGKLRFLAFNRKVSTVSHYIRFKIPKKTGGERLISAPMPSLKRVQHWILENILNQLEVDDAAHGFRRDRSIVTNATPHVGADVIINFDLKDFFPSISYKRVKGLFHSFGYSEAAATIFALLCTTAEFEEVELDGKTYYIALDERHLPQGSPASPAITNLLCRRLDRRLTGMAKNLGFTYTRYADDLTLSGCGNSLRHICNILRRTDSIVAHEGFTINQEKTRILRNCHQQEVTGVVVNDKPNVSKKTLKQFRATLYQIEKDGLEGKSWGNSHDIIAAITGFANFVAMVNPQKGAEFQQQVKRIKQGVRSQNTGVRNQESE

SEQ ID NO: 6167 - protein, 568 aa, unidentified
  source 1..568: note = Related to JAGHZQ010000069.1; note = Cyanobacteria bacterium SBLK
MSQQPRTRQELYDLIRSRGGKREFVLEEMIRLGFWPQQGTLPEDPADEIRQEGEIRRELSELRRESSRLHSEKQLRKQALKQRWSESRRKQKETRERRERERQERAEAWQQQKQREIIYLGEEVSGGLNNQDGDRDRLQSRGLPMVNNAEEIAAAMGITVGELRFLAFNRKVSSLSHYIRFKIPKKRGGERLISAPMPRLKRVQHWILREVLEKIEVHEAVHGFRRDRSILTNARPHVGADVAINFDLKDFFPTISYKRVKGLFRSFGYSEAAATILGLLSTEADLEEVELDGKTYFVASGDRHLPQGSPASPAISNIICRRLDRRLSGMATSLGFTYTRYADDLTFSASGENNLRSLCNLLRRTESIVTHEGFIINDEKTRIMRRKSSQLEVTGIIVNERPTIDSKTLRRFRATLYHLEKDGIQGKYWGNSRDVGIMLAVQGFANFVNMVHPEKGKVFLEQIDRIREKWTLKETKKSSPTPSISLPVIEEKTPEAIPEQSLPDGIILECYKQGSKLKVRVISQGYNSSWNVQIPRNLMAEGARYRVEELRESAVGGFYRTVGSIQKL

SEQ ID NO: 6168 - protein, 565 aa, Spirulina major
  source 1..565: note = Related to NZ_JACSWA010000397.1
MSEQPRTRQELYDLIRSKGSKPAFVIEEMIRLGFWPAEGTLPDDPADEIRREGELLRELSELRRESSRLHSEKQLRKEALKQRLQESRRKQQEIKERREQERRDRTEAWQKRKEREIIYLGEGVSGGLNHQDGNIERLQSYGLPILNDAEQIAVAMGISVGELRFLAFDRKTATLSHYIRFKIPKKTGGERLISAPMPRLKKVQHWLLHEILDKVEVHEAVHGFRGDRSILTNAVPHIGADVVINFDLKDFFPTISYKRVKGLFRALGYSEAVGTILALLSTEADVEEVELDGKTYFVALGDRHLPQGSPASPALSNIICRRLDKRLSGMAANLGFTYTRYADDLTFSASGENLRYICNLLRRTESIIEHEGFAINAEKTRILRRKSSQLEVTGIVVNEYPNIDRKTMKRFRATLYQIEQEGIQGKQWGQSNNIMLSVQGFANFVKMVNPQKGQVFLEQIDRIREKWRLGESKARSVSPPPISPPIIEQEISQEILLDSIILECYKQGSKLKVRVISEGYNPTWNVQIPRNLMEEGARYRVTEISESAVGGFYRIAGTIEKLSPS

SEQ ID NO: 6169 - protein, 542 aa, Oscillatoria sp.
  source 1..542: note = Related to JACJSM010000006.1
MSDQPRTRQELYDRVRAMGKEQFILEEMIRFGFWPAEGEMPEDPADEIRRKAQIQQELTQLRQQNRSLQDEAAARKRLLQERLAESRRKRQETKERRERERQERAAAWRERQQQDIGYLGEGVSAGLNERDCREERLQARGLPILKNAAQIAEAMGISVGQLRFLAFNRKTSKISHYVCFNIPKKTGGVRRISAPMPKLKAAQHWVFVNILERVEVGEAAHGFLRDRSIVTNAQPHVGAEVIINFDLKDFFPSISYKRVKGLFRAIGYSEAAATIFALLCTEADTVAVELDGTTYYVATGDRHLPQGSPASPALSNVLCRRLDKRLSAMAAECGFTYTRYADDLTFSASGESLRHLCNIMRRTEAIVTHEGFAINPEKTRILRRKSSQMEVTGVVVNEFPNCDRATLKRFRATLFHIERDGIEGKHWGNSNNVLAAIQGFASFVAMVNPEKGREFQAQIQRIKAQIQPQSVTPTGIIVECYKKGSQLKVRVVSPGYNSDWNVQFPRNLREEGARFIVEELQEDVRGGFYRAGGKIERMNSEL

SEQ ID NO: 6170 - protein, 540 aa, Lusitaniella coriacea
  source 1..540: note = Related to NZ_JADEWZ010000014.1
MSDSPRTRQELYDRVRQVGREQFVLEEMIRFGFWPAQGEIPNDPADEIRRKSELRQELNKLRQESRTLQDEQAARRRLLKQRLAESRRKRQEAKERRERERQERAEAWQERQEREIVYLGEGVSAGLNDCEENSERLASRGLPSLPTAEHIAAAMGISIGQLRFLAFNRKTSTHTHYIRFKIPKKTGGERLISSPMPKLKAVQHWILSHILERVEVDDAAHGFRRDRSIVTNAQPHVGADVVINRDLKDFFPTISYKRVKGIFRSFGYAEATATILALLCTEADTTAVELDGKTYYVALGERHLPQGSPASPAISNILCRRLDKRLRAMANELEFTYTRYADDLTFSASGESLRYICNVLRRSESIVTHEGFAIHPEKTRVLRRKSSQLEVTGIVVNEFLNCDRATLKRFRATLFQIERDGFEGKHWGNSTDALASVQGFANFVAMVNPEKGKKFQEQIQRIKTKWLTPEPSTTTGIIVECYKQGSKLKVRVVSPGYNPDWNVQFPRNLREEGARFRVEEIRETAKGGFYRVVGDIEKID

SEQ ID NO: 6171 - protein, 467 aa, Merismopedia glauca
  source 1..467: note = Related to NZ_PVWJ01000029.1
MTEQPRTRQELYDRIRQTGKEEFILQEMIRYGFWPAQGEIPQDPADEIRRLGELNRELQQLHQQNRQLHNEAALRKQLLKERLAESKRKQQETKERRERERKERAEAWKARKEQDILFLGQGVSGGLDRREPNLERLQNQKLPVFTTPESLASAMGVTIGQLRFLAFHRQVAKTCHYIRFYISKKTGGQRLISAPMPRLKQLQHWILRYILNPIAVNDAAHGFRQGHSILTNATPHVGADVVVNFDLKDFFPSISYKRVKGLFQALGYGEAIATILGLLCTYPDVEEVELDGSTYYVATGDRHLPQGSPASPAISNILCRRLDRRLLQMAQELGFTYTRYADDLTFSASGDNLRNICNLLKRTEAIALHEGFALNPSKTRIMRKNSQQEVTGIVVNQFPNISKSTLKRFRATLFQIERDGIAGKKWGNSTDTMAAIQGFAHFVAMVNPEVGTKFVEQVKQIQAQNRN

SEQ ID NO: 6172 - protein, 469 aa, Roseofilum reptotaenium
  source 1..469: note = Related to MLAW01000010.1
MSDQPRTRQELYDRIRKMGREAFILEEMIRYGFWPEQGELPQDPADEIRRRSELYRQLTELRQKNRQLQDEQAIRRQLRKQRLAESRRKREETKQRREEERQARAQAWQERQQQEIVYLGEEVSGGLGEQQSNPSELDRHGLPQLATAADIAQEMGITLGELRFFAFDRKTATVSHYIRFKMPKKTGGERLISVPMPRLKRAQYWILSQILEKIPVHEAAHGFCRDRSIITNASHHVGAEVVINLDLKDFFPSISYRRVKGLFRSLGYSEAVATILALICTAPDVEEVSLDGQTYYIALNQRHLPQGSPASPAISNLICRRLDKRLTQMADELGFTYTRYADDLTFSASGDVLRNICRILRRTESLINYESFTLHPEKTRILRRKSCQLDVTGIVVNEGLNIDRKTLKKFRATLHQIETQGLEGKHWGHSRNVLASIQGFANFVAMVNPEKGAQFQEQVGRIRQKYGRN

SEQ ID NO: 6173 - protein, 471 aa, Desertifilum sp.
  source 1..471: note = Related to JACJRA010000002.1
MSDRPRTRQELYERIRTMGREAFILEEMIRYGFWPAEGTIADDPADEIRRQGELQQELERLRQENRRLYDEKALRREALKQRLAESRRKQQETQERRERQRLERAQAWQQRQQQEIVYLGEGVSGGLSESQSHQERLQSYGLPIYETAADLAAAMGMSIGQLRFLAFNRKTSKVCHYIRFTIPKKTGGERLISAPMPRLKQAQSWIYQQILAKIPLEAAAHGFRCDRSILTNAHPHLEADVIINLDLKDFFPSISYKRVKGLFRSFGYCEAVATLLGLICTEADLTSVELDGVTYYVATTERLLPQGSPASPAISNLICRRLDRRLTQMAQDLGFTYTRYADDLTFSAHEPYLQGICNILRRTEAIVAHEGLTINDQKTRILRKKSSQLDVTGIVVNGDRPSLDRKTLKRFRATLHQIEQNGPTGQHWGHTENVMSAIAGYANYVASVLPEKGAKFQEQVRHIHQKWQRLP

SEQ ID NO: 6174 - protein, 539 aa, Oscillatoria salina
  source 1..539: note = Related to NZ_JAAHBQ010000037.1
MTNQPRSRQELYDLVRQVGKQEFILQEMIRYGFWSPEQETQEDVSEELRQRKQLQQELSQLRQENRLRQDEQALRKHLLKQRLAESRRKRRETKERREKERRERAEAWQEQKKRDLVYLGEGVSAGLNNTEANLARLQSNKLPVLSTAAEIATAMEITVGQLRFLAFSRRTSQISHYIRFKIPKKTGGERLISAPMPRLKQAQHWILTKILEKIEPHAAAHGFRQERSIMTNAQPHVGAEIVINFDLKDFFPSISYKRVKGLFRSFGYSEAAATIFALLCTQPEIEEVELDGKTYYVAQTERHLPQGSPASPAITNLLCRRLDRRLTRMAQELDFVYTRYADDLTFSCGSDNPRICNLLRRVESIVAHEGLTINQEKTRILRKSRQQEVTGIVVNEYPNIDRKTLKRFRATLFQMEKDGIAGKKWGNSDDVLLAIAGFANFVKMVNPEKGAAFQAQIQRIRQKWLGEIPDTTDTSPQGIIVECFKQGSKLRMRVISPGYNPDWKVQFPKALREEGARFLVEEIQESNGFYRTVGEIRKL

SEQ ID NO: 6175 - protein, 473 aa, Phormidium ambiguum
  source 1..473: note = Related to NZ_MRCE01000029.1
MTEQQPRTRQELYDRIRQTSREEVILEEMIRLGFWPAEGEIPADPADEIRRRGEIERELSELYRQNRQLHNETYLKKQVYLQRLEESKRKRQENKERRERERQERAEAWRQRKEQEIVYLGDRVSAGLNDTEYNQERLESYSLPAYNTAQEIADAMGISIGELRFLAFSRKTSLITHYVRFKIPKKKTGDRLISAPMPRLKKAQHWILNNILEKIPLHNAAHGFRPGHSIVTNAQPHIGAEVIINFDLKDFFPSISYKRVKGLFQSLGYSDIAATIFGLICTEPEVVEVELDGKNYYVALSERHLPQGAPTSPAITNIMCRRLDRRLEQMAQKLGFVYTRYADDLTFSTSGEFRRHICNILRRTESIVDHEGFVINEEKTRIMRNTNQQDVTGVVVNSKLNVDKKTLKRFRATLYQIEKDGLEGKHWGHSGNLLASIQGFVNYVAMINPEKGAEFQAQIERIKEKHGRGKKSV

SEQ ID NO: 6176 - protein, 466 aa, Planktothrix sp.
  source 1..466: note = Related to JACJPW010000041.1
MTDQPRTRQELYDRIRETSREEVILEEMIRLGFWPAQGEIPQDPADEIRRRGELQKELNDLYKQNRQLNDENLLKKQLYKQRLAESRRKRQETKERRERERLERAEAWRQKKQQDIVYLGDRVSGGLNYTDCDEQRLQSYGLPIYGTAEQIATAMGITMGQLRFLAFSRKTSPISHYIRFRIPKKTGGDRIISAPMPRLKKAQHWILNNILEKVELHNAAHGFRPGRSIVSNAQPHIGAEVVINFDLKNFFPSISYQRVKGLFISLGYSEAAATIFSLLSTEPDIEEVELDGKTYYVALSDRHLPQGAPTSPAITNILCRRLDRRLTQMAENLGFTYTRYADDLTFSASGDNRRHICNVLRRTESIVEHEGFVINEEKTRILRNSRQQDVTGVIVNDKPNVDKKTLKRFRATLYQIEKDGLEGKRWGNSSDLIASIQGFANFVAMVNPELGAEFKEQVKRIREKYK

SEQ ID NO: 6177 - protein, 470 aa, unidentified
  source 1..470: note = Related to DNGJ01000185.1; note = Cyanobacteria bacterium UBA11371
MSDLPQPRTRQELYDRIRQTSREEVILEEMIRLGFWPAEGTVPEDPADEIRLRGEIWRELSDLYKQNRTLHNEAELKKQVYQQRLAESRRKRQETKERRERERLLRGEAWRQKKQQDIVYLGDRVSGGLNYTECDRQRLQSYNLPEYGTAEQIAAAMGITIGQLRFLAFDRKTSTVSHYVRFKIPKKTGGDRIISAPMPRLKQAQYWILSNILEKVELHDAAHGFRPGRSIVSNAQPHVGAEVVINFDLKDFFPSISYQRIKGVFRSFGYSEAAATIFGLLCTKPDIEEVELDGKTYYVALSERHLPQGAPTSPAITNILCRRLDRRLSGMAENIGFVYTRYADDLTFSASGDNLRHICNILRRTESIVAHEGLAINEEKTRILRKSGQQEVTGVVVNEKPNVDRKILKRFRATLYQIEKDGLEGKHWGNSPDLIASIQGFANFVAMIDPQQGAAFQQQVRRIREKYRST

SEQ ID NO: 6178 - protein, 467 aa, Coleofasciculus sp.
  source 1..467: note = Related to NZ_JACJTV010000005.1
MSDQPRTRQELYDRIRQMGKEEFILEEMIRYGFWPAQGEIPQDPADDIRRMGEIRRELDELRQQSSRLHNEKELRKQLLKQRLAESRRKRQETKERRERERQERAEDWRQRKEREILYLGEDVSGGLNYTECDEERLRSYGLPLCGTPYEIAAAMGITVGQLRFLAFSRKTSTISHYIRFKIPKKTGGERLISAPMPRLKQAQHWILGNILEKLELHDAAHGFRRDRSIVSNAQPHVKRDVIINFDLKDFFPSISYKRVKGLFHSFGYSEAAATIFGLLCTQPDIEEVELDGKTYYVALTERHLPQGSPASPAITNLMCRRLDRRLTSMADELGFVYTRYADDLTFSASGDSLRNICNILKRTQSIVAHEGFTINEQKTRILRKNRQQEVTGVVVNDYPNISKKELKRFRATLFQIEKDGLEGKHWGNSNNVMSSIQGYANFVAMVNPQKGVEFQEQIRRIRDKYRC

SEQ ID NO: 6179 - protein, 470 aa, Coleofasciculus sp.
  source 1..470: note = Related to JACVRI010000092.1
MSDQPRTRQELYDRVRQIGKEQFILEEMIRYGFWPAQGEIPQDPADEIRRRGELQQELNALKSENRQLHNEQALRKQMLKQRLEESRRKRQETKERRERERIARTEAWRQRKQQEIPYLGDGVSGGLNYTDCDEERLQAYGLPVCQTPEQIASAMGISVGQLRFLAFSRDTSTISHYIRFKIPKKTGGERLISAPMPRLKNAQHWILVNILEKLELHDAAHGFRRDRSIVSNAQPHVGADVIINFDLKDFFPSISYKRVKGLLQSFGYSEAAATIFGLLCTQAQVEEVELDGKTYYVATTDRHLPQGSPASPAISNLLCRRLDRRLMGMAEQLGFVYTRYADDLTFSASGESLCNICNVLRRTESIVAHEGFAINEQKTRILRGKSSQLEVTGIVVNERPNISKKELKRFRATLYQIEKDGPEGKHWGNSSDVMASIQGFANFVAMVNPEKGAEFQEQVQRIKEKYGRRR

SEQ ID NO: 6180 - protein, 469 aa, unidentified
  source 1..469: note = Related to DOIX01000137.1; note = Cyanobacteria bacterium UBA11153
MSDQPRTRQELYDRIRQIGREEFILEEMIRYGFWPAQGTIPEDPADEIRRRGELQRELGKLREESRILHNEEALRKRLLQERLAESRRKRQETKERREKERQQRADAWREKKAQEITYLGEGVSGGLNNTDGDEERLQSYGLPICGKTAQIATAMGITVGELRFLAFSRQTSTITHYIRFKIPKKTGGERLISAPMPRLKNAQHWILNNILEKLELHDTAHGFRHNRSIVSNAQPHVGSDVIINFDLKDFFPSISYKRVKGLFHSFGYSEAAATIFGLLCTEPEIAAVELDGKTYYVALTHRHLPQGSPASPAITNLLCRRLDRRLSEMAENLGFVYTRYADDLTFSASGDSLRHICNILRRTESIVTHEGFAINPEKTRILRKNRQQEVTGIVVNEKPTIAKKELKRFRATLYQIEKDGIAGKQWGNSDDVMASIQGYANFVAMVNPEKGAEFQEKVRRIKERYGANS

SEQ ID NO: 6181 - protein, 466 aa, Kamptonema formosum
  source 1..466: note = Related to NZ_KB235904.1
MTDQPRTRQELYDRIREIGREEFILEEMIRYGFWPAQGEIPQDPADEIRREGEIRRELNELQQQSRQLQNEKTLRKQALQQRLAESRRKQQETKERRERERQQKAENWQQRKQQEILYLGDGISGGLNNFNAEIERLQSYGLPICNTAEQIAAAININIGELRFLAFSRKTSTISHYIRFKIPKKTGGDRLISAPMPRLKKVQHWILDNILEKMELHTAAHGFRPHHSIVTNALPHVKAEVIINFDLKDFFPSISYKRVKGLFQSFGYAEAAATIFGLLCTEPEIEQVELDGKTYFVALTERHLPQGSPASPAITNLLCRRLDNRLTTMAEDMGFVYTRYADDLTFSASGDSLRYICNILKRTESIVAHEGFTINQQKTRILRKNRQQEVTGIVVNDRPSISKKELKRFRATLYQIEKDGPEGKHWGNSSDVIASIQGFANFVAMVDPEKGREFQKQVKQIKEKLR

SEQ ID NO: 6182 - protein, 465 aa, Tychonema bourrellyi
  source 1..465: note = Related to NZ_NXIB02000033.1
MTDQPRTRQELYDRIRSTSKEEFILEEMIRFGFWPAQGEIPEDPADEIRRMGEIRRELDELRRENSLLHNEQALRKEMLKQRLIQSRQKQQETKERREKERQERAENWQQRKQQEICYLGDGVSAGLNNTNCNEERLQNYQLPLCNTAAEIAAAMEISVGQLRFLAFDRKTSHISHYIRFKIPKKTGGERLISAPMPRLKAAQHWILVNILEKLELHNCAHGFRSSHSIVTNAQPHVGSEVIINFDLKNFFPSISYKRVKGLFQSFGYSEAAATIFGLLCTEPEIEEVELDSKTYFVAVTERHLPQGSPASPAITNILCRRLDQRLDRMASELGFVYTRYADDLTFSASGDSLQNICNILRHTESIVAHEGFVINEEKTRILRKNRQQEVTGIVVNEHLSISKKVLKRFRATLFQIEKDGPDGKRWGNSEDVIASIQGFANFVAMVNPEKGAEFLEQVQRIKNKR

SEQ ID NO: 6183 - protein, 467 aa, Oscillatoria sp.
  source 1..467: note = Related to NZ_KB235948.1
MTDQPRTRQELYERIWQIGREEVILEEMIRYGFWPAQGEIPQDPADEIRRKGEIRRELDELRRETSRLQNEQALRKQMLKQRLAESRRKRQETKERRERERQERAQAWREKKQKEIIYLGEDVSGGLNRTEGNLERLQSNSLPPCQTAEDIAGAMGISVGELRFLAFDRKTSTTSHYIRFKIPKKTGGERLISAPMPRLKRAQHWILSNILEKLELHDAAHGFRRERSILTNAQPHVAADVIINFDLKDFFPSISYRRVKGLFQSFGYSESAGTIFALLCTEPEIEEVELDGKTYFVAISNRHLPQGSPASPAITNLLCRRLDRRLVQMAQELGFTYTRYADDLTFSGAGESLRHICNILRRTESIVAHEGFAINEQKTRILRKNRQQEVTGIVVNSHPNISRETLKRFRATLYQIERDGLEGKHWGNSDTLLASLQGFANFVAMVNPQKGAEFLEQIQRIKEKYML

SEQ ID NO: 6184 - protein, 471 aa, Cyanosarcina radialis
  source 1..471: note = Related to JAHHHA010000047.1
MTDQPRTRQELYDRIRQVGREEFILEEMIRYGFWPAQGEMPEDPADEIRQRGEIQRELNQLRYQNRNLHNEQALRKQMLKERLAESRRKQQETKERRERERQERAAAWQQRKQQEILFLGEGVSGGLNQTEANRERLQSYGLPAWETVEQMAAAMGVSVGELRFLAFSRPAAKISHYIRFKIPKKTGGERLISAPMPRLKKVQHGILDRILSKIELHDAVHGFRRTRSIVSNARPHVGAEAIVNFDLKDFFPSISYQRVKGLFRSFGYAEATATILALLCTQPEIEEVQLDGQIYCVAIGNRHLPQGSPASPAISNLLCRRLDRRLMGMATGFGFTYTRYADDLTFSASGENLRHICRILRRTESIVAHEGFTINAEKTRIMRKQRQQEVTGVVVNSQPNIAKETLKRFRATLYQMEKDGPEGKHWGNSTDAIASIQGFANFVAMVNPSKGAKLQAQVKRIKEKYGRKSAP

SEQ ID NO: 6185 - protein, 466 aa, Synechocystis sp.
  source 1..466: note = Related to NZ_ALVU02000001.1
MSEQPRTRQELYDRLRQSSKQEFILEEMIRLGFWATAEQIAIDPTDEMRRLGEITRELQQLRQENARLGNEKKLRQELLKQRLAESKRKQQETKERRERERIEKAQKWQEQKQTGISYLGAEVSGGLNNTESNAERLSNYGLPRLENAGQIAAAMGISVGQLRFLAFSRKTSTICHYIRFTIPKKTGGSRSISAPMPKLKESQKWILVNILNKLELHEAAHGFRRDRSIVSNALPHVKQDVIINFDLKDFFPSISYRRVKGLFQSLGYSEAAATIFGLLCTELEVEAVELDGKTYYVANSDRHLPQGSPASPAITNLLCRRLDRRLTLMAENLGFTYTRYADDLTFSATGSNLRHICNVLKRTEDIVNHEDLTINQQKTRIIRKSRQQEVTGVVVNSHPNIARETLKRFRATLYQIEKDGLEGKHWGNTTDVMAAIQGYANFVKMVNPAKGAEFIAQVERIKHKYP

SEQ ID NO: 6186 - protein, 470 aa, Moorena bouillonii
  source 1..470: note = Related to NZ_MKZS01000001.1
MSDQPRTRQELYDRIREIGKEEFVLEEMIRYGFWPAEGEMPEDPADEIRRRGELQRELAQLRQESQKLQNEQAVRKRLLKERLAQSRLKRQETKERREQQRLERAQAWAIRQQKEILYLGEQVSPGLNHTESDRIRLQTYKLPLLSTAQDIAQAMGIALGQLRFLAFNRKTATISHYIRFKIPKKTGGERLISAPKPKLKQAQHWILSNILEKLELDNAAHGFRRDRSIVTNAQPHVGADVIINIDLKNFFPSISYPRVKGLFRSFGYSEAAATVFGLLCTEADIEEVELDSKTYYVATSDRHLPQGSPASPAITNILCRRLDHRLTTVATDLGFIYTRYADDLTFSASGESLRFIGKLLKRTSSVVAHEGFTINQQKTRILRKSQQQEVTGIVVNHHLNISRKQLKRFRATLYQIEKDGPDSKHWGNSSNVIAAIQGYANFIAMVNPEKAAPFQAQIQRIKDKWLSNQH

SEQ ID NO: 6187 - protein, 585 aa, Aphanizomenon sp.
  source 1..585: note = Related to LTEC02000002.1
MNTNHLITIGISLYQENKYSEAIDCFNQIIANNPNSATAYHYRGLVRRRQRDDQGAIADLQKADTLVADKEYTKLCEKIQNLIGRDYPHKYNNDDNQEFDYIEYEDNWYADEDEIAAADPNYIPSSEFLSCAEEVYQLISYELNQFENFLSNRLKTIDLLRKKRAENSRFNQERLESKNLPIYNSHEEIAQAMGISVKGLRFLTFSRKGYHYIRFQIPKKPSGYRQISAPKKLLKKAQNWILDNILEKLELHDAAHGFRLKHSIVTNAQIHVGKEVIINIDLKDFFPSISYKRVKGLFKSFGYSETASTIFALICTEPKIKEVEINGQINSLLSWTDRYLPQGAPSSPAITNILCRRLDRRLNFMAKQYGFDYTRYADDLTFSASGESLVNVNNILKLTNLIVKKEDFEINENKTRVVRNYRKQEVTGIIVNEKLNISRDKLKTFRAVLYKIEKDGLQNYTWGQSQDIIAAIEGFANFVAMVNPEKGGKFIEQIHRIKEKYVRKREKIVLVHQEFLTQSNIIKQINEKLREVRFNKIEKRQYLQETYNKKYLQELTAEELLEFLHYLITLQPEQFSFGDTDDLPF

SEQ ID NO: 6188 - protein, 564 aa, Anabaena sp.
  source 1..564: note = Related to VILD01000004.1
MDNYQLITIGISLYKENKYSEAIDCFNQIIAQDQNSSTAYHYRGLICRKQRDDQGAITDLQKADTLVADQEYTNICQKIQNLIGKDYSHSSNNKNNDEFSDIEYEGTWHLEQEIYDLISSELNKFENFLSSRLETIELLRKKRGENSQFNQEKLESKHLPIYNSHEEIAQAMGISVKGLRFLAFSRKDNHYIRFQIPKKPSGYRQISAPKKLLKKAQNWILDNILEKLELHNAAHGFRLKYSIVTNAQIHVGKEVIINIDLKDFFPSISYKRIKGLFKSFGYSETASTIFALICTEPKIKEVEINGQINSLLSWTDRYLPQGAPSSPAITNILCRRLDRRLNFMAKQYGFDYSRYADDLTFSASGESLVNINNILKLTNLIVKKEDFEINENKTRVVRNYRRQEVTGLIVNEKLNISRDKLKTFRAVLYKIEKDGLQNYTWGQSQDIIAAIEGFANFVAMVNPEKGGKFIEQIHRIKEKYVRKREKVVLVYQEFLTQSNILKQINDKLRAVRFNKIKKRQYLQETYNKKYLQELAAEELLDFLHFLINWQPEQFSFDDTDDPPF

SEQ ID NO: 6189 - protein, 599 aa, Anabaena sphaerica
  source 1..599: note = Related to NZ_JACJQU010000001.1
MDLFNEPRKKSNVLIYNRKYHVINILLINLQSVAFTNNMNTNHLITIGISLYQENKYSEAIDCFNKIISTDSNCCQAYHYRGLVLRKQRDDQGAIADLKKADTLIADQEYTNIFQKLQNLIGKDYSHFSKNNDNDEFSYIEYKGTWHLEQEIYDLISSELNKLENFLSSRLQTIELLRKKRAENSQFNQERLENKNLPTYNSHEEIAQAMGISVKGLRFLSFSRKNDHYIRFQIPKKPSGYRQISAPKKLLKKAQNWILDNILEKLELHDAAHGFRLKHSIVTNAQIHVGKEVIINIDLKDFFPSISYKRVKGLFKSFGYSETASTIFALICTEAKIKEVEINGEINSLLSWTDRYLPQGAPSSPAITNILCRRLDRKLTFMAKQYGFDYTRYADDLTFSASGESLVNVNNILKLTNLIVKKEDFEINENKTRVVRNYRRQEVTGVIVNEKLNIPRDKLKTFRAVLYKIEKDGLQNYTWGQSKDIIAAIEGFANFVSMVNPEKGGKFIEQIHRIKEKYGIKKDKISDYSPVIRTQSYIINQIYYKLSKLSYSKTKRRMYLTKTYNKRSLQELTEEQLVEFLNYLKNLQSSFDDLDEPPF

SEQ ID NO: 6190 - protein, 567 aa, Sphaerospermopsis aphanizomenoides
  source 1..567: note = Related to NZ_LUFH02000071.1
MDFNDILNRGIDLYKSQKYIEALECFNQIISQDPNSYQAYHYRGLIRRKQRDDQGAIADLKTANTLIFDGEYTNIFEKIQDLIGKDYPHHSNNESNDNADFIYIEYGGTWYIEKEIYEWISADLKKLESFLSKRLEKIDLLREKHRQNSQFNQQKLESKNLPIYNYHEEIAQAMGISIKGLRFLAFSRKHYHYNRFQIPKKPSGYRQISAPKKLLKKAQNWILHNILEKIELHVAAHGFCLQRSIVTNAQIHVGKEVIINMDLKDFFPSISYKRVKGLFKSFGYSETASTIFALICTEPKIKEVEINEEPKYILSWTDRYLPQGAPSSPAITNILCRRLDRRLTFMAKEYGFDYTRYADDLTFSAAGESLVHINNILKLTNLIVKKEDFEINENKTRVVRNYHRQEVTGIIINEKLNISKEKLKTFRAVLYKIEKDGLQNYTWGKSQDIIAAIEGFANFVVMVNPEKGAKFIELIKRIKEKYLRKREKSVLVNQEFITQYHIVKQINYELKELRFNKTKKRQHLQENYHKASLQQLTEAELLEFLHYLTNWQPEEFCFSDTDDPVPF

SEQ ID NO: 6191 - protein, 485 aa, Tychonema sp.
  source 1..485: note = Related to JADEWT010000004.1
MSSCDINCIIQDIEGSIEGEFEQLEGRLSRRLKHSQVLQKKRINNAKFDPERLQSNNLPLCNSHEAIALAMEISVKGLRFLAFSRKKHHYIRFQIPKKTGGNRKISAPTHLLKKAQKWILENILENIQLHEAAHGFRLKHSIATNAEHHIGKEVIINIDLKDFFPSISYIRVKGLFKSFGYSETASTIFGLICTEPKMKEIEANGKTAFLLSWTERYLPQGAPTSPAITNVLCRRLDRRLHSMAKQYGFDYTRYADDLTFSTSGESLRNICNIFQNTRFIVEQEDFEINEQKTRVIRRYQQQEVTGIVVNDKLNVSREKLKNFRAVLYQIEKDGLEGHNWGQSEDIIASIEGFANFVSMVHPEKGAKFKEQIDRIKEKYGRKKNPKVPNVSQPLLSRSDIVALIDTKFQELKFSKIYTDIYLNKIYKKQSLKQLTEAELLELLRDLTSSPSEDDDRTQLNFVKRLKALIAQRIRYYTRATKDSDF

SEQ ID NO: 6192 - protein, 623 aa, Oscillatoria nigro-viridis
  source 1..623: note = Related to NC_019729.1
MAEAKIEDSRNNMDINELIVRGISYYMQGKYGEALECFNQAICHDLNCVQAYHYRGLIRRRQTDKQEAIEDLQQAARLLNDKEYTTISNNLQIFIEQNCFKKTENVKSDDSDQNLIFHNENWYECYDDLVDAFPDEFMSYWEIESLRQECESIVEEEFEKLERWLSRQLKDSQVLQKKRINNAKFDRERLQSNNLPLCNSHEAIAQAMGVSVKGLRFLAFSRKKSHYIRFQIPKKTGGNRKISAPTHLLKKTQKWILENILEKIQLHDAAHGFRLKHSIVTNAEHHVGKEVIINIDLKDFFPSISYIRVKGLFKSFGYSETASTIFGLICTEPKIKEIEVNGKIEFLLSWTERYLPQGAPTSPAITNVLCSRLDRRLHSMAKQYSFDYTRYADDLTFSASGESLDNICKIFQNTRLIVEQEDFEINEQKTRVIRRYQQQDVTGIVVNDKLNVSREKLKNFRAVLYQIEKDGLEDRNWGQSEDIIASIEGFANFVSMVNPEKGAKFKEQIERIKEKYGRKKEAKINNISQPIMNQSDIVALIYTKLKELRCSKKVKQIYLNKIYNKQSLQQLTDEELLEVLRDLTTWSSGESGRRQINFVKKYRALSCEYIRHDTPDREDVNEF

SEQ ID NO: 6193 - protein, 610 aa, Microcoleus sp.
  source 1..610: note = Related to JAEQCY010000049.1
MDINELIFQGVSYFKQRNYDEALECFNQAISCDLNCVQAYHYRCLIHRRQQNKQEALENLQQATKLLNDKEYTTISNNLQILIEQDCFKTSENVQSDNSDHNLIFYNENWYECYDDLVDAFPNEFMSYWEIESLRQECESIVEDQFLRRECWLSRQLKQSQILQEKRINNAKFDSERLQSQNLPLCNSQESIAQAMGVSVKGLRFLAFSRKKYHYIRFQIPKKTGGNRKISAPTHLLKKTQKWILENILEKIQLHDAAHGFRLKHSIVTNAEPHVGKDVIINIDLKDFFPSISYRRVKGLFKSFGYSETASTIFGLICTEPKIQEIELNGKTELLLSWTKRYLPQGAPTSPAITNILCHKLDRRLYSMAKQYGFGYTRYADDLTFSASGESLGHIFNIFQNTRCIVEQEDFDINEQKTRVIRRYQQQEVTGIVVNEKLNVSREKLKNFRAVLYQIEKDGLEGHNWGHSGDIIASIEGFANFVSMVNPEKGAKFKEQIDRIKEKYGRKNQAKVPNVSQPILNQSDIVAQIHTQLKEFRFSKRIKQIYLNKIYNKQSLQQLTDEELLELLRDLTTWSSVGHGRKMVNFQLKYIGLSCEIRSDTPNEEDVNQF

SEQ ID NO: 6194 - protein, 576 aa, Microcoleus sp.
  source 1..576: note = Related to JAAUPI010000036.1
MDINELIVKGVSYYTQRNYDEAIECFNQAISRDINCVQAYHYRCLIHRRQQNKQEALENLQQAARLLNDKEYTTISNNLQIFIGQYCFKKTENIKSDNSEQNMSSWERDLVRDAENCAEAYIEEKFYELERWLSKRLEHSQILQKKRINNAKFEPERLQSNNLPLCNSHEDIAQAMGVSVKGLRFLAFSRKKSHYIRFQIPKKTGGNRKISAPTHLLKKSQKWILENILENIQLHEAAHGFRLKHSIVTNAEHHVGKEVIINIDLKDFFPSISYRRVKGLFKSFGYSETASTIFGLICTEPKIKEVEVNGKIEFLLSWTERYLPQGAPTSPAITNILCSRLDRRLHSMAKQYGFDYTRYADDLTFSASGESLDNICNIFQNTRFIVEQEDFEINEQKTRVIRKFRQQEVTGIVVNEKLNISREKLKNFRAVLYQIEKDGLEGHNWGQSEDIIASIEGFANFVSMVNPEKGAKFKEQIDRIKEKYGCKKKAAVPNVSQPLLGRSDIVAQINTKLKEVGCSSGYTQIYLTKIYKKRSLKQLTETELLEVLRDLTSSQAGDSGRTETNFVKRWRALIYS

SEQ ID NO: 6195 - protein, 579 aa, Okeania sp.
  source 1..579: note = Related to BLZO01000072.1
MDLDEILKNGIEYYWEKSYEQAIECFNQIISFNPNYAKAYHYRALVRRRQRDDKGAREDLVQAASLLGDREYTAMSQKMLKLIGCDYRHKSPPREDDFDFIFYDENWYSDYDELSEMFPEEFPPSWEYEVDILDGIAYAGEELDRLETWLFKKLERACYIQKKRAINAKFDEKRLRENNLPLCNSHEEIAAAIGISIAGLRWLAYSQKKYHYTHFKIPKKTGGERNISTPIPLLKKAQNWILNNILIKIQPHDAAHGFCTERSIVTNAQLHLGKEVIINIDLKDFFPSISYKRVKGVFQSFGYSKTASIIFGLICTAPKLKEIKLDEKLHQLLSWKERYLPQGSPSSPAISNLVCRRLDSRLTEIAVKYGFNYTRYADDLTFSASGDSLRNISHILKDTRLIVRLQDFEINENKTRIMRKSRRQEVTGIVVNSELNISRETLKRFRATLYNLEKDGLENRHWRNSQGGDIIASIEGFANFVSMVNPQKGAKFQQQVTRIKEKYKPKKTQNSLAPQLITKSDIIALINDDIRKLHWSNRDRRIYLRQVYGKQSLQQFTEEELLKVQNHFCSFLDALSQKI

SEQ ID NO: 6196 - protein, 644 aa, Planktothrix sp.
  source 1..644: note = Related to DMPE01000239.1
MDNLDLQQILNRGIDNYQEKNYEQALEDFNQVISINPLFAKAYHYRGWIYRILEKKEEAIQNFQQAASLFKDREYRVLCEQLAELLESLFPSKLKKQQSSEINDDIYSEYRNLFWIDEDGNWYDDPPDYECDFYDIGDWEDYINQKLITIKNRLFKRLEKIEYLQIKREKNAQFDQRKLEDNGLPICNSHQDIAKLMKIRVKRLRFLAFSRNKSHYTCFKIPKKIGGDRHISAPMPFLKKAQLWILHNILEKIKIHDAAHGFILNHSIVTNAQPHIGKDIIINFDLKDFFPSISYPRVKGLFKSLGYSETASIIWGLLCTEPTLKQIELDGEIHSLRSWTERHLPQGAPSSPAITNLLCRRLDQRLTQMAQKYGFVYTRYADDLTFSASGNSLTNLSNIFNETGFIVKTEGFNLNQDKTRIMRKSQQQEVTGMIVNNKVNIPRETLKRFRATLYQIEKEGLIGKHWGNSKNQELMVSLEGFANFVFMVNPEKGSQFRDQVKRIKHKYYCQSKTRRSIISQEILNQSNIIGLIYAELNRLYCKNGKRRCYLMQTYGKPCLQELTEENLLEFLTDLKSHVENSPFLDSNFIRVLDFVNRLSLTPNHLRQYLIKTYGKQSLLQIKTEELKNFYSLFKKTPSNRFLWF

SEQ ID NO: 6197 - protein, 598 aa, Roseofilum sp.
  source 1..598: note = Related to JAGHZN010000053.1
MNINDLLKTGIECYKAKDYETALLAFNSAISVNPNLASAYHYCGSIYLALNQKENAIKNFRKAEAILKDKEYSKLCNKLEEILVELFPSKTLDCPENHNNDALDFREYQNLFWIDEDGNWYDDPPDHDLYVGYDSDANDYYCDLLSKLTSIKDYLFSRLKKIQTLELKRSQNSEFDRKKLLSQNLPLCSSHLDIARLMGFSVGYLRCLAFSRNKYHYQSFEIPKKIGGKRKISAPNQMLKKAQKWIQNNILDKIKVHDAAHGFKIEHSILTNARPHVNQDIIISFDLKDFFPTISYRRVKKLFKSLGYSETASIVFGLLCTEPIIKNIELDGQAYELVCWTKRCLPQGAPSSPGITNLLCCNLDQRLSQMANKYGFIYTRYADDLSFSASGESLDYITNIFKGVRSIVRSEGFTLHESKTRVMRKHQQQKITGIVVNQKLNISRKTLKRFRALLYQIEQEGFFGKHWGHYRNYDLLRFIEGFSNFVYMVNPDKGVLFVEQVKRIKEKHPVNINKISQSSIITLIYSEFQRIDCSPSTRRKYLKETYGKQSLQDLTEENLLELLDHLKSTEAVYSLTNKEINYFVNINDPTSISKEDLF

SEQ ID NO: 6198 - protein, 743 aa, Planktothricoides sp.
  source 1..743: note = Related to JACJTF010000019.1
MFSQSKKLDKLINQGIDYYKQSQYEAALECFNQAIALNPNCARAYHYRGWLHLANNNPGELLNDLQTVCRLLNDKYYERLVNKIEKIIPQLFYREDSLSWIYCEEDDSWYESYSDIPGGDIYIGIIGDIEAELMEQRSQEFYWLRNWLFARIEEINNLQLKRNKNAKFNQEKLIRYQLPLCNSHSEIAAAIGLSVNGLRYLAFSRNKLHYTRFNIPKKTGGKREISAPLPLLKKAQNWILHNILEKLEIHPAAHGFCRQKSIVTNALPHVGKDVIINIDLKDFFPSISYPQVKGLFKSLGYSETAAVVFGLICTEPRVQKLEIDGESCLVNLKERRLTQGAPSSPAISNLLCKKLDHRLSNMAKKMGFMYTRYADDLTFSGSIDSRENIGRLFKVTNLIVQEEGLAINPDKTKVRWKNRQQDVTGLVVNHKINISRKTLKKFRATLYHIEQDGFRGKHWGQTNTNDLMASIEGFANFVCMVNPEKGAKFKQQVQRIKDTYKKTDQKAHQANHESPKTSAQIYDVVFLIFSALFWLGWTYKKKLEYLRQTYGNTAIKQLRPNQQWEFLNYLLEAIVSQEIKTHLSLADLQSKEIHNFKQVLCCLDYYKGRKCKSYAIPSFIINNTPIWEDKMADYLDFLCRIYREYLRLGWTDNQRENSAAKTYLQEIYHVLSPLALTLKQLQDFLEYLKLQPTPEVCSNSQPDSYEYDFSDSYEYDFSDSYEYDFSDSYEYDFSDSCEYEPPY

SEQ ID NO: 6199 - protein, 515 aa, Phormidium ambiguum
  source 1..515: note = Related to NZ_MRCE01000004.1
MGVYDDYDDNDYTDDANEEYYQEYLEWATYFSQGLVDSSDQGWFSSDPSYESNGYQNIDRIVDKLYESGEDFEFDDWDKEDEYPLDFNAKREEDEKFKLAEALKIREEKQRFNKERLQENGLPLCCSHSAIAKAMGISVNKLRFLAFSRKRYHYRNFQIPKKTGAKRDISAPMPYLQQAQYWIQHNILKKLELHNAAHGFCRERSIITNAQPHVGSEVIINIDFKDFFPTISYKRVKGLFKSFGYSEEASIIFALICTEPMLKEVELNEKTNLFLSWTDRRLPQGSPTSPTISNLLCRRLDRRLTQMTEPLGFIYTRYADDLTFSASGESVRNICNVFNRMRSIIKYEGFEINEDKTRVIRKSRQQEVTGVVVNSKLNVSKETLKRFRATLYRIEKDGFQGRYWGQSNDLIASLQGFANFVYMINPEKGAKFQEQIRHIKQKYKQGPNQSVPESKLLNLSDIIALTNIELRRLNWSIQERRRYLKKTYGKQSRQQLKDEELLEFLNYLKSLPKPK

SEQ ID NO: 6200 - protein, 435 aa, Nostoc sp.
  source 1..435: note = Related to NZ_CP091913.1
MSVNQGESSDDSYEIDEDIEQQLNRWWREANDLENDYWYRQKQLQGKNTRNKQGKEKLLEKYYLPQCNSFREISKLINIDLADLRLLVFSPKQDAATKHHYILFYIPKKTGGERIISAPSQNLKNVQYWILKNILKKLEPSLHDAAHGFRNSEIIKEKHTINIKFFITQILKAKYISIFYKFRLILKLIIYAIALPELIQYPKFGKRRSIVTNAEPHVGADVIINVDIKDFFHSISYKRVKGLFRSFGYSESASTIFALLCTVTFVNHRSYLPQGAPTSPMITNLICRRLDRRLTHMAESFGFRYTRYADDLTFSSSDESVCNIGKVLRHTEGIVKHEGFEINRDKTQIMRKSNRLEVTGIVVNSKPSISREKLKRFRATLYQIEKDGLEGKFWGNSTDVMSSIQGFANFVYMVDPQKGAKFRDQIRIIKEKYKC

SEQ ID NO: 6201 - protein, 435 aa, Nostoc sp.
  source 1..435: note = Related to AP018318.1
MPVYQSESSDDSYEIDEDVEAQLSRGWRETNNLENNYWYEQRQLQGKTKRNKQGNKELLEKYCLPQCNSFRAISNLININLEELRLLVFSPKQDAATKHHYIRFYLPKKTGGERIISAPNQHLKNVQYWILENILKKLDPSIHDAAHGFRNSRIIEIENNKLDINLLPIKTLNTRYSILYKFWIIVKQIIYVDASHRLTQYPRFGKRRSILTNAEPHVGADIIINVDLKDFFHSISYKRVKGLFISFGYSESASTIFALLCTVTFVNHRSYLPQGAPTSPMITNLICRRLDRRLTEMAERLGFRYTRYADDLTFSASNENGCNIGKVLRHTQGIVKHEGFEINQDKTRIMRKSNRLEVTGIVVNTKPSISREKLKRFRATLYQIEKDGLGGKFWGESEDIMSSIQGFANFVYMVDPQKGAKFREQIRIIKEKYRY

SEQ ID NO: 6202 - protein, 321 aa, Scytonema sp.
  source 1..321: note = Related to NZ_AP018194.1
MSAPTRRLKDAQYWILNNILKKLDSSLHDAAHGFRSSRVIKTETNGKNDFLRSLQHLEPRHFGNLFNFWRRIKSTIYLLTLSLSSSKIKFGKRRSIVTNAEPHVGADVLINIDIKDFFPSISYRRVKGLFKSFGYSESASTIFGLLCTVTFVNHRSYLPQGAPTSPMITNLICRRLDRRLTQMGERFGFRYTRYADDLTFSASNESLCNICNILRQTESIVRHEGFEINKDKTRILRKCNRLEVTGIVVNSKLSISRQKLKRFRATLYQIEKDGLEGKHWGKSEDLIASIQGFANFVYMVDPEKGAKFREQIRIIKEKHGC

SEQ ID NO: 6203 - protein, 515 aa, unidentified
  source 1..515: note = Related to JAEUQL010000156.1; note = Blastocatellia bacterium
MSEKRRTREEIFQRMRETSRDEVILEEMIRHGFWPREGRLAEDPADEIRRKGEIERELQQLRAQNRSLQNEAALLREMRKRRFAESRKKRQETKERREKQRQERAEAWQQKKAEEITFLGTGVSVGLSNKKSNEELLKKYNLPVYRSPEEIAAAMAVTISTLRFLAFSRKTSTVSHYIRFKIPKKTGGQRLISAPMPRLKEAQTWILATILEKIPVHQAAHGFRAGHSIVTNAEPHLGKEVILNVDLKDFFPSVSYRRVKGLFSSFGYSEAVATLFALLCTEPDIEKVELDGKTYYVTQTRRHLPQGAPTSPAITNLLCRNLDYKLYCFAEKLGFTYTRYADDLTFSASNEAVKKVGYILKKLEEIVKKEGFEVNQEKTRILRYSRQQEVTGVIVNEKLNVSRKVLRNFRATLYQIEKDGLEGKRWGQAQDLVAALQGFANYVYMVNPEQGSLLRTRVQAIIEKTKWKAAARPVKPSKMEEVATLQTESAVEEVEIEQKKQDKDYDSSKKWWKLW

SEQ ID NO: 6204 - protein, 482 aa, Trichodesmium erythraeum
  source 1..482: note = Related to JAGGDU010000219.1
MTDQPSSRKELYARIREIGREEFLLEEMTRYGFWPEGEEMPLDPVDEIQRRGELEQQLKKLRQENAHLFNLKKLGQEAYKQRLVESRRKQQETKELRERERQERAKAWQEKKENDIIYLGEEISGGLNNVEGNIFRLEIYNLPILNTAQDIANAMDITVGELRFLAFSRPTSTVSHYIRFKIPKKTGGERQISAPMPRLKNVQTWILDNILCNVPLHEAVHGFRAGHSILTNAEPHVAKDVIINFDLKNFFPSICYKRVKGLFFSLGYSEAAATIFALLCTEPNVVVVELDGQVYYVAQSDRHLPQGSPASPAITNIMCRRLDKRLSEMAAKLDFVYTRYADDLTFSSSGDSLRHICNVFRRTESIVSHEGFTVNREKTRLLRGKSSQLEVTGVVVNEFPNISRKELKRFRATLYQIEKDGPQGKRWGHSDNVIAAIEGFANFVAMVNPEKGRELVRRVKQIKEKYTGRRRRSTKILEHDGT

SEQ ID NO: 6205 - protein, 466 aa, unidentified
  source 1..466: note = Related to JACMLN010000050.1; note = Anaerolineae bacterium
MTEQPRTRQELYDRIRQTSKDEFILEEMIRLGFWPRQGTLPEDPAEEIRRQGELQRELEALRSESRKLNNEEHLRKAARKLRLQESRQKQQQNKERREQERIARAQVWEQRKQHEILYLGEGVSGGLSATECDHERLASYGLPALGSAEQIASAMGISVGQLRFLAFSRRTSKVSHYIRFTIPKKSGGERLISAPLPRLKHIQHWLLANLLTNIPLHEAAHGFRTGHSIVTNARPHVGADVVVNLDLKNFFPTITYKRVKGLFRALGYSEAAATIFGLLCTEPEVAALSLDQTTYYVSQGTRHLPQGAPTSPAITNLLCRRFDRRLTAMATALGSQYTRYADDLTFSASGENLRHICTLLRRIESIVTHEGFVINEAKTRILRGGSQQEVTGIVVNNKLSVCRKTLRRFRALLFQIERDGPSGKHWEGAPNLFAAMQGFANFVYMVDPERGLPLRQKVRHLRSLHG

SEQ ID NO: 6206 - protein, 478 aa, Pseudanabaena sp.
  source 1..478: note = Related to NZ_ALWB01000094.1
MTNQPRTRQELYDRIRRSSRDEVILEEMIRLGFWPAAGEMPKDPADEIRRKGEIMRELEDLRAQNRQLHNEEALKKEALAQRLAESKRKQQETKERRERERQERLEIWELKKQQEIVFLGEGVSAGLNKTECDRDRLQSYGLPEYGTSGEIAAAMGISLGELRFLAFSRRASNVSHYIRFKIAKKTGGERLISAPMPRLKQAQTWILYHILEKVNLHEAAHGFCRGRSIVTNAAPHVGADVVINLDLQDFFPSISYKRVKGLFISLGYSEAAATIFGLICTDAAVEAVELDGKTYYVSLGDRHLPQGAPSSPAITNLICRRLDLRLTKMAASLGFVYTRYADDLTFSGSGENLRQICNVLKRTEAIATHEGFTIHPQKTRVLHRSQHQEVTGIVVNEKLNVDRETLKRFRATLFHIEKDGLAGKHWGNYPDLIQSIEGFANFVAMVNPEKGGKLKEQVQRIKAKYRPKRVKRIRRKSN

SEQ ID NO: 6207 - protein, 472 aa, Leptolyngbya sp.
  source 1..472: note = Related to MQTZ01000030.1
MSEPSPPRTREELWDRIRQTSREEIILEEMIRLGFWPAQGELPQDPADEIRRRGEIHRELRELKREDRRLQDEKILRKQMLEKRLAESRRKQQETKERRERERQERSAAWEQRRQQEILYLGEGVSGGLNQTEGLSDRLQQHRLPLCLTAEQLATAMGLTIAALRFLAFARRTSPTSHYVRFQIPKKTGGLRLISAPMPRLKQVQYWILDNILDRLTPHDAAHGFCRGRSIVTNALPHLGADVVINLDLQDFFPTISYRRVKGLFRSFGYSEAVATILALLCTEPEVETVDLDGQTYYVALTDRRLPQGAPTSPTIANLICRRLDRRLTEMATTLGFTYTRYADDLTFSGSGDALRQICNLLQRSVAILTHEGFTVHDQKTRVLRNSRQQEVTGIVVNHKLNVDRETLKRFRAILYQIEKDGPAGKQWGHSRDLMASIHGFANYVAMVNPEKGQKLLAQVKRIKQKYKRKRR

SEQ ID NO: 6208 - protein, 476 aa, Pseudanabaena sp.
  source 1..476: note = Related to NZ_KB235911.1
MTEPAQPRTRQELWDRIRQTSRDEVILEEMIRLGFWPAQGQIPQDPADEIRRRGEIDRELKELRKEDRQLQDEKVLKKRLLEQRLAESRRKQQENKERRERERQAKSEAWQARKTQEILFLGDGVSQGLHHQQGDEQRLRSLDLPICHTPAELAAAMEISIGELRFLAFDRHVSFVSHYVRFQIPKKTGGTRLISAPMPRLKRSQYWILKHILTRISPHDAAHGFRQEFSIVTNAQPHVGADVIINFDLQDFFPSISYKRVKGLFRSLGYSEAVATILGLLCTEPEVEAIEMDGKTYYVALTERHLPQGAPTSPAISNLLCRRLDRRLSEMAENAGFIYTRYADDLTFSSAGDAQRQICNVLKRTESIVTHEGFTINPQKTRVLRSSQQQEVTGIVVNDKLNVDKATLKRFRATLYQIEKDGLEGKQWGNSQNLLSAIHGFANFVAMVNPERGKIFLEQVQRIKQKYGKKKRRDRP

SEQ ID NO: 6209 - protein, 470 aa, Calothrix sp.
  source 1..470: note = Related to JAAUPE010000002.1
MTEQPRTRQELYDLIRQTSKQEFILSEMIRLGFWDENSNNPEDPAEEIRRQGELQRQLQELQQQNRQLHNEKALKKQLLKQRLEESKRKRQETKERNERKRQERSQAWQEKQAHEITYLGEDVSSGLNNLENNCDRLQKNNLPVFQTIEELAAAMGMTVGQLRFLAFDRKTSTVSHYIRFKIAKKTGGERLISAPMPRMKSTQDWILDRILEKIPMHSAAHGFRRGRSIVTNATPHVGTDVVVNLDLQDFFPSISYKRVKGLFQALGYSEAIATVLALVCTEATTEEVELDGKSYFIATSDRHLPQGAPTSPAITNLLCRRLDKRLANMAVSQGFIYTRYADDLTFSTSGDAIRNLCNILKHTENIVSHEGFTIHPNKTRVLRKSQQQEVTGIVVNEKLNVDRATLKKFRATLHHIEKDGLAGKHWGSGNDLMAEIEGFANYVMMVNPEKGEPLVKQVKLIKKKYGLRKR

SEQ ID NO: 6210 - protein, 471 aa, Chamaesiphon minutus
  source 1..471: note = Related to NC_019697.1
MTEQPRTRQDLYDRIRQSSKEEFILDEMIRLGFWSANGEIPNDPADEIRRRGEIQRELETLRAENRRLHNEEALKKEALKLRMAESRRKQQETRERRERERQERAIAWQTRQEREITYLGAGVSAGLNLTESNLARLQQHRLPILHAAADLANAMGITVGQLRFLAFSRRIATVSHYVRFQIPKKTGGFRAISAPLPRLKQAQQWILDNILEGVVLHPTAHGFRRGRSIVTNAEPHVGALVVINMDLQDFFPSISYARVKGIFRSLGYSEAIATILGLICTESDVTEIELDGRSYYIAQELRHLPQGAPTSPALTNLLCRRLDRRLDRMAKSRGFIYTRYADDLTFSTTDRERLRDIGNILKGTHGIVTHEGLTIHPDKTRVLRQSQQQEVTGIVVNQKLNVDRTTLRRFRATLYQIEKDGLAGKQWGQGADLLQSIAGFANYVAMVDPHKGREFLASVQRIQKKYGRRKR

SEQ ID NO: 6211 - protein, 495 aa, unidentified
  source 1..495: note = Related to JAAUOP010000014.1; note = Synechococcales cyanobacterium CRU_2_2
MTSQPETRQALYDRIRQSSKDEVILNEMIRLGFWPTAGTLPEDPAEEIRRQAEIQQELADLRTESRKLNDEKALKKKLLKQRMEASKQKQQETKIRRDRERQERAAAWKSRQAQDTRLPWEGVSAGLSQTGCDRDRLQQYHLPELGTAADIAQAMGLPLGQLRFLSFSRRISHISHYVRFRIAKKTGGDRLISAPMPRLKAAQYWIVANILEPLKVHDAAHGFCRNRSIVTNATPHVGADVVVNLDLKDFFPSISYARIKGLFRALGYSEAAATIFALLCTEADVEEVELDGRTYYVAQSARRLPQGAPTSPGLTNILCRRLDRRLTGLAQELGYTYTRYADDLTFSASGAAAGQVGRLLRQVKDIVTHEGFEVHPKKTRVLRQSRQQEVTGVVVNEKLNVDRKTLKRFRATLHHIEKDGFKGKTWGHQSDVQTNVQANVQANVQESDIQGSNLLSAVQGFANYVYMVNPEKGGPFLDQVKRIKQKYKLDRKPKR

SEQ ID NO: 6212 - protein, 475 aa, unidentified
  source 1..475: note = Related to JADEXQ010000025.1; note = filamentous cyanobacterium LEGE 11480
MNQQPQTRQALYDRIRQSSKDEVILTEMIRLGFWPSSGELPNDPAEEIQRQGEIQRELSELRAENRKLNDEKALKKRLLKERLVASLQKRQETKARREQERQERAAAWKARQAQDITYLGEGVSSGLNHVECDVERLQRHNLPELGTAAAIAAAMGISVGELRWLAFSRRTSQVSHYIRFRIPKKTGGERLISAPAPRLKKAQYWIEANILQLIEIHDAAHGFCRQRSIVTNAQPHVGADIVTNLDLQDFFPSVSYRRVKGMFRALGYSEAAATIFALICTEPEVEMVELDGRTYYVAQSDRRLPQGAPTSPSITNILCHRLDRRLTGLAQEFDYAYTRYADDLTFSASGAATEQVGRLLRQVTQIVSHEGFQVHPQKTRVLRKSRQQEVTGIVVNDKLNVDRKTLKRFRATLYQIEQDGLAGKVWGHSADLMGAIEGFANYVYMVNPDKGSHFLAQIKRIKQKHRPKRHQPRKS

SEQ ID NO: 6213 - protein, 476 aa, Acaryochloris marina
  source 1..476: note = Related to NC_009925.1
MSNQPRTRQELYDRVRQSSRDEVILEEMVRLGFWPAEGEMPQDPTDEIRRKGEIQRELAALRAENRKLHNEAAIKKQLYKERLAASKKKRQETKERREQERQSRAAAWRDRKARDIVYLGTGVSGGLNQTECDRTRLQQYGLPAYGTAEEIAKAMQISVGQLRFLAFSRRTAQISHYVRFKIPKKTGGERLISAPMPRLKQAQYWIAEKLLAAIPLHEAAHGFCSGRSIVTNATPHLGADVVINLDLQDFFPSISYPRIKGLFRSFGYSEAAATIFALLCTEPDVVEVGLDGQHYYVAQSQRHLPQGAPTSPILTNLLCRRLDRRLTAMAAELGYRYTRYADDLTFSATGQPQQQVGKLLRRTHAIVTHEGFTIHPQKTRVLRSGRQQEVTGVVVNEKLNVDRKTLKRFRALLHQIEQSGYDDQHWGGQPVSFAQIQGYANFVEMVNPERGAQFQAQVKRIKRKYPPRVQAFKPAS

SEQ ID NO: 6214 - protein, 514 aa, unidentified
  source 1..514: note = Related to JADJPF010000004.1; note = Blastocatellia bacterium
MSNQRPRTRQELYERIRQTSREEFILEEMIRFGFWPAQGEIPQDPADEIRRRGELQRQLGELNSQERNLRNEEKMLKELRKRRMEESKRKRQETKERRERQRQERAKAWQEKKKQDITYLGEGVSAGLNNKEVNSSRLNQHNLLSYSNASEIASAMNISINALRFLAFTRKTSTTSHYVRFKIPKKTGGERIISAPMPRLKAAQNWILHNILEKVTLHDAAHGFCQKHSIVTNAKHHIGAEVIVNIDLKDFFPSISYKRIKGLFLSLGYSEAAATIFGLICTEPIVEQVILDGKTYYVATSERHLPQGAPTSPALTNILCRRLDKRLSKMASNLGFTYTRYADDLTFSAKSEASRNVCNILAKTDNIVKHEGLTINSEKTRVLRKGRQQEVTGIVVNKQLSISKKTLKRFRATLFQIEKDGPDNKHWGHSKDVIASIQGFANFVYMVSPEKGRLLKTKVRAIIKKYNWKAAQRKRLPLPLTTVPPTVQEIQKVPETVIEKPQEQKTNKKWWKLF

SEQ ID NO: 6215 - protein, 518 aa, unidentified
  source 1..518: note = Related to JACQZQ010000027.1; note = Acidobacteria bacterium
MSERPRTRQELYERIRKTSKEEFILEEMIRFGFWPAEGQIPQDPADEIRRRGEISRQLNELHTQNRHLGNEEKMLKELRKKRMEESKRKRQETKERHERERKERAEAWKEKKKQDIIYLGQGVSSGLNNKESNEERLKSYNLPKYSNASEIATAMSISIGALRFLAFSRKTSTKTHYVRFKIPKKTGGERTISAPMPRLKSAQNWILHNILEKVKLHDAAHGFCTQHSIVSNAKPHIGAEVLVNIDLKDFFPSISYKRIKGLFKSLGYSELAATIFALICTEPTVEEVSLDNQTYYVATSARHLPQGAPTSPALTNILCRRLDKRLTEAAKELGFTYTRYADDLTFSTKGEFSRNICNILNKAHDIVKHEGLTVNSEKTRVLRKGRQQEVTGVVVNKKLNISKKTLKKFRATLYQIEKDGPEGKRWGHTPDVIAAIQGFANFVFMVNPEKGRLLKSKVKSIIQKYNWVPEWKRKLSSPSEVQPNVSTLSTLPVTSTENKVETQKTTENKTNKKWWKLF

SEQ ID NO: 6216 - protein, 524 aa, unidentified
  source 1..524: note = Related to JAIBAN010000080.1; note = Blastocatellia bacterium
MDRPRTRQELYEQIRRTSRQEFILDEMIRLGFWPAAGVMPHDPADEIRRETEIRREIAEVHQQNRHLYNEEALKREMRKRRIEESRRKQLENKQRRELARQQRAAAWNEKKQKEIGFLGETVSGGLNQTECNQGRLEKFSLPRFTTPEEIAKGMNLSVPRLRFLAFDRKTSRVSHYVRFQIPKKTGGVRIISAPKPYLKAAQEWVLQTILERVPVHPAAHGFLAGHSIVTNAQPHLKADLILNVDLKDFFPSVHYQRVKGLFKSLGYSEAAATVFGLLCTERDTQEVELDGERYFVGLSERRLPQGAPTSPAITNLLCRKLDARLHKLAMKHGFAYTRYADDLTFSASGPNTRNLCNVLKGLAAIVTHEGFTINPSKTRVLRKGDQQEVTGIIVNEKLNLAREVLKKFRAILFQIEKDGPEGKRWGTSPDVIGSVVGFANYVRMVNPEKGAQFQAQVRRIIEKYGWKRVRMTPAKPAEIAFDPAPTMILTSAPPPPEPEEKPPVAPQAPPSSADGKSKKWWKMF

SEQ ID NO: 6217 - protein, 517 aa, unidentified
  source 1..517: note = Related to JACQXX010000070.1; note = Acidobacteria bacterium
MMDQPRTRQELYERIRRTSREEFILEEMIRLGFWPREGQTPSDPADEIRRRGELSRELTKLRTENARLYNEQALIQEMRKRRLAESRQKQQETKARHERERQERAQKWREKKQHEIVFLGEKVSGGLNYTECDEARLNQNGLSAFSTAEDIAAAMGISLSDLRFLAFDRKTSTVSHYVRFKIPKKTGGERLISAPKPHLKAAQEWILHTILEKVTLHEAAHGFRTGRSIVSNARPHLKAEVIINIDLKDFFPSIAYPRVKGLFRSLGYSEQAATIFGLICTEPDVEEVELDGKTYFVALSTRHLPQGAPTSPALTNILCRRLDRRLTKLAENRGFVYSRYADDLTFSASGNAKQNICNVLRGVESITAHEGLAINTEKTRILRHSRQQEVTGVVVNEKLNVSREELKRFRAVLFQIEKDGPEGKRWGNSKDVIASIQGFANYVAMVNPEKGAEFQAQVKAIIQKYGWQRPASHRRSMASSESQYPGPASAPEPEVTSPATPESESSKSNDKKWWKLF

SEQ ID NO: 6218 - protein, 507 aa, unidentified
  source 1..507: note = Related to JAFDVL010000054.1; note = Acidobacteria bacterium
MTTQPRTREELYQRIRQTSRQEFILSDMIRLGFWPDAGVMPEDPADEIRRRGELQRQLDELRAQNRKLHNEQALLKELRKKRLLESKQKQKETKERRERERLERAEKWQQRKAKEIGYLGKEVSIGLSYAECNAERLSQYGLPHFENAEQIAAAMGITVSELRFLSFSRKTSNVNHYVRFKLPKKTGGERLISAPMPRLKHAQQWILTNLLEKVQLHDAAHGFRAAHSIVSNAKPHLGAEVIINRDLKDFFPSISYKRVKGVFKSLGYSDAAATIFGLLCTEPDVEKVELDGRIYYVATGERHLPQGAPTSPAITNILCRRLDRRMQKIADECGFVYTRYADDLTFSTSGESKQNICNVLRRSESVVAHEGLELHPDKTRVLRKSRQQEVTGIVVNEKLSIDRKELKRFRAVLFQVEKDGPDGKHWGKSPDVIASLKGFANYLQMVDPEKAAEYQKRVHALIEKHGLQPSQFTYRNPAAPVDAAPARPDLPKEETKPKPEKKRWKLW

SEQ ID NO: 6219 - protein, 504 aa, unidentified
  source 1..504: note = Related to JAFAZX010000026.1; note = Acidobacteria bacterium
MSTERPQTREELYERIRDGRKEEFVLEDMIRLGFWPARGEMPHDPADEIRRRAELQRELGELRAQHRNLYNEEALIKELRRRRLEESRRKRQETKERRERERRERAEAWRQRQGQEIVYLGEAVSGGLNHTECDAARLQSYGLPPLGTAAEIAGALGVSVGELRFLAFDRKTSTVSHYVNFQVPKKTGGLRQISAPMPRLKAAQHWVLRNVLEKVEAHECAHGFRAGRSIVSNARPHVGAEAVVNLDLQDFFPSIGYRRVKGLFRAFGYSEAAATIFGLLCTQPGTEEVELDGRRYFVATGERHLPQGAPTSPAVTNILCRRLDRRLLKVADELGFVYTRYADDLSFSASGESLRHLGNLLERVKAVVRHEGFNVHPDKTRVLRRSRQQEVTGVVVNDKPNVSRSELKRFRATLYQVEKDGPAGKRWGRSPDVIASLLGYANFVYMVNPAKGAELQRRTRALADKYGHEPVKVERPSRRRQPEPQAAAPSPEPQPTQKKWWKLW

SEQ ID NO: 6220 - protein, 502 aa, unidentified
  source 1..502: note = Related to JABFSD010000364.1; note = Acidobacteria bacterium
MSALAVKPLTRQELYERMAETSRDEVILEEMIRFGFWPAQGEVPFDPADEIRRRGELHRALDELRAEQRKLGDEAKLRKEARKKRLLESRRKQQETIVRRETERIERATQWQEKKSKEIGYLGAGVSAGLDNKEANVERLQRYNLPRFDDAASLAQAMGLTVGALRFLSFARKTSKTTHYVRFALPKKTGGVRVISAPMPRLKAAQHWVLQNILQPVELHEAAHGFRPQRSIVSNARPHVASSVVINLDLKDFFPTLDYRRIKGVFRALGYAEATATILGLLCTEPEVEKVELDGETYYVATSARHLPQGAPTSPALTNILCRRLDRRLLKVAEEMGFVYTRYADDMTFSTKQEQDSKQIGRLLHRVESIVAHEGFCIHPTKTRIMRSASKQDVTGIIVNDKPSIDKATMKRFRAVLFQVEKDGPIGKQWNHSRDVLASLRGFANFIFMVDPAKGAAYQRRVGALIDKYDWKPQPLPYQKKTKPVEPPAPQPVAQRPWWKLW

SEQ ID NO: 6221 - protein, 501 aa, unidentified
  source 1..501: note = Related to JAFDVJ010000081.1; note = Acidobacteria bacterium
MSEQPRTRQELYEEIRRQGGRDVYVLEEMIRLGFWRESTGLPDDPAEEIRRAAELQAELDRLRADNRKLYDEQAMLNELRKKRLAESREKQKETRARRERERQEKAENWRRRKETEILYLGAEVSGGLNNNETDRERLERGGLPVFSNVEELARAMNLTVGKIRFLAYDRRTSETTHYVNFKLPKKTGGHRLISAPMPALKAAQTWILENILGRVAVSDAAHGFLPAKNIVSNARLHVGAQTLVNLDLENFFPSIGYRRVKGIFRAFGYGEALATVFALLTTAPDTEEIELDGKTYFVATGERHLPQGSPASPALSNIAARRLDKGLAKLAAAHGCKYTRYADDLTFSTEDRDAAIGRLLAQVRFVVEKQGFKVNEKKTRVLRRGRQQEVTGIVVNDKLSIDRKTLRKFRAVLFQAETKGLENLRWGNSPDLVAALKGYANFVFMVDKEKGYAFQQQVRRIAEKYDWQPAPPRFPPKKKVEPEEPAPEKPAKDEKPWWKLW

SEQ ID NO: 6222 - protein, 501 aa, unidentified
  source 1..501: note = Related to JAIBCC010000010.1; note = Pyrinomonadaceae bacterium
MEQPRTRQELYEYVRQHGGRDAFVAEQMIRLGFWKSSDLPNDPVEEIKRIHDLQEELNKVRNENRKLFNEQALLKELRQRRLAESKQKQKETKLRREQERKERAEAWQKRKETEIVYLGEKVSGGLNNFEENAERLTANDLPSFANIEQLAKAMNLTVGKLRFLAFNRQTSETKHYIHFQLPKKTGGFRLISAPMPQLKTAQHWILHNILQKVSVHEAAHGFLPEKNIVSNAQPHVGAKIVVNFDLKDFFPSINFPRVKGVFRSFGYSEAIATIFSLICTAPETEEVEIDGKTYFVAIGERHLPQGAPTSPFLTNILCKRLDKGLQTLAKNYDFTYTRYADDLTFSTKNDGEKLTDFINKIRYVVEKQGLTINESKTRILRKGRQQEVTGIVVNDKISVNRKTLRKFRAVLHQAETKGLEGLRWGNSNDLIASLDGFANFVLMVDAEKGKMYKAQVGRIAEKHGWKSSRSGKFTPQELREVVEKKEEKPNDNQGKDWWKVF

SEQ ID NO: 6223 - protein, 528 aa, Acanthopleuribacter pedis
  source 1..528: note = Related to NZ_JAFREP010000006.1
MNQARQALYDRIRESSKDEVILEEMIALGFWDPAQPGKEAAAELIGKTAELEREMSALRSEMARIDNQEAMLKALRKRNMEQAKARRVETKKRREAERQARAEAWRLKKQQDILYLGEGYSHSLGEQGACDAAALDENGALPAYENAAALAAAMGISIGELRWLAFGRKVSQTTHYQRFQVPKKSGGLRLISAPMPRLKEIQSWILREILEKVPIRSAARGFVRGKSIVDNARPHVGADVVINVDIKDFFPTVTYPRVKGVFRKLGYRGQVATILAMLTTEPEMVALEMDGQRYWMAKGERRLPQGAPSSPALTNIICRGLDAELEELALVNEYEYTRYADDITFSTRGREANRRIGGVLRKIEQHVGAHGFTLHPDKTKVLRNNARQEVTGIVVNEKLSVDRKTLRRFRAVMFQVEQDGPEGKHWGQAEHVIAGLTGYAHFLKMVDPARAQPFLEQLARIVEKHGNPVYPERRAARAPSWRRYQPDSDQAEATDAAPAANEAPAHPSGSEGEAATPVLEKKPWWKFW

SEQ ID NO: 6224 - protein, 532 aa, unidentified
  source 1..532: note = Related to NZ_CP071793.1; note = Proposed Sulfidibacter corallicola
MNNARQELYDRIRESSKKEVILEEMVSLGFWNEADPAFQKAQGAIERTGELEREMRALHTELSRLENKEAMIRAIRKRNMAQAKERRAETKARRLAARKARAEKWRREKQRDILYLGDGHSQTLQDRESDAARLGRTGDLPVLHDAAQLASAMEISVGELRWLAFGRKVSKVAHYQRFYVPKKTGGLRLIAAPMPRLKEMQRWVLREILEKVPLHEAATGFRNGISIVDNARRHVGSDVVINMDLKDFFPTLSYRRVKGVYRKLGYSGQVATILAMLTTEPEMDRVEMDGTLYWVARGERRLPQGAPSSPALTNIACRRLDRRLAALAEEWGYRYSRYADDLTFSANGEAASRAGKILRGARFIVEQEGFVVHPDKTRVLRRGRRQEVTGIVVNDKLSVDRKTLRRFRATLHQVERHGPQGRTWGHSPDVIAALTGYATFVKMVDSERAEPFLAQLERIREKWGYEPPAWDPGPIREPSWQRYQPEPEPAESDIATEATAEAGGAAGSEAEARAPGEAESAENHKKPWWKFW

SEQ ID NO: 6225 - protein, 524 aa, unidentified
  source 1..524: note = Related to JAGNHB010000094.1; note = Acidobacteria bacterium
MSRPAAPSQPTRENLYQRIRETSKAEVVLEEMIRLGFWPAGEGIPKGPEAEDRRTGELENELAALRTEMSRLQNEAAMRRALYQKRLEEARQKRQETRRRQEEARRARAAAWKQAKEREIGYLGEGISAGLNHQLSDATRLAQHGLPLLSTALDVASAMDISVGELRFLTFVRRVSKHTHYRRFFIPKKTGGQRLISTPMPRLKQAQYWVLGNILERIPIHSCAHGFVAKHSIVTNASMHTGTDVVVNCDLENFFPTISYRRVRGLFRALGYSEQVATILALLCTEPEVDRVECDGETYHLCTSERHLPQGAPSSPMLTNILCRRLDRRLSNLAETLGFSYSRYADDLTFSGSGEARGKVGKLLRKTEGIVSHEGFRINRDKTRVQRRGRRQEVTGIVVNERPAVNRENLRRMRAVLFRLEKDGLRGQHWGRGGEVISALEGYAHFVAQVDPAKGGRFLEQLVAIKAKLGWQRPKHLRRPKRTPSWKRSATAPAATPADVMPAVAQPAKPEPATPPKKPWWKFW

SEQ ID NO: 6226 - protein, 420 aa, unidentified
  source 1..420: note = Related to NZ_CP071793.1; note = Proposed Sulfidibacter corallicola
MPTVDSQDQVVDRDLCLDPLRTELEQRLGDEARRRLRRERNLAARRRSRTPRPTPPRVPTQTLTYLGDRLSGGLQDRRSRLDRLADHPQLPVLHDADDLAAAMGIEISELRFLAFAPTHSRVNHYQRFLLPKKTGGHRQISAPMPRLKAAQHWIYQRILAQVPVHRAAKGFLPGHSIVDNARPHVGADVVINMDLENFFPTITFARVKGLFRTLGYSEQVATILGLLCTEPEVETYEWLGERYHVARGPRFLPQGAPSSPPVTNLLCRRLDRRLDGLARSLGFHYTRYADDLTFSGSGEATDRVGKLLGKARDIIEHEGFRPHPKKTRVLRAGRQQEVTGIVVNRKLSLDRKTLRRFRAVLFQVELDGPAGKRWGNGGDLLASLEGYAHFVHMVDAEKGRAFLDRVEAIKARYGSDSIEL

SEQ ID NO: 6227 - protein, 501 aa, unidentified
  source 1..501: note = Related to JACKEM010000004.1; note = Deltaproteobacteria bacterium
MSDRRQEIYQRIRESSKDEVVLDEMVRLGFWPQQGVLPEDPAEEIKRQAALRDELASLTARLQKLGNQEALRQELKRRRLLESRRRRQETKLRRVHARELRAFEWKQKQRASITYLGEEVSRGLSNTASDEARLRALGLPVFHEASDIARAAQIEVSHLRHLAFHRVVSRRSHYVRFYLPKKTGGTRLISAPKPKLKWIQHWILRHVLEPLKAEDVAHGFVKARSIVSNASAHVGQDIVINVDLKDFFPTLTYRRVWGFFRKLGYSGHVATIFALLTTEPAVDELELDGSRYFVATGERFLPQGAPTSPALTNVICRKMDRRLAGLARTFGLTYTRYADDFTFSGPGETNVGRFFGALTRVVTEEGFSIHPGKTRIFRRGRRQEVTGLVVNSGKPTVPRATLRRFRALLFQIEKDGPEGKVWKPGVDVVRSIQGFARFVAMVDSEKGRALEARVQKIVAERGPASLASTRTVAKAKSHWYPPLKPLGEQPQLNLPHAQQDT

SEQ ID NO: 6228 - protein, 520 aa, unidentified
  source 1..520: note = Related to JAGQSB010000027.1; note = Acidobacteria bacterium
MQLLEKNKKILEEMVRLGFWPESQPLPGLNPEEQTRYETLSNELAAIRTELTRLKNREAMLKAIRAQRLADAKRKRLETKARNEEKRLERARTWKQIQAKQITYLGMGVSAGLSEQVGQSERLKTQGLPSWSTPAELAKAMNISVGELRFLTFHRRVVKHSHYIRFHMPKKTGGTRLISAPMPRLKELQHWVLEHVLEKIPIHDSAHGFRKHHSIVTNAQPHVGQPMLINLDLKDFFPTLTYRRVKGLFRQLGYSESIATVLGLLCTEPEMDQVKLDGQPFLIAKGDRHLPQGAPSSPMITNLICRRMDQRLAKLAASFGFIYSRYADDLSFSGAELDSRETGRLLKRIQNIVNHEGFVVHPHKTKICRSGQRKEVTGIVVNSFCSVDRKTRKKIRAILHHIEKDGPSGKNFGANPDVLEALLSYAQFMAMVNPEQGLPVLNKVKALANQIGYKRKTYRRLASSSKRFKRFVPDPALFAKPEPAPSLQKETAEQRPTPLPKQDLKTNAEAPAKKPWWKFW

SEQ ID NO: 6229 - protein, 465 aa, unidentified
  source 1..465: note = Related to PBIH01000081.1; note = Deltaproteobacteria bacterium
MNTQPATRQELYDRVRASSLQEVILEEMVRYGYWPKEGEIPEDPAEDIKREGELVRELGKLRSELEKLHDMEKLIKAARRKRMLESRERQKENRLRRIREREERAAAWKERKQHEILYLGEGHSGTLSSQVSDEERLAAHHLPIFHTPEDLALAMGLSIGALRFLCFSRKVSKTSHYQRFYLPKKSGGKRLISAPMQRLKSAQHWLLEHVLEQVAIHPSAHGFRKEHSIVTNAEAHVGAHVVVNIDIENFFPTFHYPRVWGCFRALGYSPAVSTCMTLLCTEPEILEIELDGELWFVQQGSRALPQGAPTSPTLTNILCRRLDKRLAGLARVHEFTYSRYADDMTFSGNDNVDVGKLLASLRSVLHQEGLKIHPNKTAVYRRGRRREVTGIVVNEKLSVSRKTLRRFRATLFQIEKDGPEGKTWGNGGDLFASIQGYANFVHMVDPEKGRAFLQRVQRIINLHSR

SEQ ID NO: 6230 - protein, 358 aa, unidentified
  source 1..358: note = Related to JACCQV010000612.1; note = Deltaproteobacteria bacterium
VELTYLGPRVSGGLGPTGDRRTSDGARLSAAGLPVVHTAAELATAAGLALGQLRFLAFAREVSTTTHYRQFTIPKRSGGDRVISAPMARLKKLQHWILEHMLNKLPLAPPAHGFRPGRSTVSNALPHLQSAIVINVDLKEFFPTVTYPRVKGLFRKLGYSEEVSTVLGLVCTEPDIVETVLDGITYYVARGPRRLPQGAPTSPAITNALCRRLDKRIAGFAAKHALTFTRYADDLTLSTKDPAGRVGACLKFLRKVAVDEGFTVHPEKVRVVRTGRRQEVTGVVVNEKPGVVRAELRRFRALLFQIEKDGPAGKKWGTPGTDVLTSALGFASYVAMVDPVKGAALRTQVLALRARFPT

SEQ ID NO: 6231 - protein, 479 aa, unidentified
  source 1..479: note = Related to JAHBVW010000058.1; note = Deltaproteobacteria bacterium
MSNLPPPRDRKELYERIALGGKDDVIAEEMTRLGFWSGEQAQLVDPPVEAARKAELRERLGKLREQAARMRNLVTLEADLKKQRMAASRKKREETKQRRLGERAAAKERTKATKARELGYLGPGVSAGLGPEHRASDVARLQAQRLPVVHTAAELAAAIGVSLGELRFLAFAREVSTTTHYRRFTIPKRSGGERVISAPRKRLKRVQHWVLAKVLEPLLGDPAASDPAHGFRSGRSTVSNAVPHVGAAVLVNVDLRDFFPTVTYRRVKGLFAKLGYGEEVATVLALACTEPDIAETQLDGLTYYVARGPRRLPQGAPTSPAITNALCRRLDRRVLGWADKHGFAYTRYADDLTLSSKDPAARVGACLGFLRQVAGAEGFTVHPEKVRVVRRGGRQEVTGVVVNERPSVPRVELRKFRALLHHIDMDGPAGKTWGRTDGADGGDVLAAALGFASYVAMVDPAKGTALRARVLALRAKYPG

SEQ ID NO: 6232 - protein, 473 aa, unidentified
  source 1..473: note = Related to JABFXX010000347.1; note = Kofleriaceae bacterium
MADLTPPKNRKELYERIARGGKEEVIVDEMVRLGFWPNTQPPPGDPPDEIRRMAELRTRLAQLRQQAQGLRNLAQLEIDLKKQRLAESKRRRELNKQKLLGERAAAKAATQEKKTRELTYLGKDVSAGLGPTLDRRTSDAPKLTTQKLPIANTAAELAAAMKVSLGQLRFLAFSREVSTTSHYHRFTIPKKTGGERVISAPHKRLKAVQHWILEHVLEPLALAEPAHGFVPGRSTVSNAVPHVGAAIVVNVDLKDFFPTVTYRRVKGLYKKLGYSEEVATVLGLLCSEPDIAQTELDGTTYFVARGPRRLPQGAPTSPAITNALCRRLDRRINGWAKKHGFIYTRYADDLTVSTRDRNAPVGKMLAFLRRVVTAEGFAVHPDKVRVVRRGRRQEVTGVVVNDRPGVPRDDLRRFRALLFQIEKDGPAGKRWGHNEGNVLEAALGYASYVAMVDPAKGEVLRAKVLALRAKYKQ

SEQ ID NO: 6233 - protein, 474 aa, unidentified
  source 1..474: note = Related to JAGPDK010000426.1; note = Kofleriaceae bacterium
MSEKAPANRKELFERIARGSKDAIILDEMQRLGFWPSQQSLPNEPPDEVTRLAAARARLAELHRNASRLRNLVELEREAKKQRMAESRARRVATKQKRLGERAVKRTATQQRKTIELRYLGATVSAGLQPGVGAITDGAAATIAQLGLPAWQTAADIARAMQVSIGTLRHLAYAREVSTINHYHRFSIAKKSGGVRVISAPQVKLKAAQRFILDELLAKFPLSNAAHGFAAGRSIVSNAAPHVAAAILINVDLRDFFPTVTYRRVKGLFRTIGYNEEVAIVLALLCTEPEITETQLDGVTYYVARGERKLPQGAPTSPAISNALCRRLDARLGGWCAKHGFAFTRYADDLTLSSHDRNANVGEALAVARRLVAAEGFVVHADKVRVVRQGGRQEVTGVVVNQKLSVPRDELRRFRALLFQLEHDGPTEKSWHGVGADGTGDVVQSARGYASYVHMVDPAKGAILLARLDALTKR

SEQ ID NO: 6234 - protein, 508 aa, unidentified
  source 1..508: note = Related to JABFRG010000606.1; note = Polyangiaceae bacterium
MSNRRQELYDRIRSTSKDEVVLEEMIRLGFWPRQGSMPLDPGDEVRRRGEIERELAALRTEQTRLGNLEALKKEALKRRLAESKEKQKETKARRERERVARAAAWAQKKAGEIGFLGTGVSGGLGHTETDEPKLVAQSLPALRSGTDIARAMGITVGELRFLAFDRRTSETSHYVRFTIPKKAGGERLISAPMPRLKSAQAWILENLLGKVALHDAAHGFRAARSIVTNARPHVGAPLVINVDLKDFFPTLTLGRIKGAFRALGYGDHVATVLGLLCSEPDVDQVVLDGKTFYVANGKRRLPQGAPTSPAITNIVCRRLDRRLASAAQKHGFVYTRYADDLTLSSIDPAANPARVLGVLRWIVAGEGFVVHPKKTRILRKGARREVTGVVVNEKLSVSREQRRKFRAFLFQLDKDGPQGKQWGASPDVFASALGYAAYLAMVDPERGKPVLAQARAIAKKHGWKGKPRPVKAVQAAPMPPVAPPVAEPMAPTSPEAPAEPKKKWWKLF

SEQ ID NO: 6235 - protein, 527 aa, unidentified
  source 1..527: note = Related to JAGQIK010000716.1; note = Myxococcales bacterium
MTYRRYSTQPSSRQELYDRIRDSSKDEVILEEMIRLGFWPAAGTMPDDPADEIRRRGELEAELRALRTERSRLHNIEALKKEARKRRMAESRRKRQETKERRLQQRVERAAVWAERKKSELLYLGEEVSAGLGEAEPDAQRLARHGLPSFSDAAQLARAMGLSLGALRQMCFDRATSRTTNYIRFVIPKRTGGVREISAPRPRLKEAQRWVLDNILSKIALHDAAHGFRDKRSIVSNAHPHVQPAVLVNVDLKDFFPTVTYRRVKGMFRKLGYSESLSTVLGLLCSEPRATELSLDGVTYYVALQERALPQGAPTSPAVTNIICRGLDARLCAIASKLGFVYTRYADDLTFSSKDKTVNVGRLLRQLRKIVDDEGFVVHPDKTRVLRAGRRQEVTGIVVNHTPNVTRDVLRKFRATLYQIEKDGPQGKTWGHSDDVIAAVEGFANYVAMVNPDKGRPLVERARALVKKHGKKPTPPKKAKKPAASTAPPPQARSEAPAATAAQSEPPETDGDDGGGKKKKKKWWKIF

SEQ ID NO: 6236 - protein, 528 aa, unidentified
  source 1..528: note = Related to JAFCZD010000018.1; note = Deltaproteobacteria bacterium
MSRPSSRQELYDRIRESSKDSVILEEMIRLGFWPQAGVLPEDPADEIRRRGELEGRLRSLRTEQSRLSNVDALKREARKRRMVESRRKQKETKERRLRERRERAEAWKERKGREIVYLGEGISAGLSDIKLDATKLAGQGLPSFADAAAVAQTMGLSMGELRRFAFTRTTSKTTNYMRFSIPKRTGGERHISAPLPRLKEAQRWILDHVLAKVPLHEAAHGFVGGRSIVSNATGHLQPTVLVNLDLENFFPTVSYRRVKGLFRSLGYSEQVATIFGLLCTEPEVTELELDGATYYVALEERLLPQGAPTSPAITNLICRALDARLTSIATALGFHYTRYADDLSFSAQGADADAGRLLRRVRHVVAEEGFVVHPKKTRVLRRGRRQEVTGIVVNGDRPSLARDVLRRFRATLFQLEKDGPAGKRWGRAVADEGDDVIAAVEGFANYVVMVDPEKGQLLQERTRKLVARYGKKPTPPRGGSGGSGGGGGPRPAAEAPAAAAQAPVVEAPPTAPTEAPSKKKKEKWWKVF

SEQ ID NO: 6237 - protein, 544 aa, unidentified
  source 1..544: note = Related to JAEUJZ010000010.1; note = Myxococcales bacterium
MAEPPRTRQELYERIVATSKDEVVLQEMIRLGFWPAAGTLPEDPADEVRRRAELQRQLDRLHEQNRHLYNEQALIKELRLRRLAESKRKQQETKERRERERLARAEAWKQEKTRSIVYVGEGVSAGLGKREAKPERLKEHGLPNFTSAADLASAMKISVGALRFLCFARKTSSVSHYVRFRIPKKSGGERLISAPMPRLKAAQSWVLHEILEKLALHTAAHGFVRGRSIVSNARPHVGHALIVNVDLKNFFPTVGYPRVKGLFASLGYSEEVATLLGLLCTEPDVEELVLDGQRYFVARSERHLPQGAPTSPAITNLLCRRLDRRLQKMADELGFVYTRYADDLTFSAKSEDVGQAAEVLRRLRNIVAHEGFVVHPEKTRVLRRGRRQEVTGVVVNHKPGVPRDVLHRFRATLFQIEKDGPSGKRWGACKDVLASIRGFASYVRMVDPARGTPLCARVDAIVAKYSGKPSPPAPSGAPAKKPDVPKPDAAKPGAAGSVPAATKTAEALAKAAPTPASVVSDAKEPSSPASDAKTPTGKKWWKVF

SEQ ID NO: 6238 - protein, 558 aa, Thiorhodococcus sp.
  source 1..558: note = Related to AFWT01000002.1
MLAPCGSPPSKRLVFLGASRTLEQWLAVRPPQMHANRPEPSRAMSQPSSRQALYDRIRKSSKDSVIVEEMIRLGFWPAAGTMPEDPADEIRRRAELEAQLRALRTEQTRLHNIEALKREVRKRRMAEARERRKETKARKLAERQARAETWKAKKETDIGFLGEGVSAGLGHKGCDAERLAEHGLPELADAAAVAAAMGIDLGTLRFLAYACTTSRVSHYVHFFIPKRTGGKRAISAPMPKLKHAQHWILANVLDPVALDEHAHGFRHGRSILTNAQPHLGSRVVVNCDLQNFFPTVSYRRTKGLFQSLGYGEQVASIFGLICTAPETQEVELDGQRYFVALGDRVLPQGSPASPAITNLICRGLDRALEKTARQLGFRYTRYADDLSFSSDDANADVGRLLGRVRWLVQRHGFVVHPDKTRVLRQSRRQEVTGIVVNERPAVPRETLRRFRATLFQIEKDGPAGKRWGRATGDNGVDLMAAIEGFANYVAMVDPAKGRPLKAQVAALIARYPKQATPFKGRRRPSQSTDSPTSEPKRDATAPEVVDGTKKKKNWWKLF

SEQ ID NO: 6239 - protein, 417 aa, unidentified
  source 1..417: note = Related to JAEUKG010000966.1; note = Myxococcales bacterium
MSGDRPRTRQELYDRIRETSKDEVILEDMVRLGFWPRTGEIPQDPADEIRRRGDLERQIAALRTEQARLSNVEALRKELKRRRLLESKEKQKATKERRERERLARAAAWAEEKKRAIVHLGAGVSGGLSKGAPPNLEKLTALGLPRLATAAEVAAAMGIAVPELRFLAYARKVSQKTHYVRFTIPKKTGGARLISAPMPRLKRAQRWILDAVLAKVALEGPAHGFVVDRSIVTNARPHLGSQVVVNLDLRDFFPSLGFRRVKGMFEGLGYGEEVSTIFALLTTEPEIDEVELDGQTYFVATTARKLPQGSPASPAITNVVCRRLDKRLAGMARALGFTYTRYADDLTFSSKDRAADVGKLLRRVRWIVKQEGFAEHEKKTRVLRRGRCQEVTGVVVNDKPSVPREALKRFRALLFQL

SEQ ID NO: 6240 - protein, 519 aa, unidentified
  source 1..519: note = Related to JAESTW010000014.1; note = Kofleriaceae bacterium
MSKQPTTRKALYERIAKSSLDEVILEEMIRLGFWPSSSDAPSDPAEEIRRRGHLQRRLNEIRTEQLGLQNEAKLKEEARKKRMSDARERRLQNRERRLRERSERRAQWHQKKQEEIGYLGDGFSAGLGKRECDDKRLQAQGIPVLGDAMSLSNAMGISLGQLRFLAFSRKTSRYSHYQRFSIPKKDGGVRMISAPMPRLKAAQTWILETILNPLPMHDAAHGFRPGRSIVSNATPHIGADVVVNLDLENFFPSVGYRRVKGLFGHFGYSEEVATILALLSTEPELTQIKLDGDTYYVAKGERFLPQGAPSSPAITNLLCRRLDRRLEGICNKLDFRYTRYADDLSFSARGEPAKLVGKLLSQVEWLVAEEGFKIHPDKTRVFRRGRRQEVTGLVVNDGLSVPRAVLRRFRTLLFQIEKDGTDGKRWGASDDVLASAMGFANFVAMVQPEKGASLQTQVRKLLKTYGKAKAPRAQSAESKGTESKGAESKGTGRGPTPTSDETDKKTEDLAPKKKWWKLF

SEQ ID NO: 6241 - protein, 525 aa, Cystobacter gracilis
  source 1..525: note = Related to NZ_JAHXBG010000009.1
MAQQPPRNRQELYERIQSISKEEFVLEDMVRLGFWPARSGVPGDPRDEVHRKAELEKQIRALTSEQARLGNLEKLKKELRKKRLAESKARQKETKERRERERVARAEAWKARKAREILFLGRGVSGGLNHRTPEAPKLERQGLPRLETPEALAQALGLSVGQLRALCYARTVSTKTNYVRFALPKKTGGLRLISAPLPRLKAAQHWVLKNLLEKVPMHEAAHGFRPGRSIVSNARPHVGAAVVVNLDLKDFFPTVVYPRVKGFFVKLGYSEATATALSLLCTEPDMEEVELDGQRYFVAQGGRRLPQGAPTSPALTNLLCRRLDRRLKGAAGKLGFTYTRYADDLTFSVPRGGTGDVGKMLRLARFVIRHEGFFPHPEKTRVLRRGGQQEVTGVVVNDKPGVDRETLRRFRALLHQLEKSGPEGKKWNGSTDVIASVVGFANYVAMVDPTKGKAFQDKARALERKYGRKTVLPPRPKAPAAAQPGTATVAPTPPSSGTAAPGGPPKPEEPQEPNEPPKKKWWKLF

SEQ ID NO: 6242 - protein, 520 aa, unidentified
  source 1..520: note = Related to JAFGNZ010000091.1; note = Myxococcaceae bacterium
MAQQPPRNRQELYDRIRETSKEEVIFEEMVRLGFWPARSGVPGDPADELHRKADLRAQLRALTTEQSRLGNLERLKKELRKKRLAESRRKQQETKERRERERVARAEAWKARKAKELLFLGRGVSGGLSHRTPDVAKLERQGLPKLETPEVLAQALGMTVGQLRGLCFARTVSTRTNYVRFALRKKTGGLRIISAPLPRLKAAQHWVLENLLEKLPMHEAAHGFRPGRSIVTNALPHVGAAAVVNLDLKDFFPTVVYPRVKGFFVKLGYSEATATALALLCTEPDLEEVELDGQRYYVAQGGRRLPQGAPTSPALTNLLCQRLDRRLKGVGRKLGFTYTRYADDLTFSLPPGGPGDVGKLLRLVRFVIQKEGFVPHPEKTRVLRRGRQQEVTGIVVNDKPGVDRETLRRFRALLHQLEKSGPEGRTWNGSTDVIASAVGFANYVMMVDPTKGRVFLEQARALEKKYGRKAVVPPRRKAAPPAQAGTAAAPPSGARLGEEPKSGEPASPGAPAKKKWWKLF

SEQ ID NO: 6243 - protein, 533 aa, Archangium gephyra
  source 1..533: note = Related to CP011509.1
MSSQPPRNRQELYDRIRAGSKDEVVLEEMVRLGFWPARSGLPGDPADVVHRRNELQGEIRALTSEQSRLGNLEAMKRELRKRRLEESRRKQQETKERRERERLARAAAWKERKGKELLFLGRGVSGGLSERTPDEAKLTRLGLPVLATPEVLAQTLGLSVGKLRALCFTRTASTTSNYVRFQLPKKTGGTRLISAPLPRLKAAQTWVLENILEKVPVHDAAHGFRAGRSIVTNARPHVGAGVVVNLDLKDFFPSVLYPRVKGVFVKLGYSEATATVLALLCTEPDVEEVELDGQRFFVAQGGRRLPQGAPTSPALTNILCRRLDRRLAGAARKLGFVYTRYADDLTFSAHGPGPHDAGELLRFVRWLVGEEDFTPHPEKTRVLRRGRQQEVTGVVVNDKPGVDRETLKRFRALLHQLEKSGPEGKRWGNSGDVIASAVGYANYVAMVDPVKGKALQQKARALEARYGRRPSPPPRAKAAKGAAQAGSSAPVSSAAPPAQAPETPAAAPAAPAATPDSGQKPAEPPKKKWWKLF

SEQ ID NO: 6244 - protein, 515 aa, Archangium sp.
  source 1..515: note = Related to NZ_JADWYI010000001.1
MSSQPPRTRQELYDRIRATSREEVILEDMVRLGFWPARTEQPGDPAEVIHRRNDLMGQLRALTTEQHRLGNLEAMKRELRKRRLVESKRKQQETRERRERERVAKAAAWRERKGKELLFLGRGVSGGLSARETDEARLTRLGLPVLTSPEALAEALGLRVGQLRALCFTRTASTTHHYVRFLLPKKTGGTRLISAPLPRLKAAQAWVLTQVLEKVPVHEAAHGFRPGRSIVTNARPHVGAAVVVNLDLKDFFPSVGYRRVKFAFMHLGYSEATATVLALLCTEPDVDEVELDGRRYYVSQGTRRLPQGAPSSPAITNLLCRRLDARLTGTARALGFVYTRYADDLTFSATGPGHHDPGTLLRRVRWLVKQEDFTPHPDKTRVLRRGRQQEVTGVVVNDKPGVDRQTLKRFRALLHQLDKTGPEGKRWGAGADVLSSAVGYAHFVAMVDPLKGRALELKARELERRYGRRPPPAPPTPPPAATAAPAPEPTPPPAPPTEPTPASPEAPKKKWWKLF

SEQ ID NO: 6245 - protein, 542 aa, unidentified
  source 1..542: note = Related to JADIZX010000005.1; note = Myxococcales bacterium
MDRRQQLYDRIRSTSKDEVVLEEMIRLGFWPARGTLPSDPGDEIRDLAEAQRELAALRTEQSRLHNLEALKKELFKRRLAESKARQAETKARRERERVARAEAWKNEKTRAIVFLGRGVSGGLADTTCDEARLQKQGLPVLRTAEDLARAAGVTVPELRFLAYARTTTAARVSHYRRFQIPKKTGGVRIISAPMRRLKALQRWLLDAVLARVEVHDAAHGFRAERSIVTNAGPHVGARVVVNLDLKDFFPTVTLPRIRGVFRSLGYGEHLATIFALLASEPDTVRVALDGAEYDVAQGPRRLPQGAPTSPAITNVLCRRLDRRLFHAAKKLGFAYSRYADDLTFSSTSKEENAGQLLKQVRFIVAAEGFVPHPDKTRVLRKGRQQEVTGVVVNDKLGVDRVTLRRFRALLHALDKDGANGKRWGSSPDVFASACGFASYVAMVDPVKGRALLARAREIAARHGWKGPPRGPDRSGGPSGPGGAPKPPAPATPSERAPAPVAGLPGEPLAAPPTPEPPAPEPPAPASPPTPETPAKKKWWKLF

SEQ ID NO: 6246 - protein, 528 aa, unidentified
  source 1..528: note = Related to JADJQX010000001.1; note = Myxococcales bacterium
MAQDKRQALYDRIRATSRDEVVLEEMIRLGFWPARGEVPHDPADEIRARTEMQRELSALRTEQSRLGNLEALKKELYKRRLAASKAKQAETRARRERERLARAEGWKIRKAGDIVFLGREVSGGLSDTTCDEAKLTKQGLPVLRTAVDVARAAGVGVPELRFLSYARTTSRISHYRRFAIPKKAGGVRVISAPMPRLKRLQRWLLDSVLSHVEVHDAAHGFREGRSIVSNAKAHVGARVVVNMDLSDFFPGVLFPRVKGMFRALGYGDFVASVLALVATEPDMQKVVLDGRTFHVAEGPRRLPQGAPTSPAVTNVLCRRLDRRLFLAARKLGFVYTRYADDLTFSAHDDASAGRTGQLLAQARFIVEEEGFTPHPKKTRVLRRGRRQEVTGIVVNDGLGVEREKLRKFRALLHSIRATGIEGKTWGDSPDVLASARGFASYVAMVSPEKGRALLGQVAELEARYGAARPPRASKEGMHAKAAPTSAGHATPVATSEAPRPENVPPEAPKPEAPKPEAEAPKKKWWKLF

SEQ ID NO: 6247 - protein, 468 aa, unidentified
  source 1..468: note = Related to JAIOQA010000029.1; note = Deltaproteobacteria bacterium
MSDRRQALYDRIRASSKDEVILEEMIRFGFWPAAGLPGDPAEEVRRQGELQQRLTALRAERDKLANVNELRREARKQRLRASKDKRRETKARRLRERAARAAAWRARQALELTFLGAEVSGGMQDTTCDRARLAAQGLPAFATAAEVAQAMGITVGELRFLAFARRASRISHYRRFTMPKKSGGVRAISAPMPRLKRAQHWLLAQILAKVPTHDAAHGFCAGRSIVTNARPHVGAAVVVNLDLQDFFPTVELPRVKGLFRALGYGEQVATAFALLATEPVTEAVELDGQVWHVAASAAARRLPQGSPASPAITNLLCRRLDRRLRGAATALGFTYTRYADDLTFSATAPAAVERAGKLLTQVRWLVGQEGFVVHPDKTRVLRRGRRQEVTGLVVNERLGVPRDQLRRFRALLHHLDRRGLEGARWGASGDVLTSAAGFASYVAMIDPVRGAPLVAEVARLAARLAPAR

SEQ ID NO: 6248 - protein, 548 aa, unidentified
  source 1..548: note = Related to JAGPCY010000008.1; note = Kofleriaceae bacterium
MPDKRQELYERIRASSKDEVILEEMIRLGFWPAQGHLPDDPADEIRQRAALEQQLAALRTEQARLHNIEALKKALRKQRLEASKAKQRETKERRERERVARAAAWREHNQRAIGYLGRGVSGGLNQTAADRAALTRHGAPVLETAAELAAAMGLTIPQLRFLAFARATSTVNHYQRFAIPKKTGGLRRISAPMPRLKAAQRWILDHVLAGVALHDAAHGFRPARSIVTNAAPHVGRDVVVNLDLKDFFPTLTYPRIRGVFRGLGYGPAVATILALLTSEPDIDTVELDGQTFHVASGERKLPQGAPTSPMITNIVCRRFDARLAGAARKLGFTYTRYADDLTFSGPRTADAGALLSAVRMIATAEGFAEHPDKTRVLRRGRQQEVTGVVVNQRLAVDRATLRRFRALLFQIDKDGPAGKTWNDAPDLFAAIIGYAHFVHMVDATKGAALVAQAKALAARHGWRPARRPPPKTRGGSGGGGGGPGGSGPGGSGSRPGEAERTATSTGPTPSTEPAQPAQPGPPDAPSPPDAPSPDAPPPAKKKKWWQIF

SEQ ID NO: 6249 - protein, 514 aa, Nannocystis exedens
  source 1..514: note = Related to NZ_NETK01000001.1
MAGQPTSREALYERIRSTSKEEVILEEMIRLGFWPAQGTVPHDPAEEIRRRGELERQLAELREKSRKLYNEKVLIAEQRKARLAESRRKQKETKARRERERQERAQKWAARKAGEILHLGEDVSGGMSHKTSDPELLKGEGLPVLASAEELAKAMGLEVNALRFLAYNRKVSRVSHYHRFLLPKKTGGFRLISAPMPRLKRAQTWALEHIFAKLRVDSAAHGFVAGRSIVSNAKPHVGADVVVNFDLKDFFPTVTFPRVKGAIRRLGYSESLATALALVCTEPDLEEVALDGVTWFVARGPRHLPQGSPCSPAITNLLCRRLDRRLGGLAQALGFVYTRYADDLTFSGRGEAAESKRVGKLLRGVADIVAHEGFVVHPEKTRVMRRGRRQEVTGIVVNDRPSVPRDELRKFRATLFQIEKDGPAGKRWGNGGDVLAAVHGYACFVAMVDPARGQPLLARARALLAKHGGPSKSPGGSVPRVPSPNPQSVNAPEAPKPAAPASPAAPAKKGWKLF

SEQ ID NO: 6250 - protein, 520 aa, unidentified
  source 1..520: note = Related to JAEUJW010000075.1; note = Myxococcales bacterium
MASQPSTREALYQRIRESSKDEVILEEMIRLGFWPAAGDVPNDPADEIRRRGELQRQLDELREKGRRLYNEKALINEARKARMAESRRKQAETKARRERERGEKASAWAKRKSGEILYLGEGESGGLSQKTSDPSKLAHFGLPKLDTAEQLAAAMGIEIKALRFLAYNRRTSKVSHYRRFFIPKKTGGQRLISAPMRRLKTAQTWVLTNILDKVTLHEAAHGFRQGRSIVTNARPHVGSAVVLNLDLKDFFPTVTVRRIKGVFRALGYSEAVATALALVCSEPEVDEVALDGETYYVARGPRHLPQGSPASPGITNLLCRRLDRRIEGLAQSLGFVYTRYADDLTFSARADRAGSVNVGKLLRAVKDIVEHEGFNVHPDKTRVMRRGRRQEVTGVVVNDRMGAPRAMLRKFRATLYQIEKDGPMGKKWGNGGDLLAAIHGYACFVAQVDADKGKALMAQVDRIFNKYGKPRRPGGGGGKGPGGGGGKTPDAARPATGATTQKPAEPAPEAPKKKPAWKLF

SEQ ID NO: 6251 - protein, 528 aa, Nannocystis sp.
  source 1..528: note = Related to JADKFZ010000012.1
MAAGQPSTREALYERIRASSKDEYILEEMIRLGFWPASGAAPNDPADEIRRRGELQRQLDELREKGRRLYNEKALIAEARKLRMAESKRKQKETKERREGQRIARAQLWAQRKAKELLYLGEGVSGGLSDRVSDAGKLKTHGQPHIDSVEQLAQAMGVELKALRFLAYSRRTSRVNHYRRFLLPKKTGGHRLISAPMPRLKKAQRWVLERVLDKVALHDAAHGFRTGRSIVSNARPHVGADVLVNLDLKDFFPTVSLPRVKGVFKSLGYSEAVATALALVCTEPEIDEVVLDGITYFVARGQRHLPQGSPASPGITNLLCRRLDRRLAGLAASLGFVYTRYADDLSFSARRPAVGSIKVGKLLRAVADIIRHEGFTVHPDKTRVMRKGSKQEVTGVVVNDRLSVDRATIRKFRATLYQVEKDGPAGKRWGAPGGDLLASLHGYACFVAQVDPQRAAPLLAQVRRIFEKHGRPLRGGPGPGKPPGGGGGKPPEAQVAGKPGPQAEAPRTESKPEAESTAPKKKPFWKLF

SEQ ID NO: 6252 - protein, 519 aa, unidentified
  source 1..519: note = Related to JAGQIT010000589.1; note = Myxococcales bacterium
MSAKPNRRQELYDRIRNSSKDEVILEEMIRLGFWPRAGEIPADPGDEIRRRGELQRQLDELRRKASRLYNEASLIREARKQRLADARRKKQETRERRERERQERAAAWAARKQHEVVYLGEGVSSGLAEHTSDVGRLQAAGLPLFADPGALAQAMGVPLGELRFLAFHRRVATLTHYRRFQIAKKSGGTRLISAPMPRLKRAQAWVLRNVLDKVALHEAAHGFRGGRSIVSNAAPHVGADVVINLDVENFFPTITLPRVKGVFRALGYSEAIATILALLCTEPETTEVELDGRTYYVGLGDRVLPQGSPASPAVTNALCRRLDRRLDGLAEQLGFEYTRYADDLTFSRRGDIRSTEVGELLGKAADIVRHEGFRVHPDKTRVMRRGRQMEVTGVVVNDKLSVDRKTLRRFRAALFQVEKDGPAGKRWGDGPRLLASMHGYASFVTMVDRARGEPLLRRVQALIERYGVGASNASAAPGEGKAAAPTATGEAPSAAQTDAPEPEPTPPAPQPKKKKWRLW

SEQ ID NO: 6253 - protein, 508 aa, unidentified
  source 1..508: note = Related to JACKDU010000005.1; note = Myxococcales bacterium
MSQRPTTRQELYERIRASSKDEVILEEMIRLGFWPAQGEMPTDPAEDIRRRGEIERQLEELRRKASRLYNEKSLIQDARKRRMAESKRKKEETRLRREQARRERAAAWRERKQNELVYLGEGVSGGLGQHEGHPERLAAAGLPAIADARELARLMGVSVGDLRFLAFHRAVATITHYRRFQIPKKSGGTRLISAPMPRLKAAQGWVLRSILDRVDLHAAAHGFRPGRSIVSNAQPHVGAAVVVNLDLQGFFPTITLPRVKGVFAALGYSESVATILALLCTEPETFEVELDGRTYHVGLGPRVLPQGSPASPAITNVLCRRLDRRLQGLADQLGFTYTRYADDLTFSRKKGASSAEVGEMIRKAVDIVGHEGFTVHPDKTRVMRRGNHQEVTGVVVNDKASVDRRTLRRFRATLFQVEKDGLAGKRWGAGGDLLASMHGYASFVAMVDRERGAPLLARVKRLMALHGRGPSGGGGGGGSAGPRPAATTPEPAQAPAPAPEKKKRWKLW

SEQ ID NO: 6254 - protein, 523 aa, unidentified
  source 1..523: note = Related to JACKDW010000029.1; note = Myxococcales bacterium
MSRQPSTREELYERIRNSSKDEVILEEMVRLGFWPAASGQPGDPGDEIRRRGELQRKLNDLRTKVSRLYNEQQLISDQRKQRLAESRRKRQETKERRERERQQKAELWRQRKEREVLYLGDGVSGGLLERKTDQARLVGGGLPVLAGPEAVAASMGITVGALRFLAYSRRVSRISHYRRFSIPKKTGGRRLISAPMPRLKAAQRWILENILERVPVHEAAHGFLERRSIVTNAVPHVGADVVINLDLKDFFPTVTYERVKGLFVSLGYSESVATVLALLSTEPEVAELELDGNSYYAAQGPRHLPQGSPASPAITNLLCRRLDRRLQGLARKHGYQYTRYADDLTFSARGMVSTRSSEVGRLLRGVADIVTHEGFEVHPEKTRVMRRGRRLEVTGIVINDKLSVDRKTLRRFRATLFQVERDGPEGKRWGESKDLMAALLGYASFVAMVDPQRGRPLISRVRAVHRAHGYQPAAPKRRAAPPTAASTAPSSPARDTTASVPTPDRDPDPTPPPGKKKKKWKLW

SEQ ID NO: 6255 - protein, 326 aa, unidentified
  source 1..326: note = Related to JAGQQJ010001302.1; note = Planctomycetaceae bacterium
KKTGGIRKISAPMPRLKRLQEWILSNILEKVPLQDAAHGFRRGRSIVTNAAPHVGQDVVLNMDLENFFPTIDFPRIRGVFRKLGYSGQISTVFALICSEPEIEEVQLDGQAYFVATTDRRLPQGAPTSPAITNIICRGLDARLTGVAQRFGFTYTRYADDITFSGSGGALQQIGKILRQCKYIIEQEDFKVHPQKSRVFRKSSRQEVTGLSVNERLGINRQLLRRFRALLFQIDRDGPSGKHWGHSTDVMTSIEGFANFIAMVNPDQGQIFQQRVRQLHEKHGRGQRMYNQRNRWNDQEVVTHLPDSSEKPELPAEMKKKPWWKFW

SEQ ID NO: 6256 - protein, 518 aa, unidentified
  source 1..518: note = Related to JAGQQQ010000127.1; note = Planctomycetaceae bacterium
MPTRQELYDRIRESSRQEVILEEMIQLGFWPSGSQVPYDPKEDLRRERELQQELQQLATKDRNLQNIDYVRAQARKQRLAESRQKQKETKERRLREKQERASAWQARKVSEILYLGEGVSNSLNQRESNHEKLSSAGLPRFDGVEDLAQLMGVTVGELRFLAYDRAASQVTHYRRFGLKKKTGGIREISAPMPRLKRAQEWILKQILEKVEVHDSAHGFRPGRSILTNARPHVGQDVVINLDLENFFPTVTFPRIRGVFRSLGYSGQLATLLALICSEPEKSEVILDGQHYHVARSERRLPQGAPSSPALTNIICRGLDARLAALASRLEMTYTRYADDITFSGSGEATQTIGKVLRQARYIIASEDFRIHPSKTRILRKGSRQEVTGLIVNEQLGVNRELLRRFRALLYQIEVSGPAGKHWGGKHDVMTSITGFANFVQMVDPDKGRPLQEKVASLQKKHGIGQRRYASRTPWNPSTVAPDQPSKPGGEEVAYPDSGPRDRFRNGTPEPKKPWWKFW

SEQ ID NO: 6257 - protein, 524 aa, unidentified
  source 1..524: note = Related to DLZC01000224.1; note = Planctomycetaceae bacterium
MTTRQEIYDRIRESSRDEVILEEMIRLGFWSRDTDKPEDPAEDIRRQGELEREQRRLTQEAARLRNIEALHEEARRKRMEEFRRRRQETKERREQERVQRAAAWQESKQKEIVYLGDSVSTTLNQQTTDEDRLRSNALPNLQSIVEVAEAMEISVGELRWLAFHRRTAEITHYRKFAVPKKTGGVREISAPKPRLKRIQHWILHHILDQVEVHDAAHGFRRDRSIVTNAQQHTSSGVVVNVDIQDFFPTVTFRRIRGVFKSLGYSGQISTVFALLCSEPERREVALDGRTFHVARTERRLPQGAPTSPALTNVICRGLDARLHTLSQKNGFTYTRYADDMTFSASGEATQNVGRVLRQVKHAVSQESFQLHPDKTRIQRASRRQEVTGLTVNSGVSVPRETLRRFRAVLFQIDRDGPGGKRWGASQNVMVSIEGFANFVAMVDPERGAKLQQTVAELQDRHGRGRGTVTVRQRWTFQRPEPVSSPPGPSETAVSNPLQAAASPPGADQSAPKPRKPWWMWWKFW

SEQ ID NO: 6258 - protein, 532 aa, Polystyrenella longa
  source 1..532: note = Related to NZ_CP036281.1
MRSRQEILDQIRETSRDEFILDEMIRRGFWPKEGELPEDPADEIRQREELRRKLHSLTTEDRKLSDVEKLKREARRQRLAESRLKRQETKERRLRERAEKAEAWREQYTRDIVYLGSDVSGGLNQQKIEIEELQKRGLPELHSVEELAEAMETTVAELRFLAFDRRTSTTTHYQRFAIPKKTGGIRNISAPMPRLKRAQEWILWNILDKIELHPAAHGFRTGRSIVTNAEPHVKAEVVINVDLENFFPTVTWRRVRGLFRKFGYSEQLATVLALICSEPEVTEVQLDQKTYYVQQSERRLPQGAPSSPAITNILCRGLDARLTGLAEKLGFTYTRYADDLTFSHAGQGSAAVGRMLRQVSYVVEQEGFQLHPEKTRIFRKGSRQEVTGLVVNERVNIPRKKLRQFRATLYQIEKDGPEGKHWGNSPNVLEAIEGYANFVAMVDPEKGREFQLQVRTIIEKEGRTQRNDVQRDRWNPNLASEEISEIPATGAVPPSVSSLLTTQEIEPVAPAAGEVFESKSKPWWMFWARWFN

SEQ ID NO: 6259 - protein, 521 aa, unidentified
  source 1..521: note = Related to JABMRB010000852.1; note = Candidatus Nealsonbacteria bacterium
MDSQPTSRQELYDRIRESSKDEVILEEMIRLGFWRDAEAVEGDPADEIRRKGELERQLKALSTERARLQNVEALKRALRKQRLEDSRSNRKETKERRLRERQERARAWQQRKTREIVYLGDGVSAGLAEHELQREKLQAAGLPVVATPDELAHAMGVSLGELRFLAFSRRTSTTTHYKRFFVPKKTGGQRLISAPMPRLKRSQEWILQNILEKVPLHDAAHGFRRGRSIVSNARPHVESDVVVNLDLKDFFPTVTYRRIKGMFRNLGYSEAIAVVLALICSEPDVDEVELDGRTYYVARQQRLLPQGAPTSPAITNIICRGLDGRLARTAEMLGFCYTRYADDITFSGSGDAAANVGRALRRIGYAVEKEGFEVHPDKTRVLRRGRRQEVTGLVVNDRLNVSRKLLRRFRATLFQIHRDGPAGKRWGNSNDVIASIEGFANFVAMVDPEKGAGFQRKVREIIKSHGRGGGRAYPQRSRWVPKTPPAEGLAMEEEPLTAETVQGRVSRVQKPREKKPWWKFW

SEQ ID NO: 6260 - protein, 509 aa, unidentified
  source 1..509: note = Related to JABMRP010000303.1; note = Planctomycetes bacterium
MASQPTTRQELYDRIRESSKNEVILEEMIRLGFWPRGDTIPEDPADEIRRRGELERQLRSLVTERARLGNVEALKKALRKQRLDQSRQKQKETKERRLRERAERAEAWKKRKAHEIGYLGEGVSAGLDNHQGDHEKLTAAGLPVFDTPEQLARAMGIGVGELRFLAFNRRTSTTSHYRRFLLPKKTGGHRKISAPMPRLKRAQEWVLATILEKVALHDAAHGFRRGRSIVTNARPHVGADVVMNLDLKDFFPTVVYRRIKGVFRNLGYSESVATVLGLLCSEPEVDEVRLDGRTYYTARSKRFLPQGAPTSPALTNIICRGFDARLSRTAADLGFAYTRYADDVTFSGPGLPAENIGRALRRIEHIAGAEGFEVHPGKTRVLRSCSRQEVTGLVVNQRVNVSRKMLRRFRATLFQIERDGPAGKHWGHTDDVIAAIEGFANFVAMVDAEKGKGFKRQVERIIQKHGRGGGRVRVQRSRWVSSPPPVAAVVDTVESPPEPEKKKPWWKFW

SEQ ID NO: 6261 - protein, 509 aa, Lignipirellula cremea
  source 1..509: note = Related to NZ_CP036433.1
MTDPPRTRQELYDLIRETSREEFILEEMIRLGFWSESTAPENPANEIRRQAELQRELQSLLTENRRLVDLDKAKKALRRERMAESRRRQKETKERREAERQARAAAWQAEQERSLAYLGEGVSAGLMRYEVDDRRLARNGLAGNPLATPLALAQAMQISLGELRFLAFSRRTSQTTHYQRFQIPKKTGGLRSISAPMPRLKRAQEWILRNVLENVPMHPAAHGFRTGRSIITNAQPHVGAAIVANVDLQDFFPSVGYPRIKGLFRTLGLSEATSTVLALLCSEPEIDEVVLDGQTYYTARSERRLPQGAPTSPAITNLLCRGLDARLQSNAEKLGFVYTRYADDITFSSQNAQADVGRALRRIRHVVASEGFTVHPDKTRILRRGSRQEVTGLTVNDRLGVSRELLRRFRAVVHSVEKTGPAGKRWGESPHLMSSLAGFANFIAMVDPEKGKPWQARVAALIEQHGRGPDLRSQRKRWVSPVPAAAAAPSTETASKPSESSNRPWWKIW

SEQ ID NO: 6262 - protein, 505 aa, unidentified
  source 1..505: note = Related to nan
MSRRPSTRQELYDRIRQSSKDEVIIEEMIRYGFWPKQSNLPNDPAEELRRIGELERRISALATEASRLNNVDAMRREARKRRMAEARARREETKRRHEAQRRARAEAWAAKKREEIVYLGEGFSGGLGQREGQSLPGLPDLQGAGALARAMEIEVGQLRWLAFHRRVSATTHYVRFQIPKKTGGVRNISAPMPRLKRAQRWIKEQILDKIELHEAAHGFVPGRSIVTNASAHVGRRVVINLDLQDFFPTLSFSRIYGVFRSFGYSPEASTLLALLCTEPEVAEVELDGRTWYVHTSERRLPQGAPSSPALTNIVARRLDRRLAGLAAHLSFTYTRYADDLTFSSDAADASIHRLIRAVEGIVSGEGFVVHPGKTRVMRRASRQEVTGLVVNDRLGVPRRLVRRWRATLFQVRRDGPGGKRFGLGSDVFASLSGFAAFVHMVDEARGARMLSEVAEVAAAHGWAPPPRRSTETRATEASSEASSEAPGVPASPSAGWGGPTWEWPL

SEQ ID NO: 6263 - protein, 554 aa, unidentified
  source 1..554: note = Related to JAHQVJ010000249.1; note = Myxococcales bacterium
MSERPQDRQELYDRIRESSKDEVILEEMIRYGFWTQEGRPDDPAEEIQRKGELERTVAALATEASRLRDVDAMKRAARKQRMQEAKARRIETKERREAQRQAKAKAWAERKTRELLYLGAGVSNGLGQQAEQIQPGLPSVPSAPDLASAMGISLGELRWLAFHRKVSTTSHYARFQIPKKTGGTRLISAPMPRLKKAQHWIRAEILERVEVHEAAHGFVRGRSIVSNAAAHVGQRVVINLDLRDFFPSVHYPRVFGLFRSLGFSPETSTVLSLLCTEAEVEEVQLDGRRWFVHASERRLPQGSPCSPALTNLVCRRLDRRLTGLATQLGFTYTRYADDLTFSSTRDNAQVNRLIRAVEHIVDDESFTVHPDKTRIMRRGRRQEVTGLVVNDRLGVPRRLLKQWRATVHQIRRDGPAGKRFGLGPDVMAGLTGFAAFVNMVDAAKGQAMLQQMAELAVSRPAPPAPQPRPTPPAAAPLPPPMPVAEPAPTDEPVRLTESSAPVLRRTRTLDEPEPPLTHQETAKTLIDESRSEVPEVVRPRRRWWQFWKWFSRRG

SEQ ID NO: 6264 - protein, 546 aa, unidentified
  source 1..546: note = Related to JAHJCH010000337.1; note = Myxococcota bacterium
MTQPRTRQELYDIISQTSKAEFILEEMVRLGFWGDRPVDPGGAHKRRGEILKRLSALQSEAARTQNREAVLKAIRRERMAESRRKREENKQARIEAKRARAEAWRQRKAKEILYLGEGVSFDLSKTANNMDAWLGAEPEPEDYRERLEGLSASALPQLKSPPDLARALGISLGELRFLAFQRVVSSQSHYRQFRIAKKTGGLRTISAPMPRLKRVQRWILDEIINKIDDIGLHDAAHGFRAGRGILSNAAPHVGQAVVINMDLADFFPTITFSRTRGLFASMGYSPSVAVILALLTTEADIEAVELDGRTWYVRGGERRLPQGAPSSPGITNLICRRLDARLSGYAAQHGWTYTRYADDLTFSGEGQDLNQLLWVARRIIEDEGLRINEDKTRILRRGRRQEVTGLIVNDQLGVPRRALRRFRALLHQVRLDGPKGKRWGQGEDLFASMMGFADFVYMVDPAKGAPLRAEVRALQARYPWRAALDEAPLSLSKPSAPLIAATPEDAPTPEDAPTPPEAAQEIEEVEEASPTQEAQPDPNRPWWRLF

SEQ ID NO: 6265 - protein, 508 aa, Persicimonas caeni
  source 1..508: note = Related to NZ_CP042468.1
MTRPSREELYRRIRESSKDSVILDEMLRLGFWDSEEGANDVPEELIRREAELRQELRKLTAQQRRYENRDAALKAMRKERLRESREKRAANKQRRKEERLARAMAWDETQKTHIVYLGEDVSTHLEKLDYDAEKLAKHALPDFPDHVALADALGVSMAELRFLAYHREVSTVTHYRRFQMPKKRGGFRNISAPMPRLKRAQTWILENILDHVPLRDEAHGFRPSRSIVSNARPHVGQDVVINMDVKDFFPTVTLWRVFGVFESLGYSPSVATILALLCTELPVEELELDGKTWYVATGERCLPQGGPTSPAITNILCRRMDARLAGIADKHGFVYTRYADDLTFSASGEAAEAVTKLLWHVKTVVQEEGFELHPDKQRIMRSGRRQEVTGLVVNDRLSVPRDDVRAFRALLHRVKTAGLERAHWKGESDNLLDRIHGFASFVHMVDAERYAELRAEAKEVLDAHGYAPQPVPPKPKSERQDASAEGDGAAKPKKGLWAKIKGFFAGAD

SEQ ID NO: 6266 - protein, 418 aa, Acanthopleuribacter pedis
  source 1..418: note = Related to NZ_JAFREP010000009.1
MGEREKPGARQGAGTPSLEDREQECRAIEQAALAALDRDLAEKRLDEGLKREHWYEHLIAARPRRGKRRFPWKRNRKPRPVFSAEEHRVKFDCPPLPRLEDVAHLLDIPLAELQFLAFGDRRLEISHYRRFAISKKSGGQRQIAAPMPRLKRVQRMLYEQLFQQIPLHPVCMGFRPGRSIVDNARPHVGADVVVNLDLQNFFPGIPYARVRGFLRAMGYNAAVATCLARLVTEPSVSRLQWRGRSFTVETGPRRLPQGAPTSPAVANAIAYRLDCRLMGLAKAMGWRYSRYADDLSFSAVGEPAFVVGDLLARVRSIIGEEGFTVHPDKTRIQRKGRRQEVTGLVVNRVVSVPRDELRRFRALLHQIERSGFEGKQWGRGGDLHAAIEGYLNYLAMVDEIRAEPYKKQWRRIKGAATD

SEQ ID NO: 6267 - protein, 392 aa, unidentified
  source 1..392: note = Related to SECR01000885.1; note = Myxococcales bacterium
MADSSYTKRQALYERIRQSSKDEVILEEMIRLGFWKEKTLPGQPTTDLERLRDLRAELSTVSQKLARTANLAALRQEVHARRLRESRERQQQNKERRERERREKTERWRERSRRELLYLGAGVSGGLGSPTGDEARLRERGLPIFTDAADMARQMGLTLGELRFLAFHRQVSTVHHYVRFALPKKAGGERMISAPRPRLKKAQHWVLTELLDRVPVHDAAHGFRAGRSIVSNAEPHLRSAVVINLDLQDFFPSIHYRRIRGLFRSLGYGEAFATVLALLCSEADVDALDLDGTTYYVARGPRRLPQGAPTSPALTNILCSRLDRRLTAVAHRSGFRYTRYADDLTFSAPSLTTNAVAAAPVVGAAVASAPAAGAAVASAPVTAAADATPDVG

SEQ ID NO: 6268 - protein, 338 aa, unidentified
  source 1..338: note = Related to JAGQVA010000789.1; note = Bacteroidetes bacterium
MASNSDQNRRENIRREIAQTSKDEFILKEMKRLGFWPNEEGKPRVEENLIKRQGELSREIADLSKKARIYQDREALLNKHRKERMHKSREKQKANKEKREAERLTKKEAWKEKQAKDIIYLGDKYSAGLKNKTNDLALLKKHQLPQIQNVLELAKCLKTNVSELRYLSYYRPVTKVSHYIRYALPKKNGGNRQISAPMPRLKTVQRAILDELLVKVPISQYANGFAPGRSIVTNASPHVNADLIVNMDLKDFFPTISYKRVWGMFKKLGFSDQNATVLALICTEPVEEKVEVDGEIYYISEGERVLPQGAPTSPAITNIICRRMDQRMAGIAKKLDFT

SEQ ID NO: 6269 - protein, 590 aa, Actibacterium sp.
  source 1..590: note = Related to JAFEUL010000003.1
MRSNRRQELYDRIRESSMDEVTLQEMIRHGFWAEDDAMPSLPAEMIKRRGELRREISELAQDARLYRSQEQALRAIMKQKMREAKDRRIETKKRQIQARNDRAAAWHRKKTEGIVHLGDTVSGALQNRDSNAERLISQGLPDFPDLGDIADAMGITLGELRFLAYDRAVSKVSHYHRFQIPKKSGGTRILSAPMPRLKRAQYWLLDNIVNQIEPHDAAHGFRAGRSILTNAKPHMRQAVVVNYDLKDFFPSIGYRRVKGLFAALGYAEAQAAIFALLATEADRTEVVLDGQTWHVAGGERVLPQGAPTSPAITNLLCRQLDRRLTGTARKLGATYTRYADDLTFSFATDDTTALRSLDWAVGEIVLDEGFNLNDAKTRTMRRHTRQEVTGITVNDGLTISRKERRRFRAYLHNVEQGRDMGSFGSGHPKNSALGYAQFLTMVHGDGVSDLVAHARTLFGDQTSVPPEDPNHFRQMSARGEAPKADWWQPAEPAQPVPEALPQPPGTAEGRSTNIPTVGKRRARDWGAARAQPSQSGPARPRQGKKGLVGWSGFQKTAITVLALIALIPFPFSPVLMGATIYFIWFHRYRK

SEQ ID NO: 6270 - protein, 642 aa, Ruegeria sp.
  source 1..642: note = Related to JAKRGB010000012.1
MSSVSNLRSRISDSSLDQVVLEEMIRHGFWGRDAEVGEMPAEFFERRAALQAEIADILARDRRLSDPDKALQAVMKERMRRARLKRVETKRKAIEARNARAAAFDARKRAEVISLGDVSSAPLQSREANNDRLTAQGLPVIEGAIALSEAMGIGLPELKFLAHDRKVARVTHYQSFEIPKKTGGVRVISAPKPRMKRAQYWVLDNILACIEPHDAAHGFRTGRSILTNAAPHVGQELVINMDLQDFFPTITYGRVKGLFAAMGYAEADAAVLALIATEAPRDTINVDGTVWHVATGPRATPQGAPTSPAIANLVARKLDRRLLGLARRFGFSYTRYADDMTFSGPFPGDQGLKIFHAAVRAITTEEGFTLHRDKTRFMRRGGRQEVTGLTVNDKVSVPRAERRKFRAWLHQAEQSGTPQRPFRTGNPVTTGQGYASFLYMVGGTEGLALAERAWLLLGRQTGASSENIEQAQAFRTASAEGRLPTPDWWQPAEPPPFEPIPLPAYDRKDQETRDVQTSIPKAGERQLRRAQIERPGADARSRAALSRSNRAWGGQASGTSPSGQSSWAKWIMSFFAFFLQVLPYIGVPLAVFAFYHIWKPQAGYLGATTVWHKLLVAAKFLFVLLGIDFALVMILAVFSGIG

SEQ ID NO: 6271 - protein, 503 aa, unidentified
  source 1..503: note = Related to PBMT01000060.1; note = Proteobacteria bacterium
MSAKKWTSIPDDFDIVRASREEVRKLRWSPVWQDFLLREVVRMGFYEPEDDTEQSYYINRSKELRAELQKLNIEIEELKEEESSLVDQRKAIAKATQRQKEAHRVRLDESRAQRQVRKQQRIEQRKAKKELWSIRKQQELLYIGAGVSRILKERNSDTAKLKSLGCPVVLTDLELLSLLQQPASEDDSIELSMAHLRRFAFRRRISQHTNYTQFTIPKKTGGERLITAPTMALKTVQRRIVKHILSTIPTHSAAHGFVEGRSIRSNAEPHTQSAIVVNMDLKDFFPTITGHRVRGLFQSFGYSPAISAILAFICTRPDVSVFELDGQNWYFYEGKDVLPQGSPASPMISNLICRKLDRRLEGLAQSTGFTYTRYADDLTFSSSDPDASVGALLHATRAIVADEQFEVHPSKTRIMRNGSCKEVTGVVVNEYPNISRARLRRFRALLHQLKTKGLENAHWEETTGPALLNKALGFAAHIKSVSQPKGAEIFEETLEIINDLKGQ

SEQ ID NO: 6272 - protein, 462 aa, unidentified
  source 1..462: note = Related to MLAY01000020.1; note = marine bacterium AO1-C
MADTNQTTNWRQELKQVGKQYFEIQEMIRMGFLKMPPEELELLKQKYTELNKVNAQLRKLSKELEGFQDITPLIKEIRKNRIERVRAARAIKKAEKAQKEKARKAEIAQRKKDTPYYLGEGVSAGLKFEGTEEAKLQEAGLPIVHNVKDLAEQMNMPQSDILWLSYHRKAASIDHYSRFQIPKRKGGFRTIASPKPKMRVAQQWILDNVLSKVPTHEAAMAFQAGKSIADNANLHLNAEILIRIDLKDFFPSIKFGRVKGLFKSFGYNEGIATVLGLICTDALRLSAKLENKQYFVALGDRYLPQGACTSPTITNLICRKMDNRLSKLSDTLSWKYTRYADDMVFSTPQKEAELKHVLGLSKKIIGEENFEIHPDKTMVMRGHQRQTVTGVVVNNDEIRISRRDIRNFRAFLHQYEQNGAEAMTKKLGKDATAYGRGYLAFVHMINPGQAAKFVEKYGWLKK

SEQ ID NO: 6273 - protein, 462 aa, Microscilla marina
  source 1..462: note = Related to NZ_AAWS01000028.1
MANQTTTNWRAELRSVGKQYFEIQEMIRMGFLKLDPAELDMLKQRYTELNKVNKELNKLSKELEGLEDITPLIKEIRKNRIERVKAARAIRKVEKAQKEKERKAEIAQRKKDTPYYLGDGVSAGLKFEGGNEAQLKEAGLPVVNNVRDLSELMAMPQSDILWLSYHRKAASMDHYSRFQIPKRKGGFRSIASPKPKTRKAQQWILENILSKIDCHEAAMAFRPGKSIADNAHFHLQAEVLIRIDLKDFFPSLKFGRVKGLFKSFGYNEGVASVLALMCTDALRLSAKLEGKQYFVALGERYLPQGACTSPAITNLICRKLDNRLSKLGDKLDWKYTRYADDMVFSSSNKETDLKHILGLSKKIIGEENFVIHPDKTMVMRGHQRQTVTGVVVNNDEIRISRRDMRNFRAFLHQYEQKGAAEMTKQLGKDATAYGKGYLAFVQMINPAQAEKFKAKHGWLSQA

SEQ ID NO: 6274 - protein, 461 aa, unidentified
  source 1..461: note = Related to REBB01000084.1; note = Cytophagales bacterium
MANYDKIQELRQEIQTLGKEYYIMQEMLRTGFLKMSEVDLVRMKANLNELSKINQELSVLSKELKDIPDITPIIAEIRKNRIEKVKSERLIRRIEKEKLIIQRKEKLKEKKKNTPHYLGEIARGLEFKASDEEKLKQKNIPSLPDLQALADLSGLTREQLLWLSYHRKTAKIDHYTRFQIPKRSGGMRTIASPKSKLRVIQHWILENILQKLSIHEAAKAFAQGASVVKNAVPHLNAYVVIKVDVKDFFPSIKFNRVVGFFKSLGYSRGMSSVLGLLCTDAMRLNAEFEGEKFFVAIGERYLPQGASTSPMLTNLICKKLDARLSKLAEKYGFQYTRYADDMTFSHPEKEANVKAILGWTKKILAEESFELKKEKTSVMKKHQRQTVTGVLVNHQETKISRTDIRKFRAFLHQYTLIGAEKMSEKLGKDATSYGKGYFSYLKMVNETQAEKFKKEYAWLAS

SEQ ID NO: 6275 - protein, 460 aa, unidentified
  source 1..460: note = Related to RDXZ01000042.1; note = Bacteroidetes bacterium
MTNYDKMQEIRQEVAMLGKEYYIMREMLRTGFLKMSEADLATMKANLGELTKINQELNELSKELKDIPDITPIIAEIRKNRIEKVKTERLIKRVEKEKLLAQRKERLAQKKKNTPQYLGDIAKGLKFQNQNEEKLKEKNLPLLKDLQDLSTLSQLTREQLQWLSYHRKTAKIDHYTRFQIPKRTGGLRTIASPKPKLRVAQQWILENILAKLSIHEAAMAFNVGASVVKNATPHLNSEVVIKIDVKDFFPSIKFNRVVGFFKSLGYSQGISSILGLLCTDSMRLNVSFEGEKFFVAIGERYLPQGACTSPMLTNLICKKLDARLSKLAEKYGFAYTRYADDMTFSHKQKDANIKAVLGWTKKILAEENFELKKEKTSVMRKYQRQTVTGVLVNHEETKISRKDIKKFRAFLHQYTLIGAEKMSEKLGKDATAYGKGYFSYLKMVNKTQAEKFKQTYSWLG

SEQ ID NO: 6276 - protein, 464 aa, Aureivirga marina
  source 1..464: note = Related to NZ_JADPIB010000005.1
MSEDKNWKERIKEVGKEAFEIEDMIRLGFLQMDKETMAEILDKQKAYNKLSNRFFKINRELDSDIDITPYIKIIREKRIKESREKRALRKIEKAKKEAERKQKIAEKQEKMPSYLGDEISAGLKYEGTNEERLTSTSLPVISDLKELEVKSNITAKHWQWLAFYKKVSNIDHYNRFTIPKKNGDVRKISAPKKRLRVAQEWIQNEILSKIELHEKAYAYRKNISIVDNAKLHQNAKVVVRIDLKDFFPSIKFNRVKGLFKSFGYSEALATIFASVCTDSVMVKAQMSEKVYHVSMGNKFLPQGACTSPALTNIICKKMDKRIENFTKKNGIRYTRYADDLVFSTEDENINLKSFFSWIHRIIKEEGFQINNEKTRVMRPNQRQAVTGIIINEGGDIRISRKDIRKFRAFIHNFKLKGEEEARKQIGKNPNHYLEGYLSFIRMVNKDQFEKMKAYAESKLEMEII

SEQ ID NO: 6277 - protein, 461 aa, unidentified
  source 1..461: note = Related to RDXI01000002.1; note = Bacteroidetes bacterium
MANQNDSENWREELKRLGKEYFIIQEMLRTGFLKLTPEDIALYKTKIKELNDVNGEIYRLSHELRGIEDITPLIEEIRKNRIARVKAERIIKKAERAKTLEEHKRTISEKQKSKPNFLGEKFASKLKFEGGDAGKLQASGLPTLNDLHDLSQATGISRERLQWLCYHRQAATIDHYTRFQIPKRKGGMRSISSPKPQMRLAQSWVLDNILSKLPIHDSAVAFREGKSIVDNANFHAGNALLVRLDLKDFFPSVRFHRIKGLFTSFGYNYGIATVFALLCTDAARIGAKLNDKQYFVALGDRYLPQGACTSPMLTNLICRGLDNRLTKLCASLGWRYTRYADDLVFSHEDEQADLKKLLGLVKKIIKEETFEVNEEKTLVMRPHQRQTVTGIVINDGKLRLSRRDVRNFRAFLHQYTLKGAEAMSQRLGKDATQYAKGYLAFMRMVNPEQADKFVQEYAWLA

SEQ ID NO: 6278 - protein, 461 aa, unidentified
  source 1..461: note = Related to DMHB01000192.1; note = Microscillaceae bacterium
MAQENPDNWRDQLKALGKEYYTLQEMLRLGFLKMSEQDLAFYQAKVADLNKVSTELHSMRKSLEGVKDITPLLKEIRKNRIERVRVARSLRKIAKEQAFAEAKTNRRARQMATPTYLGKGVSKHLKFEGTQAERLALFDLPRVENMAELAEAMQLTPEKLHWLCFHREASKIDHYTRFQIPKRKGGLRSIASPKRTLRVAQQWVLENILRKIAPHSAATAFEPRASIVENAKKHLNQALFIRIDLKDFFPSLKFHRVKGLFQSLGYNAGMATVLGLLCTDSARIGAKLGEDQFFVALGDRYLPQGACTSPTLTNLICRKLDKRLAQFCAKQGWIYTRYADDLMFSHAESQTDLKPMMGLVKKIVAEEGFVINPEKTLVMRPHQRQMVTGLVVNDGELRVSKQDLKRFRAFLHQFDLDGKDKLSERLGKDAEAFGKGYWAFIRMINPTQAEKFTEKYKWLAH

SEQ ID NO: 6279 - protein, 467 aa, Rhodocytophaga sp.
  source 1..467: note = Related to NZ_CP048222.1
MQLTPSTTENWRARLQRLGRDYFVIEEMIRLGFLDLSQQQYKTLQDSYTRLNEINGELQKLNIELKGTEDITPLLKEIRKNRIERVRAKRAIRKVEKARVSQAKKAEIALQKQKTPYHLGEGVSKGLRFDETDTEKLSQAGLPVLHTLEDLAQFSKLEMKQWVWLSYHRRVAGIDHYTRFQIPKKKGGLRNIASPKKTLRIAQQWILENILNKRPIHPNAMAFLPGKNIRHNAEKHTGKHTVVRVDLKDFFPSVKFPRVKGLFKSWGYSEGIATVLALVCTDATRIGASLDGKAYFVALGERFLPQGACTSPAITNILCGDTGYLDHRLTRLGEKLDWTYTRYADDLVFSTNITEDNLKSLLGLMNKIIKDEGFEINQEKTSVMRQHQRQTVTGAVVNGTEPRVSREDIRRFRAFLHQMEKNGSAAMSQKLGKDAERYAQGYWAFIHMVQPTQAEKFLNQYSWLKKK

SEQ ID NO: 6280 - protein, 467 aa, unidentified
  source 1..467: note = Related to JACVSL010000462.1; note = Cytophagales bacterium
MQLPATPTESWQSRLKHLGREYFIVEEMIRLGFLEITPEQYQLLVDGYARLNAINGELQRLGQELKGTEDITPLLKEIRKNRIERVRAKRALRRVEKARARQSRREEVIRRKRQTPFYLGEGVSAGLHFTGTDEAKLAAAGLPVLHTLDDLAQASGLEARQWIWLSYHRRVARIDHYTRFEIPKKKGGTRPIAAPKRTLRQAQQWILEHLLNGRTIHPNAMAFLPGKNIRHNAEKHTGKAVVVRVDLKDFFPSVKYPRIKGLFRHFGYNEGIATVLALVCTDALRVAARLDGQDYFVALSERFLPQGACTSPALTNILCGDVGYLDHRLTCLADKGNWQYSRYADDLVFSTTDPAADLKSLLGPVRKIVADEGFVVNPEKTRVMRPHQRQAVTGVLVNEARPRVGRQELRRFRAFLHQMGQIGVPAMSVKLGKDARRYAQGYWAFVKMVEPDQASSLLGKHPWLRAQ

SEQ ID NO: 6281 - protein, 470 aa, Rhizobacter sp.
  source 1..470: note = Related to JACMJS010000225.1
METTEQNTSSSKNNAWREKLKNLGKENFIISEMTRLGFLSVAPENLQVLRDGFDRLEVIQKELAAIRKELQGTEDITPLLKEIRQNRIERVRAQRTIKKAERAEAAAAARKKFLAEKQTKPFYLGDGVSKGLKFAASDASKLSDNGLPVLHTLDDVAAASGLDASKWQWLAYHRKAATLDHYTRFQIPKKKGGLRSIASPKATLRKAQAWVLAEILSKRADASSSDASFAFQKGKSIVQNAAKHLNKAVVVRMDLKDFFPSIKFRRVKGLFNKLGYNEGLATVFALVCTDSVRIEAALDGKRYFVALGERFVPQGACTSPALTNMLARDLDMRLMRFSEKYLWTYTRYADDLTFSTDHPTPDLRQLLGVAAKIIRDEGFEINAAKTLVMRSHQRQSVTGVVVNNAEAKVSRRDAKRFRAVLHHIETEGEETVSKKLGKSATAYAKGYIAYLSMINPQQAEKFKAKHKWLA

SEQ ID NO: 6282 - protein, 337 aa, unidentified
  source 1..337: note = Related to JABHVB010000067.1; note = Rhodospirillaceae bacterium
MSDELSLNPHWRKRVQEIGRMNFSREEILRLGFFSDLDDAERQQLKTFLDEAYPRLAELRKELKKVSTTIEEADDLQSLLREVRRARIERVRRERAQRKNKKERQEVERQQAWATKKSKTPPFLGVGVSGRLQFSGEDDKRLLSQGLPVPKDAEELASLMGIKSSELLWLCYERAAASVDHYTRFEIPKQSGGKRLISSPKPKMRSAQRWILDEVLAKLSPSNAATAFRPGASIIKNAEPHLNAAILVRIDFKDFFPSITFPRIRGFFEALGYNPGVSTLLSLISTDAPRVKAVLDEKTNFVAMDERSLPQGACTSPALANLIAWKLDARIGGLCKV

SEQ ID NO: 6283 - protein, 357 aa, unidentified
  source 1..357: note = Related to DTSG01000200.1; note = Planctomycetaceae bacterium
AAWLEKKSKNPPFLGIGVSSRLRFQGGDTKILTANELPTPKDAEELALLLNISTSELFWLSYERAATSLDHYTRFEIPKRSGGKRLISSPKPKLRTAQRWIAENILDKLSPAAQATAFRSGASIIKNAEPHLNAAIVVRIDFRDFFPSITYPRVRGYFESLGFNPGVATLLALISTDAPRVKVSFDGKTQYVAMGGRSLPQGACTSPALANLITRKLDARIAGLCQASTDQWTYTRYADDLTFSTQARDANVGRLLGSVQNIVSDEGFRINREKTAVMRAPGRRIVTGLIVEDEIRLSRRDLRRLRAFLHRCDKDGLARVSEEIGKDALAVAHGRLAYVQMVMPEHAGRIRGKYSWL

SEQ ID NO: 6284 - protein, 469 aa, unidentified
  source 1..469: note = Related to JAIBBE010000228.1; note = Fimbriimonadaceae bacterium
MASQDLALNPDWKERIAQIGKQNFVREEMLRLGFVSKKLGEEERARIQGFLDQAYPRLKELRKDLAEIRSQIEGINDIESLLKEVRRERIERVKREREERKVRKAEEQERRRQALAEEMRKTPRFLGHGVSAHLSFAGGDAVNLAARGLPQPEDVEQLAELMQLDPSEVLWLSYERAATTVDHYTRFEIPKKSGGRRLISSPKPKMRVAQSWIAENVLDLLSPSRHAMAFRPGTSIVDNASPHLNAAIVVKLDLKDFFPSIGFTRVRGYFEYLGFNPGIATILALICTDAPRVKVTLDGAAKYVAMGERGLPQGACTSPALANLIATPLDSRLAGLCTALESTWTYTRYADDLTFSCLDERADVGRLLKAIERIVGDEGFRINAAKTAVMRAPGRQVVTGLLVGDQIRLSRRDLRCLRAFLHRCDKEGVEAVSRAIGKDALSVARGHLAYVTMVMPGHAADIKRRYAWL

SEQ ID NO: 6285 - protein, 567 aa, unidentified
  source 1..567: note = Related to JAGQTY010000032.1; note = Actinomycetia bacterium
MSESGLPADWRTRLERLGQRNFEIREMLRLGFLSAADPLRPGETNAALLAKIAELEQLQAELDEVDDVVASASRIETLLEEIRRERLASSALRKAERRRAREEQARQKQLAWATQRCERPPYLGAGVSTRLQYTGGDDDALASAGLPEVHTVLELADDMDTTTSEVQWLSYHRSVTTIDHYNRFTTPKRSGGTRTISSPKPRMRQAQTYIKTHILDQLSPASPATGFRTGLSIVSNAEPHVGAAVVIRMDIKDFFPTITFPRVRGYYESLGYNPGIATVLALLCTDSPRTAFRFEGDRYYAASGPRALPQGACTSPSLANLVARGLDERLIAWAAGRPESWTYTRYADDMVFSSNDANSDVASLIATVHTIVQDEGFSVNERKTAVMRAPHRQMVTGLVVNDVVRISRRQMRRLRAFLHQCEVRGLNAMTESLGTDARCAATGHLAYVNMVNHDQALKLLQRHPWIQREPLSPPGVRSRSRPGRTPSSTQSAVTPVTAGVTRLELADPPDGGKFWEVWVDGATLYRRYGPLGAPGTTSEKAFSTPEAAQSAAEQLIQNKLSGGYRPA

SEQ ID NO: 6286 - protein, 470 aa, unidentified
  source 1..470: note = Related to PBFI01000001.1; note = Gammaproteobacteria bacterium
MSKEVKKLDPNWRDRIEKVGKSTFQRQEMLRLGFWEPKDIPTDELASLQNKLNETVNLLGEKRTQLGEVNKKIKEAQDVKKLLAEIRKRRIQKSLKEREIRKAETKERKQDKTTQDRQRRKVTPPYLGEGVSGRLTFLEGEQEKLKELDLPLLNNLTDLSKLLLIDEGKIAWLAYHRVATNCDHYHRFLIPKRTGAPRLIASPKPELREAQGWVKREILSKLEPELEAKAFKKETNIKDNAQIHSGKGLVIRVDLSDFFFSITFPRVRGFFISLGYNPGISTVLALLCTESDRTKVTYKNEDWFIAQGDRRLPQGACTSPALSNLIARRLDRRIRNYLASMDEEWSYTRYADDLAISHSKSDAEVKKVLKALQKIDPDEGFSINEKKTAIMRSPHRQMITGLILNDQEPRIPRPYLKKVRAMVHQADQLYKRGAIPENLYEIKGKLSFIKMIMPQHVEKIVNKYSWLNPS

SEQ ID NO: 6287 - protein, 473 aa, unidentified
  source 1..473: note = Related to VGQQ01000059.1; note = Cyanobacteria bacterium K_DeepCast_35m_m1_288
MANTDGVLDPRWRKRIDEVGKNAFEIEEMVRLGFLDADELEKRLNANGQSFKAYQSALADLAEASAALSATSREIEALGTVEAALAAIRSRRIARVKEVREERRVRKQAERQQREEAIRRQRREVPTFLGRGVSNRLNYSGGNDDMISQLGLPRLNSFTDIASALSLEPQQLQWLVYERGDSRVDHYIRFTIPKRSGGSRLISRPRPSLQQAQQWMHDSILRRQPLHPAAMAFRPGVSIVDNARLHVGARIVVRLDLKEFFPTITFARVRGLFESFGYNPGVATVLALLCTDSPRVMVRLDERSHVVPVGERALPQGACTSPTLANLVSRSLDRRIQGYASKAGWTYSRYADDLVFSTNQETASPHSLIRGICAVITDEGFVVNGEKTRVMRAPNRQTVTGLLVNRDVGLTRRDQRRIRAFLHKCTCQGLEVVSAEIGKDAESVARGYLAYVQMISAETAQKLRSRCAWLDQI

SEQ ID NO: 6288 - protein, 472 aa, unidentified
  source 1..472: note = Related to JABMNF010000410.1
MANPDGVLDPRWRKRIKEVGKNAFEIEEMVRLGFLETDDLQKYLSSNGLSFKSYQSALAELTEATAELTATSLEIESLGTVEAALAAIRSRRIARVKEERNERRARKEAERLVREEAIRRQRREEPTFLGRGVSNRLHYNGGNDDMLNQLGLPQLHSFSDIASALCLEPQQLQWLVYERGDSHVDHYIRFTIPKRSGGSRLISRPRPSLQQAQQWVQSTILHNQPLHPAAMAFRRGVSIVDNARLHSGKKIVVRLDLKDFFPSITFARVRGLFESFGYNPGVSTVLSLLCTDSPRVLLSLDNQSHVVPVGERALPQGACTSPALANLVSRSLDRRIQGYANKAGWVYTRYADDLVLSTIQETDSPHRLIRGISAVTRDEGFVVNEEKTRVMRAPNRQTVTGLLVNHDVGLTRKDLRRVRAFLHRCSSQGLEVVSAEIGKDAESVARGHLAYVQMISAASFEKLISKHAWLQH

SEQ ID NO: 6289 - protein, 482 aa, Prochlorococcus marinus
  source 1..482: note = Related to CP000111.1
MSEQDADQSNSLNNQWKKRLQEIGQGAFEFEEMLRLGFIDLDTIKRFDKEMTIEESKEVFEQLTKTSAILSEVDKEINSINRIEELLAEIRSRRIKRVKEAAKEKKIKKQEEKIKRSKEIKERKINSPTFLGRGVSNRLSFEKVKKVDFKSNKIPELNSFVDVANALEVTPSKLQWLIYERGASNIDHYLRYEIPKKSGGKRLISSPKKDMKKAQKWILENILINLDVDKAAMAFQKGLSIIDNASLHVKSKIIVRIDIKDFFPTITFPRVRGFFESLGYNPGVATVFALICTDSPKVILKQEAIDGDKNNKDYPHFIAISERSLPQGACTSPSLANLICRKIDSRLNGYSSKSGWKYSRYADDLIFSTTSEDSYPHRLIKSISSIISEEGFKVNQSKTRLMRAPNRQTVTGLVVNNEVTLSRRDLKRMRAFFHQCSSKGLDFMSEKIGKDALSVARGYISYVEMVSPTIAEKFLSTNSWIK

SEQ ID NO: 6290 - protein, 472 aa, Prochlorococcus marinus
  source 1..472: note = Related to AE017126.1
MSKEERSINQNWRKRLDEIGQAAYEFEEMSRLGFLSNKKIAKMIEASGISLEEYEQAKSKLSDISNFIRATNEEIESIDSVEVALEKIRSERIKRVKQKNEDRKQKKESQRKERSKLAYEQRIKSPTFLGRDVSNRLNFTGGNTEKLELNGLPVITTFAELSSTLETTPNSLQWLTYERDSQKIDHYTRFEIPKKSGGSRLISSPKPALRNAQKWILESILNKLDIHSAATAFRPGKSILDNAKLHANSKVVLRLDLKDFFPSITFIRIRGLFESLGYNPGISTVFSLLCTDSPRIILKYHGETHFVKVGPRNLPQGACTSPALANLIAHKLDRRLQKYTEKIGWIYSRYADDLVFSSNAEEMPAYRLVKAASKIVASEGFRINKHKTNIMRHPHRQTVTGLVVNKDVRISRNDLRKFRAFLHHCETKGLEFVSKDIGKNAIAVARGYLSYINMVSPELATTLSSKHLWISK

SEQ ID NO: 6291 - protein, 475 aa, Abditibacterium utsteinense
  source 1..475: note = Related to NZ_NIGF01000009.1
MSEETTEIPADWRARIKEQGKEAFQLDELRRLGFWPPSAGLQEQVARAEEEVKRLDREMAPLRAQLRKIEGDISRAADVQSALDEIRKARIGRVKAAREAKKIARAMEKIDRETLWKEKRASDPQFLGRGVSVGLQFEGGDLEKLTKNEVPQLQTTAEIALAIGIETRELTWLCYHRGASTIDHYHRFQIPKKRGGMRNVSAPKTKLRRAQRFVLEQILANLPVHEAAMAFCTGVSTLDNARKHAGKRIVARLDLKDFFPSIDFSRVKRFFQSLGYNEGCATIFALLCTEAPRAQISLDGQRRYVAIGERRLPQGACTSPALSNLLCRRLDARLSGLAGKRGFKYTRYADDLVFSSDEARPDIGALLVLSQKIVEDEKFVVNSEKTLVMKTQNRQSVTGLVVNAQSRATPRVSRDDLRRFRAFLHGFETLGREAMTEKLGQDALFYARGYLAYIAMSDPLRAGKLRVMHPFLARD

SEQ ID NO: 6292 - protein, 487 aa, unidentified
  source 1..487: note = Related to AP024152.1; note = Abditibacteriota bacterium
MANKNSTPEPEPEVAPKDWRARMRAQGKEAFQLEEMRRLGFWPPAEGVEAQIEVAEREVARIDRELAPLRVELAAVETEITRLGDVQSAIDDVRKNRIARVKRERGERRARQELEKARRIEAAKVRAKNELPFLGHRVSSGLAKTESDVQKLALLDLPLFHSALDVADAMGMSAPHLAFLTFHRGAATVDHYHRFQIPKRRGGMRNVSAPKTKLRAAQNFVLEQVLTKVPVHEAVAAFAPGTSTVQNAARHMGAQVVVRLDLKDFFPSIDFARVRNAFSSLGYSGAVSTVLSLLCTESPRVQMSLDGETRHVAIGERVLPQGACTSPALSNWICRRLDARLSGLAKRFGWTYSRYADDLIFSSSELTPDIKTLISCARSIIRDEKLVVNDEKTRIMRPNARQCVTGLVINAQDANAPRPARTDQRRFRAFLHAYETHGRDEMTQKMGRDALAHARGMISYLHMSQPGKASALIEKHPWLALESETAS

SEQ ID NO: 6293 - protein, 301 aa, unidentified
  source 1..301: note = Related to SDZA01000028.1; note = unidentified bacterium
SYHRGASFVDHYHRFQIPKKRGGLRNVSAPKTKLRRAQNWVLANILTPLPVHEAAVAFRPGISTAQNAARHAGKEVVVRLDLKDFFPSISFTRVKRLFQSFGYNEGCATVFALLCTEAPRVELALDGQKRHVAVGDRVLPQGACTSPAITNLLCRRLDARLTGVAAKEGFTYSRYADDLIFSSDTKRADVGWIFTFAQRIVTDEKFVVNAEKTMVMKPQNRQSVTGLVVNSQDGLGPRVSRDDLRKFRAFLHGYEIKGREAMTEKIGQDALHYAKGYLAYINMSDPAKAAKLRAAHSFLGS

SEQ ID NO: 6294 - protein, 509 aa, unidentified
  source 1..509: note = Related to JAFAZH010000051.1; note = Abitibacteriaceae bacterium
MAAETPPSVPENDLFPKDWRQQVKLYGGRKGFIRKELKRLGFWPPAPGSKYKHVTASEEAELEQLYNQLIELRAPLLEQLDAVDARIRDAKKQLGNIGNEAILAKKIETLIAEIRLKRIERVRQERAARKAQRAEAAAAKAQKDKAWRAATLPHLGRAVSAGLSYAGGDEDKLGAQGLPNLSSAGEVAAAMGITTAQLAWLTYHRGAAALDHYQHFTIPKKSGGRRAISSPKAKLREAQSWLLENVLEKIAVHEAAMAFRPALNIAHNAARHAGASVIVRLDLKDFFPSITFKRVKRMFQRLGFNEGVATLFALLATEAPRVQLTLDGQQHFVAVTERFLPQGACTSPAITNILCRSLDARLSGAACKLGFTYTRYADDLVFSARGDKLKGIAMRELATKIIADEKFVVNEAKTAVLRPHSRQTVTGLVVNAQSTGEGTGTPRVSRRDIRNFRAFLHQYELRGREAMTEQRGQDALSYARGYLSFVHMVSPAQAAALQQKHPWLERYTL

SEQ ID NO: 6295 - protein, 472 aa, unidentified
  source 1..472: note = Related to JACMJB010000482.1; note = Cytophagales bacterium
MNAEQRTRFKELGKSAFIREEMTRLGYWPPSSEIANQSALAESKLKPLYEELIRVRKEFDTVSAEIAVSGDIPTLLAEVRKRRIERVRAERAVKKAEREQARSEAKTADAAWRRKTLPYLGVGVSGGLAYSDGDSAKISERALPSLTTAAQVAAAIGIGENELAFLCYERAVSGVDHYARFAIPKKKGGVRVLSSPKRRLRVAQSWLLKNVLEPLPVHSAAMAFRPGKSVVDNAAPHAGQAIVVKTDLKDFFPSLGLRRIKGLFEGLGYNEGVATLFALLATETPRIAVMFDGKRRFVAVSKQRGLPQGACTSPALTNLLCRNFDARLAGAAAAFGFRYTRYADDLTFSHASDKAPVGVLLALIRKIVADENLTVNEEKTQVLRLSDRQSITGLVVNGSETPRVSREDLRRFRAILHQCERDGFEAVTARLGKDAQAYAGGYLSFVHMARPDIAGKIAAAHPWLAKWRQANI

SEQ ID NO: 6296 - protein, 451 aa, Armatimonas rosea
  source 1..451: note = Related to NZ_JACHGW010000004.1
MTAAERQRLKEIGKDAFIREEMVRLGFWPPSPEIAEQSAEAERKLRPLYDELVGVRRELDGVEKAIRESGDVPALLAEIRRKRIERVRAARVVKKVEREAARVKKQEQDALWRRTALPHLGRGVSGGLTFVEGEIEKLCAAMGLTERELAWLCYQRPASKTGHYSLFTIPKKRGGKRVLASPKSKLRQAQRWILSEILANQAPHAAAMAFSPGASVVKNAEPHTGKSVVVKVDLQDFFPSLGVKRVKNYFEHLGHSEGVATVLALLCTDCPRVAVEFDGEKKFVAVGPRGVPQGALTSPALSNLLVEKLDKRLTGAAQKLGFVYTRYADDLTFSHADGSAPVGLLLTLVRQIVADEKLTVNEKKTQVLRSSDRQIITGLVVNGEQGVRLSRDDVRRFRAILHHCDTEGFDKVSERLGRSAQAYCQGYLAFIKMVRPELADKLVTAHSWLVR

SEQ ID NO: 6297 - protein, 471 aa, Capsulimonas corticalis
  source 1..471: note = Related to NZ_BHFQ01000005.1
MNSEQRKQLAAIGKSAFVREEMVRLGFWPPSPEVAELAAGAEKELRVYYDEMIALRTELNGVEAKIAEAGNIPALLAEVRRKRIERVRAERIARRERRAQEKIESHAKDTEWRKRALPYLGHGVSDALVYKGGDPEKTATLGLPALTTASDVAAAIGISESDLAWLTYHRGAATIDHYSRFTIPKKRGGVRVISSPKRRLRTAQSWVLESVLSPVPVHDAAMAFRPARSVADNARRHQGQAVVIRIDLKDFFPSITLPRVRTLFRSLGYNGGVATLLALLTTEAPRVAATLDGARRFVAVGGRSLPQGACTSPAVTNLLCRKLDARLTGAAEAMGFVYTRYADDLVFSHAKPDAPVGMLLDLTRRIIADEGLTVNEEKTSVQRGQHRQTVTGLVVNGGAPRLSRENLRRFRAMLHQCERDGLPAVSERLGQNAQAYAAGYVAFIHMVDPEKARQIVAAHPWIARWKRAGGA

SEQ ID NO: 6298 - protein, 441 aa, Fibrella sp.
  source 1..441: note = Related to JACMIS010000372.1
PPSPEVAAKSVEAEAILRPMYEELAILRTELTGIEKEIALIGDIPNLLAEVRRKRIERVRAARVVKKAAREKEQGERKASDIAWRRSTLPFLGHGISAGLRYAGGDPAKLTASGLPVLVTAGDLAAGIGIGTRDLAFLTYHRGVAMLDHYSRFTIPKKRGGVRVISSPKRRLRVAQQYVLEKVLALLPVHDAAAAFRPGLSIVDNAAKHAGKPVVIRIDLKDFFPSVPFPRVKRLFESFGYNPGIATLFGLLCTEAPRAAVTLDGSAKRFVAVGERCLPQGACTSPTLTNLLCRRLDARLSGLADAAGFTYTRYADDLVFSHAEAGAAVGALLRAVRQIITETGFVVNEEKTVVLRPHHRQSVTGLVTNTETPRVSRQDLRRFRAFLHQFETKGAEAVTQQIGKDALAYAGGYLSFIHMVSPEQAEKIAAKHPWLSRWKKL

SEQ ID NO: 6299 - protein, 471 aa, unidentified
  source 1..471: note = Related to VGYZ01000107.1; note = Planctomycetes bacterium
MSSISKRDLDQVDEMIARGFYTPSGDVRRALDALRENQGQIDRIEQELARLRAELADGPSLAELIKQARARRIERVREERARRRALREAEQSERRAAFAARKRRAPLFLGEGVSAGLRFDGGDAARLAERGLPALTDAAALATAIGLPVKPARGMPTFTEGADQLAWLCYHRRVVDHDHYSRFRIPKRSGGYRQLASPKPLLRKAQQWVLDHLTSRLEPHARIATAWRKGRSVVDNARPHVGKAVVIRVDIQDFFPSISWRRVRRVFMDLGYSEGVGTMLALLTTDTDRVAVRLDGELRFVARGKRGLPQGACTSPSLANFVALRLDKRVDGLCRSLGFDYTRYADDLTFSHAQPRANVAVLLQQVYAILRDEGFEPNERKTAVMRAGGRQMVTGLMVQDAIRVSRRDVRRFRAIAHQCKLHGFETISQRLEKDARSYLDGFLAWVRMANEEQAQKLEMWLESLGLPRRDM

SEQ ID NO: 6300 - protein, 526 aa, unidentified
  source 1..526: note = Related to RFQH01000103.1; note = unidentified bacterium
MHLRHVSARRHDPRALHPHRGGDHVHAVAGTRRRGTRGGTCRAGRGPGIRAMSGDITSLRARVAKVGRGQAVYEEMIRSGWWTVRPEDTQLLAEASKRVTDILVALDPLVLERQRIDEELLTLANIDVKAVLEEIRAERIAESRARRAAAKEERRRRREAAAAAHAARVRKTPLHLGHGVSSRLAFTEAPNPELDRAGLPRVCNAEELAAAIGIDAGRLQWLCYHRQVSAVDHYNRFTIPKRSGGSRPIAAPKKSLRVAQRWVFEHIVEKLVPNMAVTMAFRPGVSIVDNARLHAGRAVVMRIDIRNFFPSVTFPRVRGLFESIGYSPGVATLLGLVCTEAPRRVADLHGRRYAVATGPRGLPQGACTSPGLANFACRRLDARIRGYARKLGFRYTRYADDLVFSHEDADAPVDGMRRAVYRILRAEGFEPNEAKTCVMRRHQLQVVTGIAVNTVPRVSREAVRRFRAIAHQCRTRGVEAVTADIGRDALAYLNGYLSFVRMVNPAQADRLAALVPESGSEKGPQA

SEQ ID NO: 6301 - protein, 483 aa, unidentified
  source 1..483: note = Related to AP024152.1; note = Abditibacteriota bacterium
MSNWQDEIKRLGKREFELREMERLGFWPPATVGDVPQTFDDMRAKIAPINHELRDIAEQTRPLRLRQSEVERELAQTGDIEARLTLIRQQRIERVKIARAERKERRAREREERLATDKVRRRELLPHLGRGVSSRLHFCIPSDAEKLARFQLPVWNEPADLANSLGISREQLAWLCYHREVAPIDHYSHFSIPKRSGGTRAISAPRPYLKAAQAQILTGVLNQVEVHEAAAAFLPGRNIANNAQKHAHCAEGGPSVVLRVDLKDFFPSITFARVAGVFASLGYNAGISTLLALICTESPRIEATFDGQKSFVALGDRFVPQGAPTSPALTNLLCRRLDARLTGLAKHYNFTYTRYADDLVFSSPRSDARVISLQRGIFKILDSEQFTVNPDKVAIMRRGSRQSVTGLVVNSDLGPRLSRRDLRRFRAILHDIETDGADTVSEKMGKSALHYARGYLAFVHMVNPETATKLRLKHTWLNTNGPV

SEQ ID NO: 6302 - protein, 481 aa, unidentified
  source 1..481: note = Related to SDZD01000020.1; note = unidentified bacterium
MSNWRDEIKKLGKREFERREMERLGFWPPASSGDEAQTVEALRAKIAPLNDELREITEKTRPLRLRQTEVERELAATGDIEAQLAEIRKQRIERVKAARVERKERRAREREARLAADGERRHALLPHLGRGVSRRLHFDVASDNEKLARFQLPAWNEPADLAAFLEITREQLAWLCYHREVAPLDHYSHFSIPKRSGGTRAISAPRPYLKTAQAKILEGVLKQVEVHQAAAAFLPGLNIGDNAHKHTHTEAGGPAVVMRIDLKDFFPSINFNRVAGVFVSLGYNAGISTLLALICTESPRIEATFDGQKSFVALGERFVPQGAPTSPALTNLLCRRLDSRLSGMAKHYGFTYTRYADDLVFSSPHSDARVISLQRGVFKILEAEQFIVNPDKVAIMRRGARQSVTGLVVNNNLGPRISRRDLKRFRAILHDIETNGAESVSQKMGKSALHYARGYLAFIHMVNPETATKFRTKHTWLAASE

SEQ ID NO: 6303 - protein, 489 aa, Desmospora activa
  source 1..489: note = Related to NZ_PZZP01000001.1
MAEEDIKQEAGPLTREEWIAKVRSQGRDNTIREEMIRLGFWSNDELSSEEQRQQATEDEEYQQLLKELNKLKAESAKLSNLNELLKIARKKRIEESKRKRAERKARREREQAEAAQRWQAHKQTHVIHAGRGVSGGLQSTVYDEAKLIENNLPLIRSSLELAEAMEIPVGRLKWLTYHRKTATLNHYQRFTIPKKSGGRREISAPKKSLRAAQQWVKTHILDALTVHPAARGFVSGKSTLDHAEPHLQQAAVVKMDLKDFFPTIRFRRVKGFFHYLGYSEAVSTIFALLCTEPPRKEIQFNGTRYYVAMDERQLPQGACTSPALSNLICRRLDQRLRGLAEKHGFHYTRYADDLAFSCGEDGLNEIGAIINTSRDIIRFEGFAVNEEKTRILRASNRQNITGIVVNQKPNIRRKDLRAFRALLYSVEKNGLEQENRHNHPHFWDYIKGYASYIRMVRPDLEEKLAPRLLRISQKHGLHAPDWCKQVAAK

SEQ ID NO: 6304 - protein, 488 aa, Melghirimyces algeriensis
  source 1..488: note = Related to NZ_FXTI01000004.1
MAEEETRPLTREEWRKRVQSEGRMETIRKEMIRLGFWNDAQLSPEEKQQQALEDEEYERLQKELNKLKMESAKLSNLKQLLKEARKKRIEESKRKRAERKAQREKEKAEAKKRWQEYKETHVIHAGEGVSGGLQNTEYEEAKLRKNGLPVIGSALQLAEEMNIPLQRLKWLTYHRNTATLCHYHRFTIPKRSGGKREISAPKRSLRQAQEWVKHQLLDRLPIHPAACGFVPGKSTLVNARQHLGQSVVVKMDLKDFFPSITFRRVKGLFQSSFGYSESVSTLLALLCTEPPRKEVEFDGTYYYVAMGDRQLPQGACTSPTLTNILCRRLDRRLQGLASKFGFQYSRYADDLTFSCSKHDAEKLGGLINGARSIIQSEGFKTNEKKTRILRDTNRQTVTGIVVNQKPNIRRKELRRFRALLHRVEINGLNEENRDNHPNFWEYISGTAGYIRMVRPDLEARLASSLIGIGEKYNLHIPPWCKQATVADR

SEQ ID NO: 6305 - protein, 486 aa, unidentified
  source 1..486: note = Related to nan
MAEGENRPLTREEWIARVREEGREETIRSEMIRLGFWSNDSLPEEERRQQALEDEEYRRLRQKLAELQRESAKLENIDQLLKEARRKRIEESKKKRAERKERRERERAEAKKRWESYRQHHIVHAGVGVSGGLQETEWDEEKLRQHQLPLIRTAEELAEAMGITLSRLKWLTYHRQTATVCHYYRFTIPKKSGGRREISSPKKALREAQSWIKEQILDRIPPHPAACGFVPGKSTLDHARQHLRQHVVVKMDLKDFFPSITFYRVKGLFQSFGYSELISTLLALLCTEPPRKEVTFDGKVYHVAIGERQLPQGACTSPAITNLICRSLDRRLEGLAKAKGFRYSRYADDLAFSGGIDGEQQIGSLLNMARRIIRDERFEVQEEKTRVMRSSNRQKITGIVVNEKLNLRRRELRAFRALLHSVEKNGLAQENRHHHPDFWGYIKGMANYIRMVRPDWEARLAKQLVRIGKKHELPVPKWCQQAVVKG

SEQ ID NO: 6306 - protein, 487 aa, Thermoflavimicrobium daqui
  source 1..487: note = Related to QJKK01000010.1
MGGEAMAEEQNHPLTREEWLERLQQEGRTEVIKKEMIRLGFWSEEPLTPEEEEQLAIENRERQQLEKELQRLKEESEKLPNIQEKINEVRKKRIEESKRKRAERKAQRELARQEAKKRWEEHQATHIVHVGEGYSAGLTSIHYDEEKLITHQLPLIRSAMELAEAMEMPLSRLKWLTYHRDTATLCHYARFTIPKKSGGVREISAPKKELRQAQAWVKEHLLDPIPVHSAAYGFVQGRSTVDNAKQHLQQAVVIKMDLKDFFPTIDFYRVRGVFQSFGYSEAISTLFGLLCTEPPRSEVEFDGRYYYVAMGKRQLPQGACTSPALTNIICRRLDQRLSRLADTHGFYYTRYADDLTFSCKEASMSRIGLLLKKIRDIVSSEGFMINEAKTRILRASRRQRVTGIVVNEKPNLSRKELKAFRALLHNVEKNGLEKENRSNHPHFWEYIKGYVNYIRMVRPDLGEKFTQQLVRIAGKYRLNLSLPVNNL

SEQ ID NO: 6307 - protein, 481 aa, Thermoflavimicrobium dichotomicum
  source 1..481: note = Related to NZ_FORR01000019.1
MSEEQFQPMTREEWIERIKKEGREEVIKKEMIRLGFWKEEPVDPATAEQIAKEQEERKQLVEELNQLKKESEKLPNIKEKLKEAREKRIEESKRKRAERKAEREKERQEAKKRWEEYKATHVIHVGDSFSAGLQNFDHDEEKLIRLGLPLIRSAMEMAEVMHLPLSRLKWLTYHRNTATLCHYARFTIPKKNGGVREISAPKKELRQAQAWVKERILDRIPVHQAAYGFVPGRSTVDHAKQHLKQAAVIKMDLKDFFPTINFWRVKGVFRSFGYSEAISTLFALLCTEPPRTEVEFDGKYYYIAMGERQLPQGACTSPALTNIICRRLDHRLSRLAETLGFTYTRYADDLAFSCDESALCRIGALMTKARDIIDSEGFMVNEEKTRVLRSSQRQKVTGIVVNEKPNISRKELKKFRALLHNVERNGLEKENRQNHPRFWEYIQGYVSYIRMVRPDLGEKFSEQLVRIARKYQLRLSAPVSK

SEQ ID NO: 6308 - protein, 473 aa, Seinonella peptonophila
  source 1..473: note = Related to NZ_FQVL01000006.1
MSEETQPLTKEEWRERIQREGKEETIKQEMIRLGFWTDKPLTPEEMASVEADDQAEAALKSELNKLRSESRKWSDTDQLIKKARQKRIEESKQRRAERKKARAIERKQQEERWAEYRQNHLVHLGNGVSGGLEQSTTNQERLKQLDLPLIETPQQLASEMGITLGRLKWLTYHRDLATLSHYYPFTIPKKNGGIREISAPKKELRAAQAWVKQSLLDQLSTHPAAYGFVQGRNTVDHAKQHLNQAIVVKMDLADFFPTITFYRVRGLFASFGYSQQMSTVFALLCTEPPRKRVRFDGTYYYVAMGERQLPQGASTSPAITNLICQRLDQRLSGLAEKENFIYSRYADDLTFSTSDQQDRRVGALLQTVRQIIHFEGFQPNEAKTRILRKSRRQRVTGIVVNEKANLSRQDQRRFRAILHNVGKNGFDIENRDHHDDFLAYLQGYISYAHMVRPDLAETWQNQLDRAIAAHLKD

SEQ ID NO: 6309 - protein, 487 aa, Desmospora activa
  source 1..487: note = Related to NZ_PZZP01000001.1
MSEEQSQETQQLTREEWIQRIREETKGEVIKKEMIRLGFWSEEPLPPEEKEQQEQEDREFARLQKELQALQQESEKLEDTDTLIREARKKRIEESKRKRAERKAEREQRLAEAKKRWEEYQANHVVHAGIGVSAGLQNHTMNGYQLEQLGLPILTSPAIMAAEMGIELSRLKWLTYHRDTAALSHYHRFTIPKKSGGRRIISAPKPELRHAQEWVKTYIVDRVPVHEAAYGFIPKRSTVDNAQHHLQRAAVIKMDLKDFFPSITFQRVKGLFQSFGYSEAVSTLLALLTTEPPREKVSFDGKFYYVAVGKRQLPQGACTSPGITNLICRRLDARLTELAEKMGFTYTRYADDLTFSCDQDGLEQLGVLLRGVRDIVRFEGLQVNEKKTRVLRASRRQRVTGIVVNDKPSLPRQELRTFRALLHNVEKNGLEAENRENRPHFWEYIQGYVSYVRMVRPDLGEQFGEQLQRIAAKYGLKLNAAREREAK

SEQ ID NO: 6310 - protein, 480 aa, Kroppenstedtia pulmonis
  source 1..480: note = Related to NZ_CP048104.1
MAEEEKQPLTREEWIQRIQEESRDEVIKKEMIRLGFWIEKPLDPEDEKQQAQENEEYARLQKELNQLKQESAKLSNVDALIREARKKRIEESKRKRAERKAQRERERSEAKKRWETYRSQNIIHAGIGVSGGLQYHESDEEKLKSLQLPLLSSPAVLADEMGMDLSRLRWLTYHRDNATLCHYHRFTIPKKGGGERLISAPKQELRKAQNWVKEHILDRIPLHDAAYGFVPGRSTVDNASCHLGQEAVIKMDLQDFFPSITFRRVKGVFGSFGYSEAISTLLALLTTEPPREEVMFDGKYYYVAIGERQLPQGACTSPGITNIICRRLDQKLEELARGLNFYYTRYADDLTFSCGKESTQHIGILLRGVREQVRFEGLRVNEGKTRILRSSRRQRVTGIVVNEKPNLTRKELRRFRALLHNVEANGLEAENRDDHPRFWSFIQGYVSYIQMVRPDVAAKMSDQLNRIAEKHGLHRTIRTS

SEQ ID NO: 6311 - protein, 486 aa, Paenactinomyces guangxiensis
  source 1..486: note = Related to NZ_JAECVR010000023.1
MAEENQQETQPLSREEWIERVMQEGKDEVIRQEMIRMGFWSEKPIPPEEKAKQEQEDEEYALLTEELNRLKQESEKLGDIESMIRERRKQRIEESKRKRAERKAERERLRAEARKRWEEYKSKNVIHVGAGFSKDLQSFDMDEEKLRLNKLPVIRTAEELAGKMGISLSELKWLTYHRDTATICHYHRFTIPKKSGGMREISAPKPKLRRAQEWVKTHILGGSEVHPSAYGFIPGRSTVDNAKCHLKRAAVIKMDLKDFFPSITFWRVKGLFQSFGYSAAISTLLALLCTEPPRKQVQFDGKFYYVAIGERQLPQGACTSPGITNLLCRRLDLRLTGLGEANGFTYSRYADDLTFSCDEEGLPQMGGVINTARHIIRFEGFRVNEEKTRVLRSSRRQKVTGIVLNEKVNISRKELRAFRALLHNVEKTGPEKQNIYHHPDFWGYIKGYASYIRMVRPDLNETLEQQLNRINRKYNLEKSAVAEAKG

SEQ ID NO: 6312 - protein, 487 aa, Risungbinella massiliensis
  source 1..487: note = Related to NZ_LN812102.1
MSANNPSEEVQPLSREEWVQKMREEGGKGNLVRKEMIRLGFWTEKTLTVEEYQKKRELDQEYQELSQQLEKFQQENAKLEDVKTLVRQARAKRIKESKERRAKRKAEREEALAQRQRKWQEYRDTHILHVGENVSSHLEDQEYEEEKLISQQLPILRGSLHLAEEMGVSLSRLKWLTYHRKTATISHYHRFTIPKKSGGKREISSPKSELRQAQSWIKQEILDHLKVHSQAYGFVPSKSTVDNALPHVGKQVVVKLDLQDFFPSITFPRVRGLFRSFGYSGEVSTVLALLCTEPPHREIEFQGKKYYISIEERQLPQGACTSPAITNLLCLRLDERLAQLASKRGFTYSRYADDLTFSCSGDSEQQIGKMLGTIRKIVQAEGFQVNEKKTRVLRSSGRQRVTGVVVNEKPSLDRKRLRNFRALLHNVEKKGLDAENRENHPNFWQYILGNASYIQMVRPDLKEEISQKLAKIAEKYGQNYSLQSVNK

SEQ ID NO: 6313 - protein, 485 aa, Baia soyae
  source 1..485: note = Related to NZ_SLXV01000034.1
MSNETNYEQHQPLTKEEFQARMKEMGKSQFIREEMLRLGFWTEETLTPEEQAERSQDLSELQIVQKELDELRSEARKLGDIKEQLKIARQKRIEESKRKRDEKKAQMEQASAEAQKQWTKYKKIHIPHVGNRYSIGLEHTGMDKEKLEAWRLPVLQTAKELACAMEIELNRLQWLTYHRDTATLCHYHRFSIPKKSGGTREISAPKPELRQAQQWVKEHILDLLPIHPTAYGFVKGKSTVDNARVHIQKRIVVKMDLQDFFPTITFWRVRGLFEWMGYSRQISTLLALLTTEPPHQQVKYDGKYYYIAIGERQLPQGACTSPAITNLITWGMDQQLHAWTEKMGYAYSRYADDLTFSSETLSSSQQVGVLLKRVRSTVKLHGFQVNEEKTRILRHTRRQRVTGIVVNEKPNLTRRRLRQFRALLHDVELHGLEAANRQNHPNLWAYINGYISYMAMVRPDLSHKYNEQASRISQKYGLSYVGIPV

SEQ ID NO: 6314 - protein, 482 aa, Shimazuella sp.
  source 1..482: note = Related to JAKWBN010000001.1
MSEENKVLTREEWINKIRSEGKAETIRSEMIRLGFWEAPNLSEEEREQQAKEDEEYKEVRKELQELQKKSKQLKDIDFLLKEARKRRMEESKKRRAERKAVRKKAQAEAKEKWRKYRQNHVIHVGDGVSAGLASTETNEQKLMQHQLPLIRSALQLAHDMNITLSELKWLTYHRNTATINHYQHFTIPKKSGGKREISAPKSKLRSAQSWIKANILDKLAVHDAAYGFVTGKSTVDNAKHHIGKDAVVKFDLKDFFPSISFVRVRGLFESLGYSRAISTLFALICTEPPRQEVEFNGKMYYVAINERQLPQGACTSPTLTNLLCRRLDEKLTHLAKEKGFTYTRYADDLTFSGNEEALKQIGSLMGSVRSVVDFEGFIINEAKTRVLRNGRRQRVTGIVVNEKPNLTRKDIRSFRALLHNVEHHGLEQENHRNHPHFWEYINGYVSYVQMVRPDIGKKFAIQVQRIADKYGLPIRVYIEKLG

SEQ ID NO: 6315 - protein, 482 aa, Shimazuella kribbensis
  source 1..482: note = Related to NZ_ATZF01000012.1
MSEENKMLTREEWIAKIRSEGKHETIRGEMIRLGFWEAPNLTDEEIEQQAKEDEEYTEVRKELLALQKESKQLKDIDFLLKEARKRRIEESKQRRAERKAQREKSQAEAKEKWKQHRETHVIHVGDGVSAGLASKETNETKLMERQLPLIRSALQLAEEMGITLSELKWLTYHRNTATINHYTRFTIPKKNGGQREISAPKAKLRTAQTWIKETILDNLTVHPAAHGFVTGKSTVDNAKHHIGKDAVVKFDLKDFFPSISFVRVRGLFESLGYSRAISTLFALICTEAPRKEVEFNGKIYYVAMKERQLPQGACTSPTITNLLCRRLDEKLTQLARDKGFTYSRYADDLTLSGNGDTLQQIGSIMNSIRNIVSFEGFVVNEEKTRVLRAGRRQRVTGIVVNEKTNLTRKDIRSFRALLHNVEQKGLEEENHKNHPYFWEYINGYVSYVQMVRPDIGQKFATQVLRIAEKYGLPIRVHAKKLG

SEQ ID NO: 6316 - protein, 485 aa, Hazenella sp.
  source 1..485: note = Related to JACXAG020000009.1
MSEDSKPLTRAEWYERIKQEGKYETIRSDMLRLGFYQEPEVSPQKKEQWKQEDEAYQQLLQELQQVQLEAGKLPKINDLLAEARQKRIAASRQKRVERKAVRLKEKEEQQAHWQQYKADHIIHLGRGVSAGLQQQETDETQLNKLGLPVLTSSKQIATQIGLSLSELKWLTYHRNTATISHYHHFTIPKKNGEKRVISSPKPLLRIAQSWIKEAILDHIDVSPHALGFLPQKNIMDNARPHVKKDLIAKMDLKDFFPTITFWRVRGLFQSFGYSEAISTLLALVCTEPPRKKVSFAGKVYHVALGERQLPQGACTSPSLTNIICRRLDSRMNGLADSLNMTYTRYADDLTFSGTKVKNHHIRTLLSKSRSIITFEGFHINEEKTRILRATQRQKVTGIVVNKKLNISRQELRSFRALLHNVKRSGLVEENRDQHPYFWGYIIGYAGYIRMVRPDLTQRIASELIEIAQKYQQEIPAWVHQTSKSE

SEQ ID NO: 6317 - protein, 484 aa, Hazenella coriacea
  source 1..484: note = Related to NZ_SMAG01000003.1
MTEEQNQEEVKQLTREEWIERIKSEGRTEAIKKEMLRLGFWIEKPLTPEEKREQAEDELKLKQLQAELQELQKESAKISNLNKILKQARAKRIEESKKKRADRKAAIEKREADRKARWQDYKESHIVHVGDGLSAGLQSFETDEKKLMEQRLPLIRSAVQCADEMGITLSQLKWLTYHRDTATINHYYRFTIPKKNGGEREISSPKPLLRQAQAWIKAHILDQIQVHSAAYGFVPQINTVDNAKQHVNQAAVIKMDLKDFFPSITFWRVRGLFHSFGYSEAISTLFACLCTEPPRKEASFNGKIYHVALGERQLPQGACTSPSITNILCRRLDERLTGLAQTNGFIYTRYADDLTFSCQESSLSKIGTLLNSVRNIVKFEGFTVNEEKTRVLRASRRQRVTGIVVNEKPNLTRQDLRRFRALLHNVEKNGLEAENRSNHPNFWAYIQGTTSYIRMVRPELGEKLGEQVERIAIKYHLAGSVVSK

SEQ ID NO: 6318 - protein, 485 aa, Kroppenstedtia guangzhouensis
  source 1..485: note = Related to NZ_BMEX01000001.1
MQGKNDGEVQPLSREEWLERVMQEGRDEVIRREMIRMGFWSEEPLPPEELEKQKQEEKELAQLKEELESLEEKTRKLGDLEAMIRRRRQERIEESRRRRAQRKEERIRRRAEAQAKWKEYREQHVVHVGEGFSGDLELLNSDEERLRESGLPLIHTPQELAEAMEIPLGRLKWLTYHRDTATISHYHHFTIPKKNGGKRILSAPKKHLRQAQEWIRAHLLNRVEVHPCAYGFVRGKSIVDNAAHHVGKAAVIKMDLKDFFPSVHYPRVKGMYQSFGYSPAVSTLLALLCTEPPRRKVEFDGRIYHVAVGDRHLPQGAPTSPAITNILCRRLDERLLGLADSHGFAYTRYADDLTFSCWPSGEKRIGALLGTARGIVRYEGFEVNEEKTRVLRRSRRQAVTGIIVNEKTNLNRGELRAFRALLHQVEQKGLKGQNIHNHPNFWEYIKGYTSYIEMVRGEAAAPYREQVKRIARKYGLDPKVASDHA

SEQ ID NO: 6319 - protein, 484 aa, Laceyella sediminis
  source 1..484: note = Related to PVTZ01000010.1
MSEEKRPLTREEWIQKVSANGREATIREEMIRMGFWSNDSLTEEEKKQQQAEDEERARLAAELQRLQSKGMSMPKVQQLLQEVRQKRIEASRKRREEQKAEREQKRREAKAAWEQHRARHVVYAGEGVSGGLENKETQTEMLRQAGLPIVTTAEELAEAIGISVSKLKWLTYHRNTATLSHYFRFTIPKQNGEEREISAPKQTLRQAQAWIKTHLLDRLPVHSAAQGFVPGKSIVDNAKQHVGQAAVIKMDLRDFFPSIHFYRVRGLFQSFGYSEMISTLLALLCTEPPRRAVTLGGRVYHVAIGERQLPQGACTSPAITNLLCRRLDERLSGLAQKYGFQYSRYADDMTFSCSEAGIGQIGAVINQVRRIVAFEGFTVNEDKTRVLKRTNRQTVTGIVVNEKINVNRREWKQFRALLHNVEKNGLEAENRKGHPHYWDYIKGYANFVRMVRPDLEEKLIRQLRAIAVKHRLSLPGWARKTVQS

SEQ ID NO: 6320 - protein, 489 aa, Staphylospora marina
  source 1..489: note = Related to NZ_CP034118.1
MSDERMEEKRPRTLEEWVEQVRRLGREHAIRTEMIRLGMWEEKELTPEEKAQQQREDAEYQKLAEESMRLQRELTKLGNLQHLLAEARKKRIEESRRRREERKKEIAKREAERKRRWAEHLEMHIVHAGAGVSGGLNAFEHQEEKLMAAGLPLIRSARELAELMDMPISRLRWLTYHRNAATVCHYHRFTVPKRGGGLREISSPKPELRRAQEWIKREILDRFPVHSAATGFLPGKSVLDNAAPHLGQAAVIKLDLKDFFPGITFHRVKGLFRSFGYSEAIATLLALLTTEPPRRPVEFDGKMYHVALGERQLPQGACTSPAITNLLCRKLDARLEGLARKHGFRYSRYADDLTFSCPAERTDAIPVLLGTARAVIRHEGFEVNAEKTRVLRSSTRQQVTGVVVNEKPNISRNELRRFRAILHRVWQNGPEAENRDGHPRFWEFIQGYAAWIRMVRPDLEGKLAVQLARIAEKHRLPVAGWVKETAVRG

SEQ ID NO: 6321 - protein, 464 aa, Tautonia plasticadhaerens
  source 1..464: note = Related to NZ_CP036426.1
MNEDEKARLYREVTRSASESAVLRRMHALGFWPHGEGLPPDPPEEHAERARIEAELADLRRTHARVEDPEAALVEERRRRWEESKARRAEARARRLQEQQVRREEWDRHRSSTMVHAGIGVSAGLQDARSDEEALSRRGLPVLHRAEDLAGQIGIELGALRWLTYHRRSASVVHYHRYEIAKKTGGVRCISAPKPALAFAQRWVFDQILRRLDPEPQAHGFVPGRSIVTNASTHAGRAVVVNLDMKDFFPSVTFRRVKGLFRAIGYSEHLATVLALLCTEPPRVPATLDGKTTHIALGDRVLPQGACTSPSITNALCRRLDRRLDGLARRHGFTYTRYADDLTFSGDRPAVVGRLLRSVRSILAAEGFVEHPSKTRIMRRGGRQEVTGVTVNDRPNVSRRELRTLRAILHNAARLGLESQNREDHPDFASHLRGRVEFACMVDPSRAGTYRDALSRALQGPGAP

SEQ ID NO: 6322 - protein, 464 aa, Tautonia sociabilis
  source 1..464: note = Related to NZ_RYZH01000020.1
MNQDEKARLYRRVRHLASDSVVLRRMQTLGFWPKGEGLPPDPPEEAAERARIEAELADLRQKFAKVSDPEAALAEERRRRWEASKARRLEAKRRRAEEQRNRRAGWDQTRSATVVHAGIGVSAGLQGRQSDSEALRRRGLPILHQAEDLADRIGIELKALRWLTYHRRGATVVHYRRYEIAKKSGGVRCISAPKPALAWAQRWILDEILRRLEPEPQAHGFVSGRSIVSNAEPHSGKAVVINLDVKEFFPTITFRRVKGLFGSLGYGEHIATVLALLCTEPPRVAATLDGKTYHVALGDRVLPQGACTSPALTNAICRSLDRRLDGLARRHGFTYTRYADDLTFSGNRTAASGRLLRSVRIILVDEGLIEHPTKTRVMRRGGRQEVTGLTVNDRPAVSREELRTLRAILHSASRFGLDSQNRDGHPDFASHLRGRVEFACMVDPSRTPALREALDRALRGPSGS

SEQ ID NO: 6323 - protein, 780 aa, unidentified
  source 1..780: note = Related to JAGQQD010000063.1; note = Planctomycetaceae bacterium
MSDNEKAQLYKRLIQQTNDWFVLERMRELGFWPEDQPLPTVPQEEAVERTELEAEIAKLRQQNSKVANPEAALAEERKRRWEASKARRAEAKIQKEKERQARREAHEAHKETTIVHAGLGVSGGLQGTGSNPVALKSRWLPVLHRAEELAAEMGIELNTLRWLTYHRRGAAVVHYHRYELPKKTGGSRAISAPKAALDQAQRWILVNILNRLNVESQAHGFVSGRSIVTNATEHVGREVVINLDLKDFFPTITFRRVKGLFVALGYGEHIATVLGLLCTEPPRVAAEFAGTTYHVALGDRVLPQGACTSPAITNAICRRLDRRLAGLAKKHGFNYTRYADDLTFSGDAPRRVGRLLKSVRAILVDEGLTEHPSKTRIMRKSSRQEVTGVTVNEKPSLSRMEFRKLRAILHNAAKFGLESQNHEQHPNFENHLRGKVAFAAMVDPSKSAALWDAFHKAITEPQMTFSSVQEGSVDDRRRGTLIGLAVGDALGAAVEFKPPGTFEPVTNYRAGGPHRLNPGEWTDDTSMALALADSIAKAGWDLDDQARRYCDWWRDGKYSVNGRCFDIGITCRSSLGQFHLTGDARKAASTDEYSSGNGSIMRLAPVSIQFASLFPDRIDELAHLAEESSLTTHASAQCLSACRYFALILAGLISGRSREEVLSPDWEPLSQLRELKPLAEPVEDVALGSFRRLNPPEIKGSGYVVKSLEAALWAFHDARDFEEAVLKAVNLGDDADTTGAVCGQLAGAYWGESGIPARWRNYLARTDLLEAALKGMIEKD

SEQ ID NO: 6324 - protein, 461 aa, unidentified
  source 1..461: note = Related to JADJAE010000011.1; note = Deltaproteobacteria bacterium
MATDHKAALYRRLVREASDAAAIERMRVNGFWPWGQGIPRDPPDELKERAQIEAEIAKIQAQSTKSVDPDKALAQERKRRWEESKKRRAAKRLERASLLKKRRDDFIRYRKANVLHLGVGVSAGLQDTRPDTGELTRRGLPSLTNGSDLAMMMGVPLASLRWLCFHRRGAALMHYHRFGIPKKSGGTRSISAPKPRLANAQRWVLQNILERLDTAPPAHGFVRHRSILTNATPHARRAVVMNFDLKDFFPSITFRRVKGLFRKLGYNEHVATILGLLCTEPPRARVEVDGRVIYLALGDRVLPQGACTSPAITNALCKRLDARLLALASRHGFTYTRYADDLTFSGDDGALVGRLRRSVVSVVSSEGFTENTAKTRIMRQGSRQEVTGLTVNDRPTMPRDEFRQLRAMLHNAAKHGLESQNRTQHPAFAQHLAGRVEFACWADPTRAEKLRSALAAALARG

SEQ ID NO: 6325 - protein, 461 aa, unidentified
  source 1..461: note = Related to JAIEMG010000089.1; note = Gemmataceae bacterium
MPDNEKARLYKRIVQQTNEHTLLERMRIHGFWPAREGLPQGPAEEAAERTRIEAELAELRKAHSAVKNPEKALADERKRRWEESKKRRAANKAKREEEAKQRREAWAAVRQESVVHAGAGVSDRLHQTTSDVAELTRRHLPILHQSADVAKQLGIGLPALRWLTYHRRGATLVHYHRYSIAKKTGGARCISAPKPALAKAQHWVLENILDRLDVDPAAHGFIRGCSIVSNAIPHANRGVVVNLDMKDFFPSITFRRVQGLFRKLGYSGHVATLLALLCTEPPRIATELDGKVYHVALGERILPQGACTSPAITNALCRRLDRRLDGLARKNGCAYTRYADDLTFSGDDPGVVGHVLRNVRYILKGEGFVPHPNKTRVMQRASRQEVTGVTVNVRPTLARQEMRTLRAILHNAAKHGLESQNRDGRPNFAAYLRGRVAFACMVDPTRAEALRAALALALRPV

SEQ ID NO: 6326 - protein, 460 aa, unidentified
  source 1..460: note = Related to JAEUIF010001171.1; note = Planctomycetia bacterium
MANDEKAQLYRRIVQQNSEQQLLERMRIHGFWPQRAGLPQDPPAEAAERARIEAELEELRRTQSAVKNPESALHAERKRRWEESKKRRAERKAQKLQEQHKRREAYEALRQTTIVHAGAGVSGRLQETISNEAELRRRQLPVLHIAADLAREMGMPLSKLRWLTYHRRSATLVHYHRYEIEKKTGGVRCISAPRPALKQAQGWVLEHILGKLTVEPQAHGFVPGRSIVTNALPHVGRAAVINLDLKDFFPTITFRRVQGLFRKLGYSGHLATLLALLCTEPPRVPAELDDKVYHVALGQRVLPQGACTSPAITNALCRRLDRRLDALARRHGFAYTRYADDLTLSGDNTEMIGHVLRNVRYILKAEGFTLHPTKSRLMRRGQRQEVTGVTVNVRPGVSRQEVRTLRAILHNAARHGLESQNREKRPNFAAYLKGRVEFVRMVDPQRGRVLRAALQAVLRG

SEQ ID NO: 6327 - protein, 470 aa, unidentified
  source 1..470: note = Related to nan
MADDEKAKLYQQIVSRADEQRIVERMRLHGFWPADKPLPKDPPDEVRERQQVEAELAHLRREHSTVRDPEKALAQERIRRWQESKKRRADRKVQKLQEQVRRREAWKKTRDANIVHTGEGFSAGLQQKNSDAAALQARGLPVANDSPELANLIGIKLSTLRWLTYHRKGATVVHYHRYSISKKTGGLRYISAPKAALRQAQEWVLQNILSRLPVEPQAHGFVLERSVVSNALPHVNKNVVINLDLKDFFPSITFRRVKGLFRQVGYGEHVATVLALLCTEPPRVATELDGKVYHVALGQRVLPQGACTSPAITNLLCRRLDRRLAGLAKRHDFAYTRYADDLTFSGENGKAVGRLLRSVRSILTSEGFAEHPRKTKVMRRASRQEVTGLTVNVRPTVSRKEVRQLRAIIHNVARHGLESQNRSDHPDFEGHLRGRVQFVRMVDPQRGEPLLAALHRALGTSAGDGTANIS

SEQ ID NO: 6328 - protein, 461 aa, unidentified
  source 1..461: note = Related to JADLFP010000276.1; note = Acidobacteria bacterium
MNEKARLYQRITSEMNEETVLARMRMHGFWPASAGVPPDPPEEVKDRQRIEKEIARLAGERKKAADPEKALAQERNRRIEESRKRRAELKEKRAAEREARQKEWAAFRERSVVHAGTGVSAGLETPGRSSLEELVRRGLPMMHDGQDLARWLGITIGKLRWLTYHRNAAALVHYHRFGIPKKSGGIRAISAPKASLAVAQRWILTRILSRLTPDDAAHGFVHGRSIVSNAAPHAGRRVVINMDMKDFFPTVTFRRVKGLFRRLGYNEPVAVLLALLCTEPPRVAAELGGKAYFIALSSRTLPQGACTSPAITNAVCHRLDRRLTGLAARHGFTYTRYADDLTFSGDDATAVGRLLRSIQSIAGSEGFVPHPEKTRVMRRGERQEVTGVTVNDKVGVSRREVRELRAILCNAARLGLATQNREAHPDFAGYLRGRVAYVAMVDPSKKSKLEAALARALEART

SEQ ID NO: 6329 - protein, 461 aa, unidentified
  source 1..461: note = Related to MGST01000139.1; note = Deltaproteobacteria bacterium RIFOXYA12_FULL_58_15
MDEGEKRNLYRRIVASVPEDMLLGRMRVYGYWPTGVPIPADPADEVAQRKEIEREIAKLQSAHSTAKDPDKALAEERKRRWDESKKRRAENKKKREAENKQRREAWDIYRKKTVVHAGEGVSSGLQDVLSDTDALVARGLPVMHCAADVAVMLGLPLPTLRWLTFHRRATALVHYHRFDIPKKTGGRRLISAPKATLKKAQQVVLDNILSRLPTEPEAHGFVAQHSIVTNAACHAGKAVVINVDLKDFFPSIGFRRVRGLFQRLGYSGQVATMLGLLCTEPPRIKAELDGKVFHVALGERVLPQGACTSPAITNTICRRLDRRLVGLASKHGFTYSRYADDLTFSGNVPKKAGRLLRSVRAILENEGFAENGKKTRVMRQSRRQEVTGLTVNDKPRVSREQRRELRAILHNAAKSGLESQNREGRSNFASYLRGRVAYLSMVEPERAALLKATLERALAKR

SEQ ID NO: 6330 - protein, 460 aa, unidentified
  source 1..460: note = Related to JAIOJK010002653.1; note = Sandaracinaceae bacterium
MSDDKAKLYKLITSQLSEHQVLWRMRELGFWPEGQPIPDEPLDAQEERAKLTKELEQLRKQGAKIANPEKALAQERIRRWQESKKRRAIAKAERAASAKERSEKWKAHKAVALVHAGEEHSAGLQDRESDAAKLASRSLPVLHDAPDLAKAMGIELSALRWLTYHRRAAALVHYHRYTIPKKAGGTRAISAPKPALAKAQEWVLGAILDRLVPEPEAHGFVAEHSVLTNAAPHAKKKIVVNLDLRDFFPSLGFRRVKGLFRKLGYSEHIATLLSLLCTEPPRVEAELDGKVWHVALGERVLPQGACTSPAITNAVCRRLDRRLRGLAGRHGFAYTRYADDLTFSGDDRKKVARLLKSVRAILQSEGFVEHPRKTRVMGSGSRQEVTGLTVNAGVKLGRGDKRRLRAILHNAAKHGLASQNRRDHRDFAAHLAGLVSYASMVEPERAADWKARLDRALSSS

SEQ ID NO: 6331 - protein, 461 aa, unidentified
  source 1..461: note = Related to JACRDB010000039.1; note = Deltaproteobacteria bacterium
MADDEKARLYKRLTTTWNEFEVLARLRHNGFWPAGVGIPQDPPKELKERATLTKELASLRASQLAVKDPEKALSEERTRRFKASLERRKAARARRLADEKTRRERWLKARKDSVVNLGEGVSAGLQDVSCDKAQLQARGLPVLGDAVALAGALGVKLSVLRWLTFHRRGATLVHYHRYAIPKKTGGQRAISAPRRKLAGCQCWVLTQVLEKLHAEPPAHGFVRHRSVVTNATPHVGRRVVVNLDLRDFFPSVTFRRVKGLFRKVGYGEQVATVLALLCTEPPRVPVTFDDKRFYVALGQRVLPQGASTSPAITNALCRRLDRRLQGLARRHGFTYTRYADDLTFSGDEPPRVGRLLKSVKAVVVDEGFQVHPTKTRVMRSTRRQEVTGVVVNHRVGVPRDELRALRATLHNCARHGLQSQNREHHADFAAHLRGKVSWVCMVDPARGPALRAALERALASP

SEQ ID NO: 6332 - protein, 461 aa, unidentified
  source 1..461: note = Related to JAEUKH010000004.1; note = Myxococcales bacterium
MAYDDKARLYRRLVTGTSDATVLARMRLHGFWPLGRGLPADPPDELKKRLDLEQKLVILRDAEVVATQSPEKLLEAERKRRWAALKQRRAEKKAARAKAVQARRDAFAKLRRSSVLHAGIGVSKLLNDTKSDHAALRARGLPVLDAGPDLAMMLGIPLGVLRWLTFHRRGATLVHYHRFSLPKKTGGQRAISAPKPRLKTAQAWVGQNVLGPLALSPHAHGFVPGRSTVTNAALHVGKKVVVNLDVRDFFPTFGFRRVRGLFRHLGYSGQVATLLALLCTEPPRLEASVDGTRVWVALGHRVLPQGASTSPALTNLLCHRLDQRLAGLARRHGFAFSRYADDLTFSGDHPERLGRLLKSARAILAAEGLVEHPDKTKVMRASQQQEVTGIVVNTQLGLPRDTMRRLRATLHNCARHGLDSQNREGHPNFRGYLEGMVAYASMVNPEKAAPLRAALTLALGG

SEQ ID NO: 6333 - protein, 463 aa, unidentified
  source 1..463: note = Related to JAIBCE010000260.1; note = Sandaracinaceae bacterium
MSDTKDDPLKKLKAQLSALPDATVRERMIALGFWPPGEPLPADPIDEANARAALESGRARLLAQAGTAENPEKALRRERIRRLRESQKRRTLRKLERENEKKARRAAWDAEKAGRIVDAGEGVSAGLAQTGSNADQLTGLGLPVVHDASELAERLGLSLSQLRFLTYHRRGATLVHYHRFGIPKKTGGIRAISAPKPALARAQRWVLAQVLDKLEVRAPAHGFVRHRSIVTNAAPHVGRRVVLNLDLESFFPTVGFRRVKGLFRKLGYAEQVATLLALLCTEPPRVEARLDGKRLWIALGQRVLPQGACTSPAITNAICRRLDARLSGLAKHFGFTYTRYADDLTFSGDDRGRVGRLLGCVRKVVTSEGFREHGDKTHVMGSGRRQEVTGVVVNQKLSTARDERRALRAMLHNVARRGLAAENRDGHADFASYLRGRVAFACMVDPSLEPVLRPALDRALARG

SEQ ID NO: 6334 - protein, 468 aa, Sandaracinus amylolyticus
  source 1..468: note = Related to NZ_CP011125.1
MSDEKDPQKAALVKAVLASLDDATALSRMKTLGFWPVHEPVPGDPPGEIVERAELDAELATLVKIASDGEKPEKALQRERIRRWKESRERRKAKKAERIAEAKQRADAWRAQRAERLVYAGLGVSAGLHDVESDVATLEACGLPIWRDARDVASALGISIAKLRWLTFHRRGATLVHYHRYGIPKKTGGIRAISAPKPALAEAQQNVQSLVLQRIAPSDEAHGFVRERSVVSNARPHVGRAVVVNLDLRDFFPTISFRRVKGLFAKLGYSEQVATVLALLCTEPPRVPAELDGQRYHVALGARVLPQGACTSPAITNLICRRLDARLRGIARALGFTYTRYADDLTFSGDDPTKLASLFGMVRKVIASEGFAEHEGKTRVMRRGARQEVTGVVVNRAVRLPRDEKRALRALLYNCARFGMESQNRDGRPSFASYLRGRVAWAVMVEPALGPRLFPALERALEGRRSDL

SEQ ID NO: 6335 - protein, 467 aa, unidentified
  source 1..467: note = Related to JACOUT010000011.1; note = Deltaproteobacteria bacterium
MPDDAKPKPEKSEKQKLWERISARPDWIVVERMRVNGFWPAGETLPEDPPDEVKERAALEVERARLLKSALAVQHPEQALKAENQRRIEVSRKKKAERKVLREAAARERREAFIKKKRATLVHLGLGVSGGLEKTGADEARLQAFELPVLRDGNDVAAAIGIPLGELRWLTYHRRGAPLVHYHRYDIPKKTGGARHISAPKGKLARAQQWVLDAVLDKVPASAHAHGFVRGRSVVTNARPHVKCKSVVNLDLKDFFPTITYRRAKGLFEHLGYGEHVATVLALLCTEPPRVLVEHDERRTHVAIGERVLPQGACTSPAITNLLCRRLDARLAGLARRLGLAYTRYADDLTFSGDTVDERALLGAVRRVIAAEGFVVHPDKTRVMRKGRRQEVTGVVVNAKPSIAREQWRSLRAVLHNCAKHGLASQNREQHPDFAGHLAGKVAWVRMVDPRRGAQLGLLLQRALARP

SEQ ID NO: 6336 - protein, 467 aa, unidentified
  source 1..467: note = Related to JADZDY010000308.1; note = Deltaproteobacteria bacterium
MADDAKTKSEKSEKQKLWERVSSRPDWVVVERMRVNGFWPQGEKLPEDPPDEVKERTALEADRTKLLKSALAVQDPERALKEENERRILESRKKKAERKVLRDKARRERREAWVKKKQAALVHLGLGVSAGLEHVESDVARLQTLGLPVLNDGTQLAASMGIALAELRWLSYHRRGAPLVHYHRYDIPKKTGGARHISAPKARLARAQQWVLANILDKLPVSEHAHGFVRDHSVVTNARPHVKRACVVNLDLKDFFPTISFRRCKGLFGKMGYSEHVATVLALLCTEPPRVLVELDDKRTHVALGERVLPQGACTSPALTNLLCRRLDKRLAGLARRHGLAYTRYADDLTFSGDSLDESALLGSVRRVVEAEGFRVHPDKTRVMRKGRRQEVTGVVVNTRPSIAREDWRQLRAILHNAAKQGLQSQNRDQRPDFAAHLAGRVAWVRMVDPRRGAQLGLLLQRALARG

SEQ ID NO: 6337 - protein, 461 aa, unidentified
  source 1..461: note = Related to nan
MADDEKAKLYKEIVRRTSDAFLLDRMRTHGFWPEKEPLPKDPPDELSERAKIEAELQKLKQTSLAVKDPEKALAEEQKRRWEESKKRRKEAKEKREAEQKARSEAWAKVRKQKVVHLGLGVSKGLEDTKSDAEKLLENGLPVLHTSADVASMLGVSLPVLRWLTYHRKSVALVHYHRYGIPKKTGGIRNISAPKKSLSAAQEKVLVLILEKIAPEPQAHGFVAGRSILTNAAPHAGRKVVMNLDLRDFFPTITFRRVKGLFHKLGYSEHAATVLALLCTEPARAKAELSGRVYHVALGERFLPQGTCTSPAITNLLCRRLDKRLSGLAQKAGFLYTRYADDLTFSGDDTGEVGRLLRAIRKVITSEGFEEHAKKTRVMRRGRRQEVTGLIVNSRPAVPREEIRRLRAILHNAARSGLDAQNRENVPDFAAHLRGRVAFVEMVDKERGEKLRAALNRVLAGR

SEQ ID NO: 6338 - protein, 461 aa, unidentified
  source 1..461: note = Related to JAEUKD010000148.1; note = Myxococcales bacterium
MAKQDDKARLYHRITQVHHGIVLDRMRVNGFWPMNQGLPPDPAPEAQERKLLEADLAVLKQDAAMSPGDVEKALKAERMRRWEESKKKRAEKKKLREARAAARRAAWVERRKGLVFHAGEGHSGGLQHATSDEAALTKRALPVLHTAHDLAVALGISLARLRWLTYHREGATLVHYHRYSIPKKTGGIRGISAPKPALAKAQKWVFDSVVQKLVIEPEAHGFVVDRSIVTNAKLHVGKRVVTNMDLKDFFPSVTYKRTKGLFVSFGYSEQVATLMALLCTEPPRVAASVDGKPVNIAIGERRLPQGACTSPGLTNAVCRALDRRLGGLAQKLGFTYTRYADDLTFSGNDDKRLGLLLRSVRSIVKDEGFLEHPTKTRVMRRGRRQEVTGVVVNDRPTIAREELRELRAILHNAMRQGLEAQNRKGHPRFIDHLQGRVAYVAMVDPVRGEKLEQALARVLGR

SEQ ID NO: 6339 - protein, 461 aa, Labilithrix sp.
  source 1..461: note = Related to JAHBWD010000079.1
MDADEKAKLYRRISSANIHLVLERMRVHGFWPQGQGLPPDPADEVAARAAIEKEIGQLQGAAVAGGLAAIEEALREERRRRWEASKKKRAERKKIRQAQDAERRAQWREEKKSRVVHAGVGVSAGLEDRQSNEEELQRRGLPVLHTAADVAASAGVAFPKLRWLTFHRRGAALVHYHRYSIPKKTGGMRAISAPKSALADLQLWVLSRILTPLHVEPEAHGFVPERSIVTNAKPHVRQRVVVNLDLKDFFPSVTFRRVKGLFQKVGYSEHVATLLALICTEPPRIPVEIDGKKLYVALGERMLPQGACTSPAITNLVCRRLDRRLAGLGHRWGYTYTRYADDLTFSGDGKQGLALLLKGVRGIVSDEGFAEHPTKTRVMRPGRRQEVTGVVVNDKLGVARKDVRQLRAILHNAKVHGLASQNRDNHPNFEAHLRGRIAFVHMIDEAKGKKLLDLLKEAIHG

SEQ ID NO: 6340 - protein, 462 aa, Sandaracinus sp.
  source 1..462: note = Related to PABA01000151.1
MADDPKEKKKALYQQLVESADEELVLARMRELGFWPSSEPLPEDPDDEVKETLELEYELAQLRKKATVVADPQKALEQERVRRWKESKERRAKAKIERELEAKQRREAWETAKKERVWHAGEGVSAGLESHTPSPDGVRFGAPPIATPKALAEAMGIDLPKLRWLTYHRRAAALVHYHRFSVPKKTGGLRHISAPKKDLRRAQEWILVHVLERVGPQPTVHGFQRGRSVKSNATPHVSKRVVVNLDLEDFFPTLGFRRVKGVFRSVFGYPESVATVMALLCTEPPRVEAELDGKVFHVALGERVLPQGACTSPMLTNIACYALDRRLGGLAGSLGFAYTRYADDLTFSSDDPRKTGRLLKAVRDVVKNEGFVVNEAKTRVMRRGGRQEVTGVTVNRKANVSRKERRRLRALLHNAKKTGLAAQNRTKHPRFREHLRGRIAWIGMLDAAQGAKLRAMLDACPD

SEQ ID NO: 6341 - protein, 492 aa, Clostridium sp.
  source 1..492: note = Related to NZ_OKRA01000001.1
MMENQENNRKDYREAVNAMGKKEFTLIKMQEYGFWPQNLPTPYERQENETSEQYENRKNLLEKYEKVIDEIANLYEEKDKINSKLIELQKKYDETWDYEKIRLDVSKTIMEESIARRAERKKQRELEKRQRSEEWKKEKEDKIVFIGKGYSSLLKDKETHKEKLLAQDLPIINDDKELASFLGIEYKKLRFLVYHRDVVSVDHYYRYTIPKKRGGVRNIAAPKSVLKNSQRKILDDILLKIPTSDEAHGFLKGKSVVSAAESHFKQPELLINIDLEDFFPTITFERVRGLFKSFGYSGYIASMLAMICTYCERMKIEIRGEEKYIKTSNRILPQGSPASPMITNIICIKLDKRLKGLSSKYNFTYTRYADDMSFSFNGDDYELNIGRFIGLVSKIVKEEGFNINKDKTKFLKKNNCQCITGIVINNEEIGVPKKWVKKLRAAIYNANKARNSGEVLSSKVINEISGMTSWIKSVNEKRYKAIIDSAMELINS

SEQ ID NO: 6342 - protein, 495 aa, Clostridium weizhouense
  source 1..495: note = Related to NZ_JAHXPT010000003.1
MMENQENNMNNRKNYREAVNTMGKKEFTLIKMQEYGFWPKNLPTPYERQESETEEQYKERKCLLEKYEKVIDEISKLYEEKDKINLKLRELQKKYDETWDYERIRLDVSKTIMQESIERRAERKRQRELEKEQRSEEWKKEKENKIVFIGKGYSSLLYDKETDENKLLLQELPIIKDDKELANFLGIEYKKLRFLVYHRDVISVDNYHRYTIPKKKGGVRNIAAPKSILKNSQRIILEEILSKIPTSNYSHGFLKGKSVVSAAKVHVKKPDLLINIDLEDFFPTITFERVRGMFKSFGYSGYVASMLAMICTYCERMKVEVRGEEKYVKISDRILPQGSPASPMITNIICVKLDKRLNGLSTKYDFIYTRYADDMSFSFTGDINELSVGSFMGLVSKIVKEEGFNINKDKTKFLRKNNRQCITGIVINNEEIGVPKKWIKILRAAIYNANKVKNSGEILSNKVINEISGMTSWVKSVNEERYKDIINDAMNLINN

SEQ ID NO: 6343 - protein, 497 aa, Clostridium uliginosum
  source 1..497: note = Related to NZ_FOMG01000001.1
MMENHENNMNNRQNYRETVNKMGKKEFTLIKMQEYGFWPKNLPTPYEKQENETKEQYAQRKDLLEKYQKIIDEIANLYEEKDKINERLREFQKKYDETWDYEKIRLDVSKIIMEESIARRAERKKQREFEKRQRSEAWEKEKADKIVFIGKGYSSLLQDTETDDEKLLSQELPLIKDDKELANFLGIEYKKLRFLVYHRDVVSVDHYNRYTIPKKKGGVRNIAAPKSILKNSQRKILEEILSKIPTSNYAHGFLKGRSVVSGAKAHTKQPELLINMDLEDFFPTITFERVRGMFKSFGYSGYVASMIAMICTYCERMKVEVRGEEKYVKTSNRILPQGSPASPMITNIICVKLDKRLSGLASKYSFVYTRYADDMSFSFMNDNSDLNIGKFMGLVSKIIEEEGFNINKNKTKFLRKNNRQCITGIVINNEEIGVPRKWIKRLRAAIYNANKVKNNGDLPSSKVINEISGMTSWIKSVNARRYEDIINDAMDLINSQL

SEQ ID NO: 6344 - protein, 385 aa, Clostridium tetani
  source 1..385: note = Related to AE015927.1
MEESIKRRAKRKKQREFEKQQRSEAWKRTKEDKIVFIGKGYSGSLQDVETNIEKLKAQKLPIIKDDKELAKFLGIEYKKLRFLVYHRDVVSVDNYHRYTIPKKKGGVRNIAAPKSLLKNAQRKILEEILSKLPVSEYAHGFLKEKSVVSGAKAHKNKPELLINIDLEDFFPTITFERVRGMFKGFGYSGYVASLLSMICTYCERMEVEVRGEIKYVKTSHRILPQGSPASPMITNIICRKLDKRLSGLASKYSFTYTRYADDMSFSFINENTDLTYGRLIGLISKIVKEEGFNINKNKTKFLRQNNRQCITGIVINNEEIGVPKKWIKNLRAAIYNANKLKNNEQIPSSKTINEISGMTSWIKSVNSEKYKNIIDDAMNLINSLE

SEQ ID NO: 6345 - protein, 501 aa, Clostridium saccharobutylicum
  source 1..501: note = Related to CP016086.1
MIESQENSKNNRQEYRKQVNELGKKEFTLIKMQEYGFWPKNLPTPYEKQENETKEEYLERKNLTKEYEKIINAITDLYDEKDEINAKLRDLNKKYNETWDYEKIRQDVSKAIMEESIARRKERKEKRELEKRQKSEAWQKEKADRIVFIGRGYSSLLYDKEDNEEKLLNQGLPVIKDDRALADFFGIEYKKLRFLVYHRDVVLVDHYNRYTIPKKKGGERNIAAPKLILKNVQRKILEEILSKIQVSDYTHGFLKGKSVVSGAKSHIADKASGENTALLINMDLEDFFPTITFERVRGMFKAFGYSGYISSLLAMLCTYCERMPIEVKGKVKYVKTSDRILPQGSPASPMITNIICVKLDKRLSGLSSKYNCVYTRYADDMSFSFMEESSDLNLGKFMGLISKIVNEEGFNINKSKTRFLRKNNRQSITGVVINNDEIGVSKKWIKTLRAAIYNANKLKNSGEKIPQSTINEISGMVSWVRSVNEKRYADIIESGMNLINT

SEQ ID NO: 6346 - protein, 526 aa, Clostridium chromiireducens
  source 1..526: note = Related to NZ_QXDJ01000001.1
MMENQETSKNKRQDYREIVNQMGKKEFTLLKMQEYGFWPKNLPTPYERQENETQEEYAHRKSLIKKYEKIIKQISDLYNEKDKINQKLRELKKRYNETWDYEKIRSDVAKAIMEESIARRKERKEKRALEKEQKSEDWKKEKERRIVFIGKGYSNSLFDKESDTERLLSLGLPIIEDDKELSELFEIEYTKLRFLAFHRDVVTLDHYHRYTIPKKKGGERNIAAPKSILKNVQRKILEKILSKIPVSHYAHGFLRGRSVVSGAKAHAIDEKHVIIEDSRISKNIDTERSAQERVPLLINIDIEDFFGTITFERVRGMFKSFGYSGYVSSLLAMLCTYCERMPIEVRGEIKYVKTSNRILPQGSPASPMITNIICGKLDKRLSGMALKNNCGYTRYADDMSFSFKQEINKQELRNFIGLTSKIVMEEGFKINHKKTHFLRNNNRQCITGIVINNHEIGVPKKWIKTLRAAIYNSKKLIKSGEKVPMSTINEISGMVSWIKSVNEERYVNIIEEGTNLIKELTYTPYS

SEQ ID NO: 6347 - protein, 520 aa, Clostridium sp.
  source 1..520: note = Related to NZ_AP024849.1
MIENQETLKNKRQDYREKVNQIGKKEFTLLKMQEYGFWPKNLPTPYEKQENETKEEYAQRKNLIKEYEKIINEISDLYGEKDKINEKLRELKKKYDETWDYEKIRIDVSKTIMEESIARRKERKEQRELEKRQKSEAWVKEKAKGIVFIGKGYSNLLYDKQNDEDKLLSQELPLIEDDKALAEFLGIEYKKLRFLVYHRDVVTVDHYHRFSIPKKKGGERNIAAPKSILKNAQRKILEEILSKVPVSDYAHGFLKGKSVVSGAKAHVAAKADLGEKASGVEKTHDEEKVSGEKTQLLINMDLENFFPTITFERVRGMFKAFGYSGYIASLLAMICTYCERMPIEVRGEIKYVKASNRILPQGSPASPMITNIICVKLDKRLSGLAPKYNCTYTRYADDMSFSFCEENSDLNLGRFMGLVSKIINEEGLKVNKKKTRFLRKNNRQCITGIVINNHEVGVPKKWIKTLRAAIYNANKLTRNGEVVPAKTINEISGMVSWVKSVNGERYSGIIEDGMNLINNI

SEQ ID NO: 6348 - protein, 525 aa, Clostridium puniceum
  source 1..525: note = Related to NZ_LZZM01000063.1
MIENQENTKNKRQDYREIVNQMGKKEFTLLKMQEYGFWPKNLPTPYERQENETKEEYAQRKSLIKEYEKIINQISELYEGKDKINQKLHELKKKYDETWDYEKIRVDVAKAIMAESIARRKERKEKRALEKRQKGEAWEKRKSESIVFIGKGYSSLLNDKENDNDKLLLQGLPIIKDDKALAEFLGIEYKKLRFLIYHRDVVSVDHYHRFTIPKKKGGERNIAAPKSILKNAQRKVLEDILSKMPVSNYAHGFLKGKSVVSGAKAHVAEKGYLSEETDMVEKAFVVEKVHGTDKVSSENTQLLINMDLENFFPTITFERVRGMFKAFGYSGYISSLLAMICTYCERMAIEVRGEIKYVKTSNRILPQGSPASPMITNIICAKLDKRLSGLAYKHNCTYTRYADDMSFSFKEESSDLNIGRFMGLVSKIVSEEGLNINKKKTRFLRENNRQCITGIVINNDEIGVPKKWIKTLRAAIYNANKLKNNGKEVPVKTINEISGMVSWVKGVNTERYAGIIREGMELIDS

SEQ ID NO: 6349 - protein, 451 aa, Clostridium sp.
  source 1..451: note = Related to DPOH01000092.1
MMDNNVNNIDRKQNYREAVSVMGKKEFTLLKMQEYGFWPKDLPTPYERQKSETQEEYENRKALLEKYHKVINQINDLCKDKEDINNKLKGLQKKYDDTWDYEKIRKDVAQTIMKESIERRKEVKILREIEKKEKSDAWKKNKSENIVYIGKGYSKWLYLKDTDEEKLKEHEIPIIKDDKELAQFLGIEYRQLRFLTYHRDVVKFDNYTRYTIPKKKGGVRNIAAPKKILKDSQRKILDEILCKIEVSESANGFIQGKSVVSGAESHIDNKVELLINMDLENFFPTITFERVRGMFQKLGYSGYVSSLLAMICTYCERMEMEIKGEKVYVKTTDRILPQGAPSSPMITNIICSKLDKRLKGLADKYGLVYSRYADDMSFSFGEGNIILNAINKYINLNTDKENNQDDLNVGKIIGIISKIIKEEGFNINNQKTKFLRKNNRQSITGIVINND

SEQ ID NO: 6350 - protein, 325 aa, Clostridium sp.
  source 1..325: note = Related to FPBY01000301.1
MLISSIEYKQLRYLTYHRDVVKFDNYNRYTIPKKKGGVRNIAAPKKVLKGVQRKILDEILKNKIKISDSANGFIKGRSIVSGAEKHKDSNVELLINMDLENFFPTITFERVRGMFMKFGYSGYVSSLLAMICTYCERMEMEVKGENVYVKTSERILPQGSPASPMITNIVCSKLDNRLNGLASKYEFTYSRYADDMSFSFNKGNKVLDDAKDSLNVGKILGIISKIIKEEGFSINEEKTKFLRKNNRQAITGIVINNGEIGVPKKWVKNLRAAVFNGSKLIENGSILPCDLVSEIKGKSSWLSCVNRERYLKIIEECEKIIRFKG

SEQ ID NO: 6351 - protein, 502 aa, Clostridium butyricum
  source 1..502: note = Related to NZ_CP013238.1
MIENNRNNIDNKQNYRSAVNTMGKKEFTLLKMQEYGFWPENLPTPYEKQSNESPEEFKKRKELLEKYEKIINDINDLYKEKDVINNKLTELKKKYDDTWDYEKIRKDVSQIIMKESIERRKEIKTLRALEKKNKSEAWRKKKSENIVYIGNGYSKGLYKKDTNEEKLLKIGLPIIKDDKELSELLNIEYRQLRFLTYHRDVVKFDNYTRYTIPKKKGGERNIAAPKMILKNAQRKILEEILYKIQISEDAHGFVKGKSIVSGASVHTKNSDIELLINMDLENFFPTITFERVRGMFQNFGYSGYIASLLAMICTYCERMEMKVKGETVYVKTSDRILPQGSPASPMITNIICSRLDKRLNGLALKYDFIYSRYADDMSFSFNKGNMVMEENEHINVDKILGIISKIIREEGFAVNNKKTKFLRNNNRQSITGIVINGTEIGVPKKWVKNLRAAIYNASKLKECGSNIPSDVINEIKGMTAWLECVNKDRYYKIIMKSKELFE

SEQ ID NO: 6352 - protein, 488 aa, Clostridium sp.
  source 1..488: note = Related to KB822566.1
MDTKSEYRKLINEMGKKEFTFLKMQEYGFWPSHLPTPYERQQNETEQDFQNRKKLLDEFQKLSEQIAQAYKEKREIEIKLSSLQKQYQDTWDYEKIRAVVSQEIMKASIARRAERKAERQRQKQLKTEQWQKRKSENILFIGRGYSNILHKKQTDIQKLKQNNLPILETDKDIAQLLQIEYSTLRYLAYHRDVVTFDNYYRFDVPKKSGGMRHIAAPKTQLKTAQKQILEKILEKTEISDVAHGFIKSKSVLTGAKAHQTSPDLLINIDLENFFPTITFERVRGLFQYLGYSGYISSILAMICTYCERMAVEIKGETKYIKTSERILPQGSPASPMITNMICKRMDKRINGLCQKLGVIYTRYADDMSFSYTGELENFAIGSFLNSIQKIIEAEGFHINKQKTHILRKHNRQYITGIVINNAEIGVTRNWIKILRASIHNAQKLKNAGEAIPKQTKQEISGKIAWLKSVNETRYQKIIQQGKQLLQNS

SEQ ID NO: 6353 - protein, 487 aa, unidentified
  source 1..487: note = Related to nan
MDTRSEYRKLVSEKGKKEFTFLKMQEYGFWPSHLPTPYERQQNETEEDFENRKKLLDEFQKLSDVISKAYTEKNEIEKKLFSLQKEYQNTWDYEKVRAVVAQEIMKESIARRAERKAERERQKQLKTEAWQKRKAENILFIGRGYSNILHKKETDVAKLEQQKLPIIQTDRELANTLGIEYNTLRYLAYHRDVVTFDNYYRFDIPKKSGGTRHIAAPKIQLKMAQRQILEKILQKVEISDVAHGFVKSKSVLTGAKVHHTSPDLLINMDLENFFPTITFERVRGLYQHLGYSGYIASLLAMICTYCERMPVEIKGETKYIKTSERILPQGSPASPMITNIICHRMDKRIYGLCQKLGVTYTRYADDMSFSYIGELENFAIGSFLNSIQKIIESEGFHINKQKTNILRKHNRQYITGIVINNDEIGVARKWVKILRASIHNAQKLKNAGEAIPHKTKMEIAGKIAWLKSVNEKRYHKMIQQGMELLKS

SEQ ID NO: 6354 - protein, 489 aa, unidentified
  source 1..489: note = Related to DNJX01000261.1; note = Lachnospiraceae bacterium
MDRKAEYRNLVKNMGKKEFTFLKMQEYGFWPENLPTPYERQQNETEQDFENRKKLLDEFQKLSEKISGVYQEKSEIERKLSQLKKEYQGTWDYERIRAAVAQEIMKESIARRAERKAERERQKQLKSEAWKKRKAENIIFIGKGYSNLLGKKETDVQKLKENQMPVIETDRELARFLQIEYNTLRYLVYHRDVVTFDNYYRFDIPKKSGGMRHIAAPKTHLKTAQRQILDQILQKAGISDLSHGFIKSRSVLTGARAHSTSPDLLINIDLEDFFPTITFERVRGLYQSFGYSGYIASLLAMICTYCERMPLEIKGETKYIKTSGRILPQGSPASPMITNIICRNMDKRINGLCKKLGITYTRYADDMSFSYIGDTSGFAIGSFLNSINTIIEAEGFHMKKEKTHILRRNNRQYITGIVINNEEIGVPKKWVKILKASIHNAQKLKASGGCVSNKTINEISGKIAWLKSVNAKRYQKVIDQGTEFLKSLT

SEQ ID NO: 6355 - protein, 489 aa, unidentified
  source 1..489: note = Related to KE159636.1; note = Lachnospiraceae bacterium A2
MDTKAEYRELVNNMGKKEFTFQKMQEYGFWPSHLPTPYERQQHETQEDFEKRQKLLGEFQELSEKIAGAYREKTEIEKKLSHLKKAYEGTWDYEKIRAAVAQDIMKESIARRAERKAERERQKQLKSEAWNKRKAEQILFIGKGYSSLLGKKETDTEKLKALQMPVIETDRELANALGIEYSALRYLAYHRDVVAFDNYYRFEIPKKSGGTRQIAAPKTQLKAAQKQILTQILQKAEISDKSHGFVPSRSVLTSAKTHSTSPDVLINIDLENFFPTITFARVRGLFQSFGYSGYTASLLAMICTYCERMPLEVKGEMKYIKTSGRILPQGSPASPMITNIICRNMDKRISGLCQKLGVTYTRYADDMSFSYTGSEDGLAIGSFLNSLTKIIEAEGFHIKQEKTHILRKNNRQYITGIVINSEEIGVPRKWVKILKASIHNAQKLKESGGSVPNKTIYEISGKIAWLKSVNAKRYEKIIRQGTEFLKTLA

SEQ ID NO: 6356 - protein, 487 aa, unidentified
  source 1..487: note = Related to DVLQ01000214.1; note = Candidatus Coprocola pullicola
MDTKSEYRKQVNEMGKKEFTFLKMQEYGFWPSHLPTPYERQQNESAEDFENRKQLLDAFEKLSEQIAQAYQKKQEIEKKLSSLKKQYQNTLDYEKIRSIVAQEIMKQSIAKRAERKAEREKQKQLKSEAWQKKKAETIVFIGKEYSSLLAKKETDIQKLEKNHLPIIQTDKDLADLLQIEYKTLRYLVYHRDVITFDNYYRFDIPKKSGGTRHIAAPKTHLKTAQRQVLEQILQKVEVSDAAHGFIKSKSVLTGAKMHPTSPDLLINIDLEDFFPTITFERVRGMYQSLGYSGYIASLLAMLCTYCERMPLEIKGEIKYIKTSQRILPQGSPASPMITNIICQKMDKRIHGLCKKLGFTYTRYADDMSFSYTGQTDNLAIGSFLNSIHKIIESEGFHIKKEKTHILKKNNRQYITGVVINHKEIGVPRKWVKILRASIYNAQKLKNAGTAVPTKTKQEIAGKIAWLKTVNETRYQKMIQQGTELLKH

SEQ ID NO: 6357 - protein, 487 aa, unidentified
  source 1..487: note = Related to NFLT01000012.1; note = Proposed Tyzzerella sp.
MDTRTEYREQVNKMGKKEFTFQKMQEYGFWPSHLPTPYERQQNETEEDFENRKKLLDEFNKLSEQISEVYKEKREIDIKLSSLKKEYQDTWDYEKIRAVVCQEIMKESIARRAERKAERERQKQLKSEAWNKKKAENIIFIGRGYSGLLSQKETNIEKLEKNNLPIIENDKDLATLLQVEYKTLRYLTYHRDVVTFDNYYRFDIPKKSGGKRHIAAPKTELKKAQRQILEEILEKIEVSEFAHGFIKSKSVVTGAKFHKSGPDLLINMDLENFFPTITFERVRGLFQSLGYSGYISSLLAMICTYCERIPVEIKGETKYIKTSERILPQGSPASPMITNIICNKMDKRINGLCKKLGFTYTRYADDMSFSYIGDTENLAVGSFLNSIKKIIEDEGFNIKKEKTHILRKNNRQYITGIVINNEEIGVPRKWVDILRASIHNAEKLKNSGESIPKETKMEIKGRIAWLKSVNEERYKKIIDKGLKLLEN

SEQ ID NO: 6358 - protein, 495 aa, Cellulosilyticum lentocellum
  source 1..495: note = Related to NC_015275.1
MIDQTHSQNQRQSYRSEVSQKGKKEFTLLKMQEYGFWPKNLPTPYEKQKAETKEDYEKRKALLKEYDKLSNDLANLYGEKEAINLKLQELKKKYTATWDYEKIRQDIAKTIMAESIARRAERKKEREVAQAEKSAAWQKAKTENIVFIGKGYSSGLQDKLTHTSKLESLGLPLIETDHQLASFLGLTYTELRFLTYHRDVVTSDHYYRYEIPKKKGGFRQIAAPKPLLKQVQRKILVEILEKLPIAEEAHGFIKNRSVVSSAEAHIKAPTLLITMDLENFFPTLTFERVRGMYKSFGYSGYIASLLAMLCTYCERMTIEVSGTTKYVKTSPRILPQGSPASPMITNIICKNLDHRLKGLSATYQLTYSRYADDMSFSYNEAEENLKLGQFLGLVSLIVEDEGFHIKASKTKILRPHNRQCLTGIVINNEEIGVPKKWVKNLRAAIHHAKLLNQTGQPIPTSLSQEIQGKTSWLKSVNPERYKTIIEAGLSVIAHF

SEQ ID NO: 6359 - protein, 504 aa, Clostridium cavendishii
  source 1..504: note = Related to NZ_FQZB01000006.1
MMDSSSAKRENYRDMVGKLGKKEFTLLKMQEYGFWPKDLPTPYEIQKNESPESYAKRKKLLKEYEKIIDNIAKVYEEKDTINDKLKELKKKYDETWDYEKIRLDVAQQIFKESIERRENRKRLKEEERIKRSNIWKQKKSENIVFIGKGYSNLLKDKESNKDKLLKNGLPIIEDDKALAEFLRLDYSQLRFLAYHRDVTTCDNYYRYIVPKRNGKLRNIAAPKSVLKFSQKRILEDILGKLEVSKNAHGFLKEKSVITGALAHGTGIDLLINMDLEDFFQTITFERVRGMFKSFGYSGYISSLLAILCTYCERMEIEVKGEKKYVATSRRVLPQGSPASPMITNILCLRLDKRLEGLASKYGFLYTRYADDMSFSLEDKSKLLLFKEEKVDKESENKEINKFLGLASKIIIEEGFKINKSKTKFLRKNNRQYITGIVINNKEIGVPKKWVRNLRATIHNASKLKINGDIPDELVNEISGKVAWLRSVNGERYKAIIEKAMEVIK

SEQ ID NO: 6360 - protein, 496 aa, unidentified
  source 1..496: note = Related to JAAYMT010000202.1; note = Clostridiales bacterium
MIENRHQSTANYRKSIEIMGKREFTLLKMQEYGFWPKNLPTPYERQANESEEEFEARQKLTKKYEKLGEDIAKLYEEKEKIEEKLRQLKKEYNDTWDLDKIRKDVARKIMEESKARRAERKRQRELEKKQRSEAWNKRKQEEIVFIGKGYSQLLQQRESDDDKLSKLTLPIVKTDRELAELLGIEYAQLRFITYHRDVVTEDHYHRYAVPKRKGGYRNIAAPKPILRKAQRKILDEILCKIPVSDCAHGFIKGKSVVSSASEHIGSPALVINMDLEDFFPTITFERVRGMFKSFGYSGYIASLLAMICTYCERMPMEVKGEKRYVRTSPRILPQGSPASSMISNILCIKLDKRLSGLAKKNNFTYTRYADDMSFSLKGEEKIKLGSFCGLVSKIASEEGFKINKSKTRFLRANNRQSITGIVVNNEKLAVPKKWVKVLRAAIHNAKKEKEKGELAPQTIRKISGMAAWLKSVNEEKYKKIISEANELINRCQKSDV

SEQ ID NO: 6361 - protein, 493 aa, unidentified
  source 1..493: note = Related to JACMJL010000131.1; note = Clostridiaceae bacterium
MTENNELLQNKKADYRESVNNMGKKEFTLLKMQEYGFWPKDLPTPYERQDDETPEQHKERQTLLKEYQKIIDNIAKLYEQKDEINKRFQELRKEYDETWDVDKIRLDISKKIMEESITRRSERKKRKELEKQQQAEIWQKKRAEEILFIGKGYSQLLQDRSSDDNKLSTQGLPLIKTDKELAEFLGVEYKQLRFLVYHRDVISVDHYHRYTVPKRRGGVRNIAAPKPMLKTIQRKILEEILSKLTVSEYAHGFLKGKSVVSGAQAHIGQHTLLINMDLENFFPTITFERVRGMFMAFGYSGYISSLLAMLCTYCERMAIEVRGEIRYVKTSPRILPQGSPASPMITNIICVKLDRRLSGLAERTGYIYTRYADDMSFSLKEENYMDEGKLCGLVSKIVNEEGFKLNKTKTRFLRKNNRQCITGIVINSEQLGVPRKWIRAFRAAVHNANKLKLTGTVPSKVKNEISGMAAWAKSVNAERYKEVIAAAIAVIQD

SEQ ID NO: 6362 - protein, 512 aa, Pseudobacteroides cellulosolvens
  source 1..512: note = Related to NZ_LGTC01000001.1
MMDNNIERDRRAEYRDNVQSMGKKEFTIYKMIEYGFWPKGLPTPFERQANETPEQYQERQRLFSEYKKIADEIAKVYKEKSEIDTKLRELKTQYNGSWDEERIRKDIAQRIMKESKERREQRKKQLELAKEQKSSAWKKKKEDSIVYIGNGYSSMLHYKSGNQDRLVANGLPIINTDRELADFLGVEYRALRFLVYHRDVVTMDHYHHYKVPKRKGGTRNIAAPKKVLKNVQKKILEGILEKLACQDNDCLGNNRFSNACSDNAHGFIKGRSVVTGADIHVKSPALLINMDIEDFFPTITFQRVRGMFVGFGYSGYIASLLAMLCTYCERMEIEVNGKRKFVATTGRILPQGSPASPMITNILCRSLDKRLNGLASKFGFIYTRYADDMSFSTKETVLADAGKLCGLVTKIISDEGFKLNFKKTRFLKKNNCQSITGVVVNSHQLGVSKKWVKTLRAAIYNARKAMAKGKVPYEIVSEISGMAAWLKCVNEERYKSIITDAYDLIRDINKII

SEQ ID NO: 6363 - protein, 494 aa, unidentified
  source 1..494: note = Related to MWAJ01001053.1; note = Firmicutes bacterium ADurb.Bin419
MIENNRVPKDKKANYRELVNQMGKKEFTLLKMQEYGFWPKDLPTPYEIQKNETPERYAKRQGLLKEYQRLIDQIAKLYEEKDDINKKLWELKKEYDDTWDLEKIRLDISQKIMRESIERRAERKKQRELEKQKRSLDWQQKKSEQIVFIGRGYSSLMNDTQIDEEKLKTQELPIIKTDRDLAEVLGIDYPSLRFLTYHREVVSVDHYHHFKIPKKKGGERSISAPKSKLKTAQRAILEKILSKLNISDQAHGFLKGRSVVSGAQTHISQPALLINMDLEDFFPTLTFERVLGMFRAFGYSGYISSLIAMLCTYCERMEIEVKGKPKYVATSKRILPQGSPASPMITNIICRDLDKRLNGLAKSFGFIYTRYADDMSFSINEVSDLNEGRFCGLVSKIVSEEGFKINKAKTRYLRKNNCQSVTGIVVNNDQLAVRKKWVKRFRAAIYNARKQKAAGELSNATKNEISGMAAWLKSVNEEKYRDMIGAVMDIVKED

SEQ ID NO: 6364 - protein, 486 aa, unidentified
  source 1..486: note = Related to JAFGGO010000116.1; note = Candidatus Lokiarchaeota archaeon
MTENTKQDYRTLINQMGKKEFTIMKMQEYGFWPKDLPTPYEKQLNETPEQYSKRKALVEDYKSIIERISKLYKEKQEINDKLRDLRKKYDETWDIERIRKDIAQTIMKESIARRTEKKKQRELEKHAKSEAWKKKKAEQIIFIGKGYSSFLYDNETDQPKLELQGLPVIKSDIDLANFLEIDYKKLRFLSYHRDVVTVDHYHRYTIPKRKGGMRNIAAPKPILKSVQRKILEDILNKFSLSQQAHGFIKERSILSGALAHNIQPALVINMDIENFFPTISFERVRGMFKSAGYSGFISSLLAMLCTYCERVSIEVKNKTRFIATTKRILPQGSPASPMITNIICRRLDQRLNGLASKFGFTYTRYADDMSFSINDETNVKVGRFYGLVSKIVKDEGFEINKEKTRFLRKNNRQSITGVVVNNEKLGVNRMWMRRFRAAIHNASKLRSNGDLPIEVKRELSGMASWVRSVNPERYKKLIETAMEVIK

SEQ ID NO: 6365 - protein, 496 aa, unidentified
  source 1..496: note = Related to SHMU01000007.1; note = Candidatus Lokiarchaeota archaeon
MTESNDIQKRTKSDYREMINKMGKKEFTLMKMQEYGFWPKDLPTPYERQENETKEHYEARKQLLKKYKGIVDQIADLYQEKADINKKLRDLQKQYDETWDIEKIRKDVAKQILKESVTRRAERKRQKELEKQRRSEAWKKKKAETIVFLGKGYSSFLNHFETDESALQSFQLPIIKTDKDLAEFLNIDYKKLRFITYHRDVVDIDHYFRYTIPKASGGKRLIAAPKNILKSAQRTILNDILTNIPIDEHAHGFLQGKSIITGAKSHPIQPELLINMDLEEFFPSITFERVRGMFHSFGYCGHVSTLLAMICTYCERIPLEIKDKEKYVAVSKRILPQGSPASPMITNIICYKLDRRLSGLAKTFNLTYSRYADDMSFSLKDKNEAEVNISRFLGLAMIIIKDEGFKINHNKTRFLRQNNRQAITGIVINKDRIGVPRKWIKQFRAAIYNAEQLQTNGGLPGEIKREIAGMASWVKSVNPERYKKYLTRAHNLLSEK

SEQ ID NO: 6366 - protein, 449 aa, Paludisphaera sp.
  source 1..449: note = Related to NZ_JAALJI010000007.1
MAIQRQTDPSDLWRAIIQAGGIQPYIDAQLAERGFLVARRETDGLSERELADYKKSLKAEAQERARLRREAWAAYRAEHIVHLGDGVYWNDEPGPDKWDLPNAEERAAENELPPLDSPRQLADALGLTIPQLRWLAFHREAATRIHYRRFTIPKRDGSERAIWAPMPRLKRAQHWILRNVAEKLPVHGAVHGFVAGRSILSNASAHHDPKVAVRIDLKDFFPTVTLRRVKGLFRKAGYREHVATLLALICTESPREIVQNEGATYYVALGPRCLPQGAPTSPALTNALCLRLDRRLSGLARRQGWRYTRYADDLTFSRPSDFGGPPAIGKLLGSVRRIVEAEGFAVHDGKTAIRRRGGRQAITGLVVNGDRPPRATREFKRNLRAAIHNLESGRATPEAEPPQVLVGRAAFVAMSDPALGLSLLDRLSRATERDGSGDDSRSEPPRPES

SEQ ID NO: 6367 - protein, 437 aa, Paludisphaera sp.
  source 1..437: note = Related to NZ_JAHPZK010000021.1
MAMQRQTNPFDLWRSIVQAGGIQPYINAQLSERGFLVARRETDGMSERELADYKKSLKAEAAERRRLRREAWAAFRAEHIVHLGDGVYWSDEPGPDRWDQPNAEVRAAENELPPLDSPRQLAEALGLTIPQLRWLAFHRDAARRIHYRRFTIPKRDGSERAIWAPMPRLKRAQHWILRNIAEKLPVHGAAHGFLPGRSILSNAAPHCDSKVVVRIDLKDFFPTVTLRRVKGLFRKAGYREHVATLLALICTESPREIVEQDGETYYVALGPRCLPQGAPTSPAITNALCLRLDQRLSGVARSQGWRYTRYADDLTFSRPADSKEAPGIGRLLGTVRRVVGDEGFTIHDKKTAVGHNGGRQRVTGLIVNGDRTPRAPREFRRNLRAAIHNLVTGKESPSAEPPSVLAGRAAFVAMTDPSLGRAMLERLSQAVERSPEA

SEQ ID NO: 6368 - protein, 434 aa, Singulisphaera acidiphila
  source 1..434: note = Related to CP003364.1
MSRTTSRTNDPMTLWRAIEQAGGTQAYVEAQLAERGFLVKRRETDKMSERELDAYKKSLKAEAKEKRALQADAWRAYKTSHIVYLGEGIFWKDDPGGPDKWDLPHAEERAAENELPPLDSPRQLAEALELSLSELRWLAFHRDAATRIHYRRFTIPKRDGSERAIWAPMPKLKSAQHWILRNIAEKLLVHGSVHGFLPGRSTLTNAAAHANPKVVVKMDIKDFFPTVTLPRVRGIFRKAGYREQVATLLALICTESPREVVEHDGQTYYIALGPRCLPQGAPTSPALTNTLCLRMDQRLSALAKRFGWRYTRYADDLTFSLPHDHKDQPRLGALVGTVRRVVEAEGFTIHPSKTRVARSGARQTITGLVVNGDQAPRAPRKFRRELRAAIHNSRNGKPLHEGESPTTLAGSAAYVYMTDPELGAKLLDAIKQEA

SEQ ID NO: 6369 - protein, 439 aa, Tautonia sp.
  source 1..439: note = Related to NZ_WEZF01000007.1
MSRATDLLSLWRAIEHAGGIDAYVNTQLAERGFLVARRDVDTMSDRERTAYKKQLKEEAAHRRELKREAWKAYRARHIVHLGEGIYWNDQATKDPWDAPDAEERAAENELPPLDSPRDLAEALGLTISQLRWLAFHRDAATSIHYRRFTIPKRDGSERAIWAPLPTLKAAQHWILRNIAEKLPVHGAAHGFLAGRSILSNASNHVDSALVVKMDLKDFFPSVTFRRVKGIFRRAGYREQVATLLALICTEAPREIVEQGKTTYYVALGPRALPQGAPTSPALTNTLCLRLDRRLDGLAQSLGYRYTRYADDLTFSLPRSHEGDPKLGTLLGKARRVVESEGFTVRLEKTRVARPGARQQVTGLVVNGAASPRTPRTLRRQLRAAVHNLQTGKPRPDADTPERLAGLISYVAMTDPTLGQALQAQWTNPSKPTSSDDSPS

SEQ ID NO: 6370 - protein, 431 aa, Tautonia plasticadhaerens
  source 1..431: note = Related to NZ_CP036426.1
MSRTTDLTSLWRAIERAGGIDSYVNGQLSERGFLVERREIDTLSDREREAYKKQLKEEAARRLELRREAWQAYKARHIVHLGEGIFWDDHATEDKWDAPDAEERAAENELPPLDGPRDLAEALGLTIPQLRWLAFHRDAATSIHYARFTVAKRDGSERAIWAPMPTLKAAQRWILRNISEKLPIHGASHGFLPGRSIKSNAQEHVGSKLVLKMDLADFFPSVTYPRVRGIFRRAGYREQVSTLLALICTEAPREVVEEGGTTYYVALGPRCLPQGAPTSPSLTNTLCLRLDRRLSGLARSLGWRYTRYADDLTFSLPASHGGEPRLGALLGGARRVVESEGFAVRLDKTRVARAGARQQVTGLVVNGEGPARVPRRLRRQLRAAAHNLEVGRAGPDADPVDRLAGLASFVCMTDPALGAALLGRLRGGSAG

SEQ ID NO: 6371 - protein, 302 aa, unidentified
  source 1..302: note = Related to JAIENG010000522.1; note = Gemmataceae bacterium
RWLAYHRDAATKLHYRRFVIPKRGGGERAIWAPMPLLKAAQHWILRNVAERLPVHGAAHGFLAGRSILSNAAAHPDARIILKMDIKEFFPTVSLTRVKGIFRKAGYREQVATLMALICTEAPREVVERDGKTWYVSLGPRCLPQGAPTSPALTNTLCLRLDRRLAGLAAKLGWRYTRYADDLTFSLPDGHKDEPKTGPLMGFVKRIVAAEGFAVHPDKTSVRRKGGRQQVTGLVVNGGGPPRVTRDLKRRLRAAAHNLARGKGLKEGETPARLEGFAAYVHMTDEKLGGKLLAAFRGGVRQG

SEQ ID NO: 6372 - protein, 466 aa, unidentified
  source 1..466: note = Related to JAHJCH010000128.1; note = Myxococcota bacterium
MNQTNQDPRPSVDLGALWRAIEQAGSIQAYVNQQLSARGYLIERRDTARMSAAELKRYKQQLKDEAVEKRRLKAEAWAAYKAAHIVHLGEGIFFNEENDFDRFDLREPEARAAENELPTLDKPAQLAEALGLSVSELRWLTFHREAAESIHYQRFTIPKRRGGEREIWAPMPKLKAAQRWVMREIVEHLPVHGAAHGFIAGRSILTNAQVHLNAEILVNFDLQDFFPTVTWRRVKGVFRKAGYREQVATLLALLCTEPPREVIEHEGKRYYIALGQRCLPQGAPTSPAITNALCLRLDRRLSGLARSLGWRYTRYADDLTFSLPASEAKPKAKKGKAKPTKAKPTKAKKAQGALTGEAALARLMGGVKAIVAAEGFALNPDKTAIKRPSGRQGVTGLVVNGDGSPRVPREVRRRLRAALHNLERGQPLREGESYAHLAGLAAFVYMTDPALGGALLKRIGALARQG

SEQ ID NO: 6373 - protein, 433 aa, unidentified
  source 1..433: note = Related to JACKDP010000006.1; note = Myxococcales bacterium
MATRPNLVTQWVELWGAIARAGGIDAYITAQLTERGYLAKRRSTDGMSAAELKRYKAELKREAAERRKLKADAWQAYRASHIVHLGEGVFFNDDLDFDAFDLAEPEARAAENELPKLDKPQQVADALGMTLAELRWLSFHREAATGVHYRRFEIRKRSGGMRAIWAPLPRLKAAQRWILREIVEHLPVHGAAHGFLAGRSILTNAQAHTGSKLILNVDLKDFFPSVTWRRVKGLFRKAGYRDQVATLLALLCTEAPREIVEHEGEKLFIALGPRCLPQGAPTSPAITNALCMRLDRRLAGLARSLGWRYTRYADDLTFSLPADHKGAPGLSKLLGALHAVVAAEGFAVNPAKTRVSRPGARQKVTGLVVNGDAAPRVPRALRRKLRAAAHNLAQGKPLPAGESVAQLAGYAAFVHMTDPVLGAALLGKFGEHR

SEQ ID NO: 6374 - protein, 436 aa, unidentified
  source 1..436: note = Related to JACKDL010000029.1; note = Myxococcales bacterium
MATRPNDRQALWAAIARAGGIDAYVQAQLVAGGFAAERKPTDGMSKRELARYKAELKAEAAEKKRLKAEAWAAYKATHIVHLGEGVYFNDADDFDRFDLAEPEARLAENGLPRIDDPQALAEALALSVPTLRWLTFHRDAATMLHYRRFTIPKKSGGERAIWAPMDTLKSAQRWVLRHIVEPLPVHGAAHGFVPGRGIVSNAQAHSEARILINVDLKDFFPTVTVRRVKGVFRKAGYREQVATLLAMLCTEAPREVVRHGETDYFIALGPRCLPQGAPTSPALTNTLCLRLDRRLSGLARQRGWRYTRYADDLTFSLPVKAAKGADGNVGTLLGAVRAIVEAEGFALNPKKTRICRPGGRQKVTGLIVNGAEPPRAPRALRRMLRAAVHNLEQGKPLPEGETVARLAGYAAFIYQTNPQEGAELLRRFAAFAGEQA

SEQ ID NO: 6375 - protein, 433 aa, unidentified
  source 1..433: note = Related to JAHQVJ010000095.1; note = Myxococcales bacterium
MSTRTTDLAALWLAIAEAGGIDNYVQNQLVEHGFLVERRETDTMSKAELKRYKAQLKREAAERRELRKAAWAAYRETHIVHLGDGVYYNDAATMDRWDLDEPEARAAANELPRLDGPDDLAKELGITVAQLRWLAVHRDAATRIHYTRFTIPKRDGSERAIWAPLPRLKAAQRWILRNVVEHLPVHGAAHGFLAGRSVVTNAAAHVGSKLIVNIDLKDFFPTITWRRARGMFRKAGYREQVATLLAMICTEAPREVVEWEGQSYFVALGPRCLPQGAPTSPAITNTICLRLDRRLSGLARRFGYTYTRYADDLTFSLPLAHTGEPRVGALIGAVGHIVRAEGFQVHPSKTRVQHTGRRQQVTGLVVNGREQPRVPRSLKRQLRAAVYNLRRGRPLPAGERFERLIGYAAWIHQAEPELGSELLAALGGLNPTA

SEQ ID NO: 6376 - protein, 370 aa, unidentified
  source 1..370: note = Related to JABGPD010002235.1; note = Proteobacteria bacterium
MAALWRGIDEAGSCENWVQQQLVEHGFIVSRRDTDNMSKRELANYKKQLKREAAEKKALKKKAWEAYKANHILHLGEGDWWNDAATFDKWDLPEPEARAAENELPQLDSPDDLAEALGLTIKELRWLSFHRDAAKTIHYRRFTIPKRNGSKRPIWAPLPKLKEAQRWILHNIVEHLPVHGAAHGFLTGRGIVTNARPHGGSALLLNIDLKEFFPTVTWRRVRGVFRKAGYREQVATLLALICTEAPREVVEFNGETWYVALGPRCLPQGAPTSPALTNTICLRLDRRLSGLAKKNGYTYTRYADDLTFSLPHGFTGPPKTGMLIGAVKKIVVAEGFAVNPDKTRVLRSGGRQQVTGLVVNGPRGPRVPRK

SEQ ID NO: 6377 - protein, 439 aa, unidentified
  source 1..439: note = Related to LR594586.1; note = Gemmataceae bacterium
MTTAPVAPAPSADPQVLWRLIVQAGGMKAYIDGQLKEKGFLVTRRDADSMSDREKDGYKKALKQEADERRKLRRETWGAYKANHIVHLGEGVFWSDDLAPDKWDTPNSEERAAENELPAIDRPEQLAELLGVTIPQLKGLAYHRDAATSLHYVRFTIPKRDGTERPIWAPKKRLKAAQRWILHNIVERLPVHGAAQGFLVGRSILSNAAVHANAKAILKMDIKEFFPTVTVRRVKGVFRRAGYRDGISTLLALICTEAPREVVEVEGETYYVSLGPRCLPQGAPTSPSLTNALCMRLDRRLEGLAKKLGWRYTRYADDLTFSLPAEHKGKPRLGTMIGCVTRIVAAEGFEVKAEKTRVHRTGGRQSVTGLVVNGDGPPRVSRTVRRQLRSAVHKLKTGKPLKEGESLARLSGYAAFVYMTNPDLGKKLLADINGATGAG

SEQ ID NO: 6378 - protein, 442 aa, Gemmata sp.
  source 1..442: note = Related to NZ_JAGKQQ010000001.1
MSTTTPAPSPDAQTLWRLIVQAGGMKAYIDGQLRERGFLVTRRDADAMSDREKDAYKKALKQEAEERRKLRRETWGAYRANHIVHLGEGVFWTDEPKEDKWDTPNSEERAAENELPALDKAEQLAEALGVTIPQLKGMAYHRDAATSLHYVRFTIPKRDGTERPIWAPKKRLKAAQRWILHHIVERLPVHGAAQGFLVGRSILSNALVHENPKILLKMDIKEFFPTVTVKRVKGVFRRAGYRDGISTLLAQICTEAPREIVNVEGKTYYVSLGPRCLPQGAPTSPAITNALCLRLDRRLAGLAKRYGWRYTRYADDLTFSLPMEHKGQPKLGSMLGCARRIVEAEGFEVKTEKTRVHRTGGRQSVTGLVVNGDNTPRTPRKLRRQLRSALHKLKTGKPLKDGESLARLTGYAAFVYMTNQELGRKMLADLHGFEDKPEGPAV

SEQ ID NO: 6379 - protein, 437 aa, Isosphaera sp.
  source 1..437: note = Related to PNKH01000078.1
MTTAAPAPPPTAPDLATLWRLIVQAGGMKAYVDARLEERGFLVVRRDADAMSDREKDAYKKELKQEAEERRKLRREAWAAYKANHVVHLGEGVFWTDEVREDKWDTPNSEERAAENELPALDKPEQLAEALGVTVPQLRGMAYHRDAATSLHYVRFTIPKRDGTERPIWAPKKRLKAAQRWILQNIVERLPVHGAAQGFLAGRSILTNAAVHVNAKIILKMDIKEFFPTVTVRRVKGVFRRAGYRDGIATLLSQICTEAPREVVELDGKTYYVSLGPRCLPQGAPTSPALTNALCLRLDRRLAGLAKRYGWRYTRYADDMTFSLPAEHAGPPKLGAVMGCVRRIVAAEGFEVKDDKTRVHRTGGRQAVTGLVVNGDGEPRASRTLRRQLRSAIHKLKTGKPLKEGETVARLHGYAAFVYMTDPKLGKKLLADLNGVE

SEQ ID NO: 6380 - protein, 434 aa, Zavarzinella formosa
  source 1..434: note = Related to NZ_JH636447.1
MATTTTDPIALWQSILQAGGVRAYIDGQLKERGFLVERRDTDAMSDREKDQYKKALKQEAAERKKLKKEAWAAYKTAHIVHLGDGVYWSDESKPDKWDTPNSEERAAENELPALDSPKQLAEALGLTIPQLRGMCHHRDAATKLHYVRFTIPKRDGKPRPIWAPLPKLKAAQRWILHNIVERLPVHGSAQGFLVGRSTLSNAAVHTNAKILLKMDVTDFFPTVTWRRVRGVFRRAGYREQIATLLALICTEAPREIVQHDGKTYYVSLGARCLPQGAPTSPSLTNALCLRLDRRLTALAAKLGWRYSRYADDMTFSLPADHAGKPQLGKLLGCVKRVVTAEGFEVKDEKTRVHRKGGNQSVTGLVVNGDGTPRTPRKVRRELRAAIHNLEKGKPLKEGETLPRLMGMAAYVYMTDAKRGKELLTALRRFAAGES

SEQ ID NO: 6381 - protein, 431 aa, Fimbriiglobus ruber
  source 1..431: note = Related to NZ_NIDE01000001.1
MNSTRPDPLTLWRQITQAGGTQAYVTEQLRERGFLVERRDVEGMSDREKDQYKKALKQEAIETKKLRREAWAAYKAAHVVHLGEGVFWTDGAKPDKWDTPNGPERAAENELPPLDTPEQLAEALGITLAQLRGLCYHRDAATSIHYVRFAIPKRDGSERPIWAPLPRLKAAQRWILHNIVERLPVHGAAHGFLAGRSIATNAAAHASAKMILKMDVKEFFPTVTWRRVRGVFRRAGYNESIATLLALICTEAPREVVDLEGTTYYVSLGPRCLPQGAPTSPALTNALCLRLDRRLTGLAAKLGWRYTRYADDMTFSLPAAHAGPPKLGALLGCVKRVVEGEGFRVHADKTRVARSGGRQTVTGLVVNGTSQPRVSRKLKREMRAAVHNLGKGKPLPEGESVARLLGYAAYIYMTDPETGRKLLADLNAIPD

SEQ ID NO: 6382 - protein, 428 aa, Urbifossiella limnaea
  source 1..428: note = Related to NZ_CP036273.1
MTTPRTDPLTLWRQIDQAGGVRAFVDAQLRERGFLVERRDADKMSDREKDQYKTALKQEAAERKTLAREAWKAYQAAHIVHLGDGIYWSDDATPDKWDTPNSEERAAENELPPLDSPAQLAEALGVTVAQLRGLTYHRDAATSLHYCRFAIPKRDGSERPIWAPLPRLKAAQAWVLHNVVERLPVHGAAHGFLAGRSTLTNAAVHTNANLVLKMDVKEFFPTVTWRRVKGVFRRAGYRERVATLLALLCTESPREVVQLDGTTYYVSLGPRCLPQGAPTSPALTNALCLRLDRRLTGLAAKLGWRYTRYADDLTFSLPAAHVGPPRLGAMIGCVTRVVETEGFRIHPEKTRVARPGGRQAVTGLVVNGDAAPRAPRALRRQLRAALHNRKVGKPRPDGDTEAQLHGLAAYIYMTDPVLGRKLLAEIDG

SEQ ID NO: 6383 - protein, 434 aa, unidentified
  source 1..434: note = Related to JAEUIF010000535.1; note = Planctomycetia bacterium
MTMTRIADPLTLWRNVVQAGGRQAYIAAQLEQRGFLVARRETDGMSERELAQYKQSLKAEAAERRKLRQEAWLAYRANHIVHLGDGVYWHDEATKDRWDLPYAEERAAENELPALDSPQQLADALGLTVAQLRWLVFHREAATRIHYHRFTIAKRDGSERPIWAPCKKLKAAQRWVLRNIVEKLLIHGAAHGFTAGCSVLSNARQHTNSRIVVKLDIRGFFPTVTLPRVRGVFRRAGYRDQLATLLALLCTEAPREVVEQNGQTYYIALGPRCLPQGAPTSPALTNALCLRLDRRLTGLAHQLGWRYTRYADDMTFSLPAGHTGAPRLGTLLGIVQRIVEEEGFRLHPDKTHVARASSRQKVTGLVVNGDGVPRVSRKLRRELRAAAHRLKHGKPLKEGESLARLAGYAAYIHMSDPQRGAALLAAFKSAAPAT

SEQ ID NO: 6384 - protein, 435 aa, Minicystis rosea
  source 1..435: note = Related to CP016211.1
MMTTRSDYQRLFDLWRAIGQAGGVNAYVQQQLRERGFVLERKKTDGMSKAELSAYKKSLKEEAAERRRLKKEAWQAYRATHIVHLGEGIFWNDESDLDKWDHPHAAERAAENELPPIDSPQKLAEAMGLSLPDLRFLSFHREAAESIHYRRFTIPKRNGSERAIWAPLPKLKAAQHWILRNVVERLAVHGASHGFLADRSIATNAAAHTGAKIVVKVDLKDFFPTVTLRRVKGIFRRAGYRDQIATLLALICTEAPREIVEHEGKQYYVALGPRCLPQGAPTSPALTNTLCQRLDRRLAGLAKRLGWRYTRYADDLTFSLPESHKDKPKLGVLLGSVGRIANDEGFQVHPDKTNVARKGSRQKVTGLVVNGTGAPRVPRALKRQIRAAIHNAGRGKPLQAGESLSRLAGYAAYIHMTDPKLGAKLLQQLAAIEAK

SEQ ID NO: 6385 - protein, 433 aa, Sandaracinus sp.
  source 1..433: note = Related to JACKED010000003.1
MTRSEHQRLVDLWRAIGNAGGVDAYVRGQLRERGFVLERKDTAQMSKAQLAAYKKSLKEEAAERRRLKKEAWVAYRATHLVHLGEGIHWSDEADVDRFDHPRAEERAAENELPPFDKPEQLAEALGLSIPELRWLAFHRDAAEKIHYRRFTIPKRDGSERAIWAPLPKLKAAQRWILRNVLEPIPIHGASHGFVPNRSILSNASRHTGAKLVVKIDLKDFFPTISFRRVKGVFRQAGYRDRIATLLALLCTEAPREIVQDGDKELFVALGPRCLPQGAPTSPAITNIVCFRLDRRLTGLAKKLGWRYTRYADDLTFSLPAEHVGAPKLGLLLGSVGRVVADEGFRVHPRKTRVARSGGRQAVTGLVVNGAASPRVPREIRREIRAVLHNLKHGKPLRDGENLHRIAGYVAYVHMTNPELGKSLRKQLEALDAV

SEQ ID NO: 6386 - protein, 445 aa, unidentified
  source 1..445: note = Related to nan
MATSTDYSRLVDLWQGIDRAGGIDNYVQKQLKERGYVVERKATDEMSRVELSRYKKALKAEAAERRNLQKESWLAYRATHIVHLGEGIFWNDDLDFDRWDLRNPEERARENELPELEDPKALASALGLSIAALRWFAFHRDDATFVHYHRFTIPKRDGSARAIWAPSPRLKAVQRWILRQIVERLPVHGASHGFMAGRSIKSNASVHTGAKIVVKVDLKDFFPTVTLPRVKGIFRRAGYREQVATLLALLCTEAPREVVEIKGKTHFVALGPRCLPQGAPTSPGLTNTLCLRLDRRLAGLAAKLGWRYTRYADDLTFSLPKAKKTRKKKGTKAKKEPPHVGALLGGIAKIAASEGFVVHPNKTRVARSGGRQQITGLVVNGDGPPRVPRALRRQVRATLHNLGQGKPMRSGETLSQLAGYIAYIQMADPKLGTKLRAQLLALDLS

SEQ ID NO: 6387 - protein, 357 aa, unidentified
  source 1..357: note = Related to JAGQIR010000020.1; note = Myxococcales bacterium
MATQIDYTRLLDLWRAIEQAGGTDKYVQQQLQERGYLVERKATDDMSKADLERYKKALKAEAAERRKIKKDAWLAYRASHIVHLGEGVFWNDDLDFDRWDLRNPEERANENELPALDNPKQLAEALGASIAELRWLAFHRDDATFVHYHAFTIPKRDGSMRQIWAPNRKLKAAQRWINREIVERLPVHGASHGFLAGRSIKSNAAAHTGAEIVVKIDLKDFFPTVTMPRVKGIFRKAGYREQVATLLALLCTEAPRHVVDIKGKVHYLALGPRCLPQGAPTSPGLTNTLCLRLDRRLAGLAAKLGWRYTRYADDLTFSRKKGASSAEVGEMIRKAVDIVGHEGFTVHPDKTRVMRRG

SEQ ID NO: 6388 - protein, 431 aa, Nannocystis sp.
  source 1..431: note = Related to JADJRG010000001.1
MAFRIDTTRLLDLWRSIEQAGGRDRFIQQQLTERGFLVERKPTEGMSKAELERYKKSLKEEAAERRKLAREAWLAYRASHLVHLGEGVFWSDDHDFDRWDLRNPEERAAENELPKLEHPKALAEALGLSIAELRWYAFHREDATFLHYHAFTIPKRSGGLRSIWAPNRRLKQIQRWIHREVVERLPVHGAAHGFLAGRSIKSNAAVHAGATTIVKVDLKDFFPTVTYARVRGVFRKAGYREQVATLLALLCTEAPRRVLEIDGKTHYLALGPRCLPQGAPTSPGLTNTLCQRLDRRLVGLAKKYGWRYTRYADDLTFSLPATHQGPPRLGALLGGVAMIAAGEGFVVHPDKTRVSRAGGRQQVTGLVVNGEQGPRVARETKRQIRAALHNLARGKPLQEGETLSRIAGFIAYIQMSEPELGKRLRAQLAAL

SEQ ID NO: 6389 - protein, 435 aa, Nannocystis sp.
  source 1..435: note = Related to JADKFZ010000002.1
MATTFRIDYTRLLDLWRAIETAGGRDKYISAQLKEKGYLIERKPTDSMSKAELDRYKKTLKEEAAERRKLAKEAWQAYKAAHLVHLGEGVFWNDDLDHDKWDLPDAEERQAENELPKLDKPKQLAEALKVSMAELRVLAYHRDAATKLNYYRFTIPKRDGSKRAIWAPHRRLKAAQRWILREVVERLPVHGAAHGFMHGRSIASNAAAHTNASTVLKVDLKDFFPTVTLTRVKGVFRKAGYREQIATLLALLCTEAPRQVSEVDGKVYYLALGPRCLPQGAPTSPGLTNTLCMRLDRRLQGAAHKLGWRYTRYADDLTFSLPVGHKGKPQLGKLLGCISAIAVGEGFVVHPDKTKVSRSGGRQRVTGLVVNGQGAPRVPRELKREVRAALHNLSKGKPLRDGETLSRLAGMVAFITMTDRKLGQKLRAELDKLGA

SEQ ID NO: 6390 - protein, 433 aa, Nannocystis pusilla
  source 1..433: note = Related to NZ_JAIRAU010000043.1
MATTNRIDYNRMLETWRAVESAGGRDKYIEAQLKEKGYLVERKPTESMSKAELERYKKSLKDEAAEKRRLAKESWLAYKAAHLVHLGEGVFWNDQLDHDKWDLPGAEERQAENELPKLDKPKELAEALGVSIAELRRLAYHRDAATKLNYYRFEIPKRDGSKRAIWAPHRTLKAAQRWILREVVERLPVHGAAHGFLHGRSTASNAAVHRDSQILLKVDLKDFFPTVTLPRVKGVFRKAGYREQIATLLALLCTEAPRHVAEVEGTTYYLSLGPRCLPQGAPTSPAITNTLCLRLDRRLQGLAKKHGWRYTRYADDLTFSLPNDHKGKPHVGSLLGGISMIAAAEGFTVHPDKTRVHRSGGRQQVTGLVVNGGQGPRAPREFKREVRAAVHNLAHGKPLKEGETLSSLAGRIAYIYMTDKKLGKQLLAALSRV

SEQ ID NO: 6391 - protein, 458 aa, unidentified
  source 1..458: note = Related to JAGQIN010000580.1; note = Myxococcales bacterium
MTRARPTSSASPSSSLTGTWTRPRGEPMTTRSERLRDLWRSIEQAGGAEKYIQAQLRERGFVVERKPTDKMGKAELARYKQQLKAEAAERKRLAKEAWEARREHRVIHLGEGVFWNDQTDFDRWDLEGAEERAAENELPQLDNPAQLAEALGVTIPQLRWLAFHRDAATHVHYYRFTIPKRTGGERAIWAPHRRLKGAQRWILRNIVERLPVHGAAHGFLPGRSIASNAAHHTDAAAVVKIDLKDFFPTVTLPRVKGVFRKAGYREQIATLLALLCTEAPREVVEQDGKTYYLSLGPRCLPQGAPTSPGLTNTLCMRLDRRLLGLSRKLGWRYTRYADDLTFSLPKTHQGPPKLGALLSTVARIAADEGFTVHPEKTRIAKRGARQRVTGLVVNDAHGPRVPRTLRRRVRAMIHNLARGKPLREGETLGQLAGQIAFIHMTDPALGKRLAAQLSAIDG

SEQ ID NO: 6392 - protein, 434 aa, unidentified
  source 1..434: note = Related to JACKDW010000002.1; note = Myxococcales bacterium
MATDSQATRLRDLWRAVEQAGGVDKYIQSQLQERGFLVERRETDKMSKAELQRYKQQLKAEAAERRALKRDAWAAYREQHVVHLGEGVFWNDQSDLDRWDLRDADERAAENELPQLENPGQLAAALGLEIPQLRWMAYHRDAATKLHYYRFTIPKRSGGERPIWAPHKQLKAAQRWILRNIVERLPVHGAAHGFLPGRSIASNAAQHADSKIIVKVDLKDFFPTVTLPRVKGVFRKAGYREQIATLLALLCTEAPREIVESGGRTYYLSLGPRCLPQGAPTSPGLTNTLCLRLDRRLQGLASKLGWRYTRYADDLTFSLPGGHSGAPRVGTLLGSIARIAADEGFAVHPDKTRVARKGARQRVTGLVVNGDGTPRVPRTIKRQLRAAIHNLSQGKPLKEGETLSKLTGWIAYVHMTDPKLGKQLQAQLDAVGRG

SEQ ID NO: 6393 - protein, 434 aa, unidentified
  source 1..434: note = Related to JACKEV010000022.1; note = Alphaproteobacteria bacterium
MSTDPIALWRAIANAGGIDAYVSAQLVEKGFLVKRRPTDNMSKRDLARYKQQLKDEAAERRRLKKEAWLAYKANHIVHLGEGVYWNDAADADRFDHPKAEERLAENGLPVLDKPQQLADALEVPLTELRWLTWHRDAAARVHYRRFTIPKRSGGERAIWAPLPKLKAAQRWVLREIVEKLPVHGAAHGFVAGRSIATNAAVHADARVVVKVDLKDFFPTVTLPRVKGVFRKAGYREQVATLLALLCTESPREVVEEDGKTWFLSLGPRCLPQGAPTSPALTNTLCLRLDRRLTGLAQALGWRYTRYADDLTFSLPRPQGRKKPKPPQTAKLLGGIKTIVADEGFTVHPDKTRFARSGGRQQITGMVINDDHGPRAPRELRRQLRAAIHNLNQGKPLPEGESIDRLRGYVAYIRMTQPELGESLSAQLDAALSGA

SEQ ID NO: 6394 - protein, 464 aa, unidentified
  source 1..464: note = Related to JADKFE010000004.1; note = Deltaproteobacteria bacterium
MSDLTTLWLAVRTAGSVDNYVRQQLEAKGFLVKRRPTDGMSPKELEKYKQELKREAAEARSLRAAAWKAHKANHIVHVGEGVYWNDADDLDRFDVPQPEERQAENGLPPLDSPKKLAEALGLSIIELRWLSWHRDLATGVHYRRFTIPKRSGGERAIWAPMPKLKKAQRWILREIVEKLPVHGAAHGFLAGRSIATNAAAHNGALVVLKLDLKDFFPTLTLPRVKGLFRRAGYREQVATLLALLCTESPREIVEQDGKRLFVALGPRCLPQGAPTSPAITNAVCMRLDRRLAGAAAKLGWRYTRYADDLTFSRVRPAEAPVVEAAAPAAKPAKGKKATAAAETTPAPSQAPAARLSKLLGVVHEVVKDEGFIVHPDKTRVARSGGRQAVTGLIINGDQGPRPPRELRRRVRAALHHLAQGKPLPEGETVERVAGLIAYIRMTMPQEGERLYAELQKVTGAVAPA

SEQ ID NO: 6395 - protein, 432 aa, unidentified
  source 1..432: note = Related to JACKEX010000021.1; note = Alphaproteobacteria bacterium
MADDLMTLWRAVRSAGGRDAYVRAQLEEKGFLVRRRETDGMSKRELAKYKKELKAEAAERKRLAKEAWDAYKAAHIVHLGEGVYWNDAADFDRFDHPRAEERVAELGLPALDDPDALAEALGLGVAELRWLTYHRDAAKAIHYRRFTIPKSSGGERAIWAPLPKLKEAQRWVLREIVERLPVHGAAHGFVPGRSTATNAAAHADAEILVKVDLKDFFPTVTLPRVRGVFRQAGYREQVATLLALLCTESPREVVERGGETWYLALGPRCLPQGAPTSPALTNALSMRLDRRLTGLAKKLGWRYTRYADDLSFSLPVSKKKRKAAPNIGSLLGGVRIIVESEGFTVNEKKTQVAPPGARQKVTGLVINDGLGPRVPRADRRRIRAALHRLRLGKPLPEGESIERIEGWIAYIQMSQPELGERLAAELAEVRGG

SEQ ID NO: 6396 - protein, 432 aa, unidentified
  source 1..432: note = Related to JAGQPF010000572.1; note = Planctomycetales bacterium
MARQRTDIATLLRGIEQAGGIDAYVDAQLREHGFLVQRKPTDNMSQRELARYKKELKDEAAERRKLRKEAREAYETQHIVYLGEGVFWNDAYDYDKWDLEDAEERAAENELPALDKPVQLADALGITVPQLRHLAYHRDCAEMVHYRRFTIPKRNGGERAIWAPLPRLKGVQRWVLRAIVERLLIHGAAHGFVPGRGIHTNARIHRDASIVLKMDIKDFFPSVTFPRVRGVFRKAGYREQIATLLALICTEAPREIVEEDGKRWFVSLGPRCLPQGAPTSPALTNVVCLKLDRRLTGLAEKLGWRYSRYADDMTFSRPRGAKGPPNFATLRSRARQIVMDEGFRVHPDKTHVARRGARQTVTGLVTNGDLPPRVPRRNRRQIRAAIHNLGQGKPLHDGETVDTLAGYIAYIAMTDRAAADRLRQELSAALGG

SEQ ID NO: 6397 - protein, 430 aa, unidentified
  source 1..430: note = Related to PFUG01000414.1; note = Deltaproteobacteria bacterium CG_4_9_14_3_um_filter_63_12
MATTTPNYDDLWRSIAQAGGIDAYVTQQLKERGFLTERSDASQMSKNELKRYKASLKAEAAEKLRLKKEAWLAYRSQHIVHLGEGMYWNDAADIDGFDLAEPEARASENELPQLDNPKQLADALSLTVADVRWLSYHRDAARSLHYRRFTIPKKSGGERPIWAPMPKLKAAQRWIARHIVERLPVHGHAHAFLPARSINTNAKQHIGSKMVLQMDLVGFFPTVTFPRVKGIFRKAGYREQIATLLAAICTEAPREVLEHEGKTWFIAMGPRALPQGAPTSPGLTNTLCLRLDRRLTALAAKLGWNYTRYADDLTFSLLKSHKGKPNLGALMGCIKKVVTDEGFVVNADKTRVSRKGGRQKVTGLVVNGVQPPRVPREFKRRLRAAIHRLENGGALFEGETLDTLKGQAAYVFMTDPELGRKMLERLAKLG

SEQ ID NO: 6398 - protein, 445 aa, unidentified
  source 1..445: note = Related to JACOUH010000096.1; note = Planctomycetes bacterium
MARKRTDPVYIWRAILQAGGIDAYIEAQLAERGVKVEKKETAGMSARELEQYKKQLRAEAEERKKLKKEAWKAYKANHIVHLGEGVYWNDEKRQDKWDVAHAEERAAENELPPLDTPPQLAEALGLTVPQLRWLAYHREAATKVHYYRFTIPKRNGSERPIWAPLPKLKAAQQWIRVHIVEKLIVHGAVHGFLPGHSTLSNASVHRNPKIVLKMDIKEFFPTVTLPRVKGVFRKAGYREQVATLLALLCTEAPREIVHHGGKDYYVALGPRCLPQGAPTSPGLTNTLCLRLDQRLAGLAKKYGWRYTRYADDLTFSLPKAHDGDPHVGTLIGLVRRIVEDEGFAVHPDKTRLARSGGRQKITGLVVNGDLKPRVPRKLRRQMRAALHNLQCGKPLKEGETFARLAGYAAYINMSDPNLGARMLETFKIGLAATVTTNGEQTAEDK

SEQ ID NO: 6399 - protein, 435 aa, unidentified
  source 1..435: note = Related to JAGQQD010001043.1; note = Planctomycetaceae bacterium
MARRRTNVADLWRAIEQAGSVQAYVDQQLRERGFFVERRDAGQMSKRELAAYKKQLKEEAAEKRKLKAEAWQAYKANHIVHLGEHVFWNDGLDWDKWDLEHAEERAAENELPALDSPGQLAKKLDVSVAELRWLAYHREAATMLHYRRFTIPKRDGSERAIWAPLPKLKSAQRWILRNIVEKLVVHGAAHGFLPGRSILSNAAQHTDSKILLKMDLQNFFPTITLPRVKGVFRKAGYREQVATLLALICTESPREIVEHSDKTYFVALGPRCLPQGAPTSPALTNTICLRLDRRLAGLAKKHGWRYTRYADDLTFSLPQDHKGPPNLGTVMGGVKVVVAGEGFRIHPEKTRVARVGGQQKVTGLVVNEDRPPRVSRKLKRQLRAAIHNLQQGKPLHEGETLESLKGHAAYIAMSEPELGQSLLEQIAAVSEPVSN

SEQ ID NO: 6400 - protein, 432 aa, Roseimaritima ulvae
  source 1..432: note = Related to CP042914.1
MTERTTDLATIFRGIEQAGTIDAYVDGQLRERGFLVERRATDDMSQRELARYKKELKQEAAEKRKLRAVAWKAYKTQNIVFLGEGVFWNDALDWDKWDLENAEARAAENELPPLDKPQQLAEALQLTISQLRWLAYHRDVATSIHYRRFTIPKRDGSERAIWSPRPTLKAAQRWVLRNIVERLTVHGATHGFLAGRSIASNAAAHTDSQMIVKMDLKDFFPTVTYPRVRGIFRHAGYREQIATLLALLCTEAPREIVEEDGQTLYVSLGPRCLPQGAPTSPALTNVICVKMDRRISGLAQKLGWRYTRYADDMTFSLPSNTGKAKTKQDANPAPLIGWVKRIVADEGFRVHPDKTRVIRKGGRQAVTGLIVNGTGAPRVPRKTRRMLRAAMHNLSKGIPLRDDETLATLQGYIAFIAQTDPEQAQRLKEQLA

SEQ ID NO: 6401 - protein, 453 aa, unidentified
  source 1..453: note = Related to NYTD01000225.1; note = Deltaproteobacteria bacterium
MSTENQKALVALWNEIQHAGGRESYIRNELTRMGIEIPARVKITNIRNKEKKAAYIALRQKEEEARGFINKKVWAAYRATHIVDLGDGIFWKDPTKDFYDTHDRAQRREDNGIPELETVDQLVEALSEAYANGDSNIELDIPTLRWLCYHREVATTTHYKSFSIPKKTGGNRQIWAPMPRLKSVQKWISRNIAEKLVNHGAAHGFISGRSILSNASVHTNSKIVVSMDLQDFFPTFTFNRVKGIFRAAGYLEGIATLLALLCTEAPRKKIKFPDEKNPGKEKWVYVASGDRCLPQGSPASPSLTNAACLRLDRRLAGYATKYGWRYTRYADDLTFSFPADSAKSPKTDLLIKRVQEFVVSEGFIVHPNKTDKMGTGGQQKVTGLIVNGVGKPRVSKGFRDNLRAAIHNQEEGKELMYEEESLETLMGYASFIFSADPTKGTTLIEKLQALEEE

SEQ ID NO: 6402 - protein, 446 aa, unidentified
  source 1..446: note = Related to PBMT01000113.1; note = Proteobacteria bacterium
MSTENSNELVELWNEIQQVGGKEAYIRRELARMGIEVPERVKITNIRDKTKKAEYISLRQKEDKARAIINKKIWAAYRKTHIVDLGDGIFWKDPSKDFFDVHDREERRKDNGIPELETVDQLVEALRSVDSDIDVPTIRWMCYHREVATTTHYRAFKIPKKTGGERHIWAPMPRLKAIQKWISRNIAEKLATHGAAHGFIVGRSIVSNAMVHTDSKVVVSMDLKDFFPTFTFKRVKGIFRAAGYLDGIATLLALFCTEAPRVPMCLPDENDPSKEKWVYVASGERCLPQGSPASPALTNSACLRLDRRLAGYAQKYGWRYTRYADDLTFSFPSSDSRSANVDLLKKFVHDIVTSEGFVVHPDKTDVMGTGGQQKVTGLIVNGTGSPRVPREFRDKLRAAIHNQEQGQPLFEDETMSTLLGYASFVFSADPERGKTQLEQLQKLNEQ

SEQ ID NO: 6403 - protein, 441 aa, unidentified
  source 1..441: note = Related to VGTA01000016.1; note = Deltaproteobacteria bacterium
MIERLSEKLSGVEREALEAKAELWSAVEQAGGARRYVEAELRRRGVFVERQDVLAMGFDEKKAYVERVAAEQEVRRPLQSKVWAAYTALHITHLGEEVFWQGDVSVDFFDPDHLAARLEQKGLPPLERPEDLCEALGLTLSELRWLCYHREAATSLHYRTFEIPKKTGGVRRIWAPLPKLKAAQEWVLRSIAERLVVHGAAHGFVAGRSIYSNALEHLDSRLVVSMDLADFFPSFTFKRVKGIFRQAGYMDGIAALLALLCTEAPREVTEHEGQRYYLALGPRCLPQGSPASPALTNAACLRLDRRLAGWAAKAGWRYTRYADDLTFSVPASAAEEPSVSQLLGVVHAIVAEEGLVVRDDKTHVMRRGARHQVTGLVVNDATPPRPPRELRRRVRAMVHNVASGRGLREGESLSQLVGFVAYLHMCDPVEGRRLMEVLRGA

SEQ ID NO: 6404 - protein, 442 aa, unidentified
  source 1..442: note = Related to NYWS01000115.1; note = Myxococcales bacterium
MSEHLNDRTSHQEFWTEIVEAGGPRKYVETQLRERGVWVKRQDVLSMGAKAKQAYIEQIKAEDAIRKPLQEKVWKTYTALHIVHLGEDIFWQSDVSIDFFDPAHRQSRLKQRQLQDIESAEELSDQMGITLGELRWLCYHREAAKSIHYHRFSIPKKSGGERQIWAPMPKLKTAQTWVLRNIAERLTVHGAAHGFMAGRSIYSNALEHTNASVIVSMDLADFFPSFTFKRVKGIFRQAGYMDGIATILALLCTEAPREVVEDEGETYYVAMGPRCLPQGSPASPALTNAACLRLDRRLSQFAEKNQWRYTRYADDLTFSVPKAESKLSEEELSAKIKQLIGTVHAVVEDEGLQVRSDKTHVMRPGKRQKVTGLVVNGQDTPRTPRELRRRVRAMIHNLKVGKTLHEGESLNHLTGLIAFIYMSDPQQGQKLLEQLKQATAPS

SEQ ID NO: 6405 - protein, 437 aa, unidentified
  source 1..437: note = Related to PBMT01000009.1; note = Proteobacteria bacterium
MNKERVQELEKRWQKIQDQGGPQAYLEQQLRKAGVWRRYRPNMIEPGINKSDEIRASRLEREKRLELKKYIWEAYKATHISHLGLDVYWNDEVGEDFFDVHERLKRQEEQGLPSIETVEELVEALSQAVPEMTIPMLRWLCYHQDVATHLHYRHFEIEKKTGGFRQIWAPLPKLKAIQHWILQNIVEHMPIHGAAHGFVSGRSIFSNAEEHCNSDVVVGLDLKDFFPSFTFPRVKGIFRNYGYKSEISTLLALLCTEAPRRIVQIEGKTVYVATGSRALPQGSPVSPALTNVASMRLDRRLSGYALKHGWRYTRYADDLTFSAPTGQGRKNIKALLETVDTIVTEEGLKVHPKKTHVMGKGRRQEVTGLVVNGSESPRVPKERRKMLRAALNNAQKGKEVELGYALQQLMGHAAFVYAAQPELGRSLIEAFSELMNE

SEQ ID NO: 6406 - protein, 429 aa, unidentified
  source 1..429: note = Related to NZ_AP019860.1; note = Candidatus Uabimicrobium amorphum
MTDLLKLWQEIEAAGNIDNYIEQQLVKNGYLVERRDTDDMSKKELDRYKKQLKQEAKAKKELKKKTWLAYKASHIVHVGEGIFWNDGANFDQWDHLRAEEQTSANELPPLDSPKELAKTMGITIEELRWFTYHRDDAKKIHYRRFTIPKRSGGERNIWAPLPKLKELQRWILREIAEKLPIHGASHGFVAGRSILSNAAVHNNSHIVVRMDLKDFFPTLTFPRVKGIFRHAGYREQIATLLALICTEAPREVIQHEGELHYLSLGPRCLPQGAPTSPALSNVASLKLDRRLSGLAKKLGWRYTRYADDLTFSLPEKYKKGNSQLGALLKSVPNIVSDEGFEINRKKTWVARKGGRQCVTGLVVNGKEMPRVPRKKQREIRSAIHNLQQGKGLREGETIEQILGYVAFIYMSQPDKGKKLLEKIGNIKLQ

SEQ ID NO: 6407 - protein, 433 aa, Thiothrix eikelboomii
  source 1..433: note = Related to NZ_FUYB01000016.1
MSEHKANRYEQIWQAIEQAGSVNAYVREQLQQHGFLVTRRPTDEMSKAELEKYRQALKKEAAEQNRLRQQAWQAYQAKHIVHLGEGIYWTDDSSEDQWDAPNANQRLLENQLPAITQVAQLCQALQLSVSELRWLCYQREVSTHSHYTRFEIPKRSGGIRAIWAPLPKLKQAQHWILHEILERLVVHGSAHGFITGRSIATNAAEHGDSQVLVKLDIENFFPTISWRRVKGVFRKAGYPEQIATLLALLCTESPRQLVEHEGKSVYVALAERCLPQGAPTSPALTNALCLRLDRRLTGFAHKAGWRYTRYADDLSFSLPATNQAPPELSRLLGTVKRVLGEEGFALNLSKTRVIRPAEVQTVTGLVVNGAQPPRVKRSLKRQMRAAVHNLNQGKALPAGESLSRLKGYAAYIAMTDRDLGFDLLNQLQPVGEI

SEQ ID NO: 6408 - protein, 429 aa, Thiolinea disciformis
  source 1..429: note = Related to NZ_AQVE01000007.1
MSELSRYEQVWQAIEKAGSVNAYVREQMQKNGFMVARRPTDNMNKTELEKYRQELKKEAAEQRRLNKEAWQAYKAKHIVHLGEGIYWTDDSSEDQWDVPNANKRLLENQLPAITKVPQLCEALKLSVNELRWLCYQREVADKSHYTRFEIPKRSGGLRAIWAPLPKLKQAQHWILHEILDRLVVHGSAHGFIAGRSIATNAAEHTNSQVLVKVDIKDFFPSISWKRVKGVFRKAGYPEQIATLLALLCTESPREVVEHAGKQVYVALADRCLPQGAPTSPALTNVLCLRLDRRLTGFAQKAGWRYTRYADDLSFSLPATSKNPAEISRLLGTLKRVLGEEGFDLNDKKTRVIRQGAVQTVTGLVVNGEQSPRVSRVLKRQMRAAVHNLKQGKVLPEGESLQRLRGYAAYIAMTDRELGLGLLGQLQQEQ

SEQ ID NO: 6409 - protein, 428 aa, unidentified
  source 1..428: note = Related to PDPH01000052.1; note = Proteobacteria bacterium
MAKQTKLEKLWTEIEKAGSRDAYIQEQLRKNGFMVQRRSTDNLSKSELEKYKQELKKEAAEKRRLQQAAWAAYKTQHIVHLGEGIYWTDDTSADQWDLDNAHKRLLANQLPQLTRVKHLSDALGLSIAELRWLCYQRDAALKTHYTRFEIPKRSGGVRAIWAPLPKLKQAQRWILDHILDRLLVHGAAHGFLMGRSIASNAAEHSDSQILVKMDIADFFPSISWKRIKGVFRKAGYPEQIATLLALLCTESPREQVEHNGQSYYIAMADRCLPQGTPTSPALTNALCLKLDRRLAGFASKTAWRYTRYADDLTFSFPNHSTSKANISQLLGTVKRILGDEGFKLNNSKTRVIRQNTVHEVTGLVVNGTQAPRVKRTLKRQLRAAIHNLKQGKPLPEGESIQRLKGYAAYIAMTERELGLKMLAELDNV

SEQ ID NO: 6410 - protein, 427 aa, Thiofilum flexile
  source 1..427: note = Related to NZ_KB904782.1
MATEWEERWAEIEKAGSINAYIQQQLVAKGFLVERRATDKMTPRELEQYKKSLKTEATEKAQLRKAAWQVYKANHMVYLGEGIYWSDDSSEDDFDLASAEKRLLDNQLPAITKVKQLAEQLKLTIPQLRQLCYHREAATDLNYTRFEIPKRSGGMRPIWAPRLLLKNTQRWILEHILERLLVHGAAHGFLMGRSIATNAAQHNNSEILIKLDIKDFFPSISWRRVKGVFRKAGYREQVATLLALLCTEAPREVVERQGKKHYVALGARCLPQGAPTSPALTNVLCLRLDRRLTGIATKFGWRYSRYADDMTFSLPVGHAGDPQIAKVLGSIQRVMGEEGFELNRAKTHIVRRGARQEVTGLVVNNEGLPRVKRSTKRQMRAALHNLKTGKGLKEGESLNRLKGYAAYMAMTERELGLRLLSELSEFG

SEQ ID NO: 6411 - protein, 304 aa, unidentified
  source 1..304: note = Related to CACVAT010000519.1; note = Thiotrichaceae bacterium
MANQQQNKIEKLWAAIEKAGSMDAYVRGQLRDKGFLVERRDTDDMSKRALNKYKQELKAEAEEKRKLTKKAWQAYKANHIVHLGEGIYWTDDTSEDRWDLDNAQKRLLENQLPNITRVKQLAEALELSISELRWLCYHREAATSSHYIRFEIPKRSGGQRAIWAPMPKLKKVQRWILGEILDRLLVHGSAHGFLAGRSIATNAAQHTDSRLIVKMDIEDFFPSVSWKRVKGVFRKAGYNEQIATLLALLCTESPREMVEHNGRTHYVALAERCLPQGAPTSPALTNVLCLKLDRRISGTAGKFN

SEQ ID NO: 6412 - protein, 428 aa, unidentified
  source 1..428: note = Related to DQVC01000057.1; note = Thiotrichaceae bacterium
MGRTSNKVEKLWADIEKAGSINRYVRQELDNKGFLVKRVNTDNLSVRELKQYKAALKKESAEKRALNKAAWEAYKAHHIVHLGDGIYWTDDTSTDQWDLDNATKRLLENQLPQITRVKALAEALGLTISQLRWLCYHREVATQSHYTRFEIPKRSGGVRTIWAPRPKLKKVQRWILNNILDSLLVHGSAHGFLAGRSIATNAIEHTDSQVLIKMDIENFFPTISWKRVKGVFRKAGYSEQIATLLALLCTESPREVINKDGQDLYIALADRCLPQGAPTSPAITNALCLSLDRRMTSMANKAGLRYTRYADDLTFSYAAKKKKAPEISQLIGGVKRILGDEGFKVNTKKTHVIRQGSTQEVTGLIVNGKGMPRVSRKLKRQMRAAIYNLKQGRELPEGESIQRLRGYAAYIAMTDRALGLGMLEALSD

SEQ ID NO: 6413 - protein, 425 aa, unidentified
  source 1..425: note = Related to nan
MSSTLESLWIVIEQAGGIDRYVDKELKAKGYLVERSDTASMSKRALGIYKKALKQESVEKRTLKKQAWAAYKQTHLVHLGEGIFWSDAEDEDKWDVENAHKRLLENQLPAITKSKQLAEALDISIAELRWLCYHREASTSSHYTRFEIPKRDGSSREIWAPRPLLKKVQTWILREILERLLVHGAAHGFLAGRSIATNASQHINSKILVKMDIEDFFPSISWKRVRGVFRKAGYQGHIATLLALLCTEAPRKIVEHRGKTTYVALGERCLPQGAPTSPALSNALCLSLDRRLTGVATKLGWRYSRYADDLAFSQVATKKQAPELTPLFGSIKRILGEEGFVVNQKKTHVVRQGARQEVTGLIVNGKGEPRVPRKLKRQLRAAVHNFKCGKPLRDGVSLMELKGYAAYIMMTDRRLGEEMKSVLVE

SEQ ID NO: 6414 - protein, 426 aa, unidentified
  source 1..426: note = Related to VIAD01000001.1; note = Moraxellaceae bacterium AER2_44_116
MSANWETLWDEIEKAGNVERYVQQQLELKGFVVKRRATDTLSTRELENYKKELKTEALEKRKLKKEAWQAYRATHIVHLGTSIYWSDDSSHDRWDLQDAEKRLLENQLPPLTQVKHLTTALNLSIPQLRSLCYQRDATTDTHYRRFEIPKRSGGLRAIWAPRPQLKKAQRWILREILDRMLVHGAAHGFLAGRSIVTNAAQHTNSQVIVKLDIKDFFPSISWRRVKGVFRKAGYREQIATLLALLCTESPREVVSHEDKTYYVALGERCLPQGAPTSPALTNILCLQLDRRLTGIAQKFGWCYSRYADDLTFSFPQDTAETSNISHLLGSIQRVMTDEGFSVNMKKTHVIRAGNVQEVTGLLVNGQHAPRVSRTKKRQMRAAIHNLQQQKPLPEGESRERLMGYAAFIAMTDRPLGQQMIHALMAL

SEQ ID NO: 6415 - protein, 485 aa, Psychrobacter aquaticus
  source 1..485: note = Related to AUSW01000035.1
MSTVNSQQTDYISPAQTMTPAERQWQQLWQDIEEAGGRYQYIQQQMLQHGFIVERKPIDNMTAKERERYKKSLKKEAAEEKSLKKQAWQAYKAQHIVYLGRHIYWSDDTSMDKWDVKDASNRLIENKLPLISKHTQLAEAVNLTVPQLKGLCYQRDVATNIPYTHFTINKRNGTPRHIWSPIPRLKFVQRWILENILNNLMTHGAAHGFVRGKSIVTNAAVHSNSALLIKLDVKDFFPSVHWRRVKGVFRHAGYPEKIAILLALLCTESPRQVVQQNGTTYYVALSDRALPQGAPTSPALTNIVCLNLDRRLTGLADKVGLRYSRYADDLTFSLPVSSTSAENNVQANVQANVQPADHNQLIGQLLGSVQKILREEGFTLNNDKTRVIRTGNQHNVTGMVINGEGVPRVPRHIKRMLRAALHNLASGQPLREDETLETLSGYASWIASAEQELGQNYLAKIDTLREQAKVVETKSSAESTSLLNE

SEQ ID NO: 6416 - protein, 479 aa, Psychrobacter nivimaris
  source 1..479: note = Related to NZ_CAJHAL010000004.1
MTTHTANHNDYISPEPVPTSFERQWQQLWQDIELAGGRYQYVQQQLVSQGFMVERQPVDNMSPKERDRYKKALKKEAAEEKSLKKAAWQAYKAHHMVYLGRHVYWTDDTSTDKWDIKDAANRLIENKLPLLRKHNELAEAVNLTIPQLKGLCYQREVATNLSYSHFTIAKRNGTARQIWSPIPRLKFVQRWILHNILNNLTTHGAAHGFVRGKSIVTNAAVHSNSELIIKLDVKDFFPSVSWRRVKGVFRHAGYPEQIATLLALLCTESPRQVVQQDGITYYVALGDRALPQGAPTSPALTNIVCLNLDRRLTGLAEKLGLRYSRYADDLTFSVPTIEDTKPKLKVKTTIKATTSTAKKQADTQHNKLIGQLLGSVHKILREEGFALNNDKTRVIRKGNQQQVTGMVVNGQGVPRVSRQIKRMLRAAVHNLEAGGTLRADETLNTLSGYAAWIASAEPELGHSYLDRIERLQVQQETSV

SEQ ID NO: 6417 - protein, 445 aa, Psychrobacter aestuarii
  source 1..445: note = Related to NZ_CAJGYT010000001.1
MSSTSTQNLREHWQTLWQDIEQAGGRYQYVQQQLVTQGFVVERRPIDNMSKAERQRYKTMLKKEAAEEKNLKKDAWQAYKSQHMVYLGRHVYWSDDHSADKWDVTDGERRRVSNQLPTLTQPKELAAALNLSIAQLKGLCYQREVATCVPYTHFSIQKRRGGTREIWSPIPTLKTAQRWILHHILDQLPTHGAAHGFVSGRSIVTNAEVHRDSAVLIKLDLKNFFPTIHWRRAKGVFRQAGYPESIATLLALLCSESPRQMVQQNGVTYYVALADRALPQGAPTSPALSNIVCVNMDRRLTGLADKHGLRYSRYADDLTFSIPSSSAANSDAQNALIGLLLGSVYKIVKEEGFVLNTDKTSIVRTGQQQNVTGMVVNGESAPRVPRRIKRMLRAAIHNLQQGRALPEGESLATLSGYAAWITSAEPELGRHYLEQIEALAKATPA

SEQ ID NO: 6418 - protein, 506 aa, Psychrobacter sp.
  source 1..506: note = Related to NZ_VFYU01000031.1
MSNRNNNSNNPNNAQQLSQYIHNNQAHHGNLINPNGNEKLNELQQLWQDIEQAGGRYQYVQQQLVKQGFLVERQPIDNMSPKERDRYKKQLKQEALEAKKLKQQAWQAYKAQHIVYLGRDIYWTDDTSPDQWDVKDASNRLIENQLPLIDKPQKLASSLNLTIPQLKGLCYQRDVATNLTYNHFTIAKRNGTPRQIWSPIPRLKYAQRWILDNILNNLPIHGSAHGFVQGKSIVSNACVHTDSELLIKLDIKDFFPSVHWRRVKGVFRHAGYHEQIATLLALLCTESPRQIVRQNGVTYYVALADRCLPQGAPTSPALTNIVCLNLDRRLTGLADKLGLRYSRYADDLTFSLPKTDTTTGKPSKKPNTKTAKTANDNSTNNNNEQNQLIGQLLGSVSKILTEEGFAINSDKTKIIRTGNQQNVTGLVVNGDGTPRVPRKTKRMLRAVIHNLQNGGKLRADENFNTLMGYASWIAMTDPELGASYLQQLGELSKEFAKKAEKEDKTE

SEQ ID NO: 6419 - protein, 451 aa, Moraxella osloensis
  source 1..451: note = Related to NZ_CP047226.1
MTNNKHTSLPQQWEQRWHAIEQAGGRYQYIMQQMKEHGFLVERKPIDNMSPTERERYKKQLKQEAAEQHKIKKDAWQAYKANHIVYLGHGIYWSDDTSEDKWDATDGAKRLLENQLPTFKNVKALAEQLNLTISQLKGLCFHREVATRIPYSHFTIVKRSGGERQIWAPVPRLKYAQRWILDNVLNPMLIHGAAHGFVRGKSIVTNAENHTNSQLIIKMDIKDFFPSIGWRRVKGVFRQAGYPEQIATLFAMLCTESPRQLVKQGNVIYYVALADRCLPQGAPTSPALTNIISLNLDRRLTGLAEKHGLRYSRYADDLTFSLPAEATIDTKAKNTLISTLLGSVTKILTEEGFAINAKKTHIIHQGGVQRITGLVVNGDSVPRVPRNIKRMLRAAIHNLEQGKPFKEGESFNTLQGYAAWIAMAEPDVGEALLKKLRQLKNRPLQIEPVSD

SEQ ID NO: 6420 - protein, 428 aa, Zooshikella ganghwensis
  source 1..428: note = Related to NZ_NDXW01000001.1
MTDFQQLWQDIQHAGSIDAYVNKQLQKKGYLVKRLDAKQLSAKELARYKQQLKQEAEAKQKLNQEAWQVYKQNNIVYLGDQVYWHDNDDWDKYDRENADKALVGYQLPVIHTPAELAEQLQLTIKELRWFTYHRNAAEYSHYQQFSIPKRSGGERSIWAPKPKLKAAQRWILLNIVERMLIHGAAHGFVGGRSILTNAQQHTQSELVVKFDLADFFPSISWRRVKGIFRKAGYKEQVATLLALLCTEAPRERIEHEHKTYFIALADRCLPQGAPTSPSLTNILCKSMDRRLTAFAEKNGWRYSRYADDLTFSWSGSQSKSNIKQLIGIVHQVVKDEGLNINSKKTRILRPGSCQQITGLVVNEHAQPRVPRATKREVRAMLHNLSKGKSLHEDETLSQLQGKINFIRMVEPELGASFLTQFQQIVQSA

SEQ ID NO: 6421 - protein, 432 aa, Spartinivicinus ruber
  source 1..432: note = Related to NZ_CP048878.1
MKQQSKINQLWNAIEKAGSMNAYIDGQLREHGFLVKRRDTDNMSKRELDRYKKELKAEAAEKKRLKQVAWQAYKANHIVHLGDGIYWNDHDDFDRWDLNNAEERAAENELPPLDKPQQLAHALGITIPQLRWLAFHRDAATELHYRRFTIPKKDGSDRAIWAPKTLLKQAQYWINDNITRKLIVHGAAHGFIPGRSILSNAEVHTNSKIILKMDLENFFPTITLKRVKGLFRKAGYREQIATLLALLVTEAPREVVEDQNKTYFVSMGPRCLPQGAPTSPMITNALCLKLDRRLTGIAEKYGWRYSRYADDLTFSLPDGKDKQPNLGKLMHVIKQIVKDEGFIIHPEKTRITRKGGRQKITGLVVNGQGTPRVPQKTKRELRAAIHNLKNGKPLREGETLAHLEGLAAFICMTEPALGHKMLNQLKAVANTL

SEQ ID NO: 6422 - protein, 432 aa, unidentified
  source 1..432: note = Related to MABD01000042.1; note = Gammaproteobacteria bacterium 45_16_T64
MAQRSEIDKLWNAIEKAGSMDAYIDGQLREHGFLVKRRATDNMSRRELDKYKKELKGEAAERKRVKNTAWQAYKAKHIVHLGDGVYWNDNDDFDRWDLDNAEERAAENELPTLDKPQDLALALGITIPQLRWLAYHRDAATELHYTRFTIPKRDGSDRAIWAPKTLLKKAQYWINDNIVSQLIVHGAAHGFMAGRSILTNATVHTDSKTVLKMDLRNFFPTVTFRRVKGLFRKAGYREQISTLLALLVTEAPREVVEENNKTYFVSLGPRCLPQGAPTSPMITNVLCLQLDRRLTGIAEKYGWRYTRYADDLTFSLPNGPDKEPKLGALMHVVKQIVTDEGFVVHPEKTRVTRKGARQKVTGLVVNDKGAPRVPQKRKRQLRAAIHNLQNGKPLREDETLAQLEGLAAFIYMTDPKLGSSMLADLRNIANKI

SEQ ID NO: 6423 - protein, 434 aa, Vibrio azureus
  source 1..434: note = Related to NZ_CP018616.1
MTKSIKQLALEIEKAGSPEAYVKQQMQKQGFTVTRKNVADLSKKELSAYKQALKKEASEKHKLQQEAWQGYKAYNIVHLGDDIYWNDQDVCDKFDCDDRHVRMQENAIPDFKNPQALAAWLGVSMPQLRGLTYHRECAESIKYRHFTIEKRSGGMRSIWAPNHELKQVQRQILDEILSSLLVHDASHGFMQGRSIFSNALRHTDAKIVVKMDLKDFFPTISFKRVKGLFRKAGYQEQIATLLALLCTEAPRKIIERDGKKYFIALGERCLPQGAPTSPAISNVVCLRLDRRLQGLAESLGYRYTRYADDLTFSQLNDCKKPMSIGALKAAIKNIIESEGFVLHTEKTRITYPHRSQQVTGLVVNGKGLPRVPRKTKRHLRAAIHNLQQGKPLQDGESLEQLKGYAAFIAMSDPKTGQEMLAKLNECQLSLPEST

SEQ ID NO: 6424 - protein, 447 aa, unidentified
  source 1..447: note = Related to SBHC01000028.1; note = Deltaproteobacteria bacterium
MSQADYTLPPIETSEERRELWSHIDEAGGVRAYIRQEIHRQDLAATGNPEHMNASQRQRYKQAKKLEAEFRTALRKRTWAAYRETHLVHLGDDIFYNDLIDIDAFDIDNREQRREANDIPSIETVDELATFLGLTIPELRWLSYHRNAEASPHYVQFSIPKADGSRRVISAPKPKLKACQTKIYHEILSLLPVHGAAHGFVPGRSIATHASLHAGGNIIVKMDIRHFFPTIVFPRVKGFFRKIGYPEQVATVMALLCTESPRQEMEHKGQVLHVALQERCLPQGAPTSPTLTNLMCVRLDRRVLGLARKLGWTYSRYADDLAFSWHQDSEPDLAQLLGCTKAIAGDEGFKIHPKKTQVMRAKSRQMVTGLVLNATGGDEPNHPRPVRRLVRQIRAAIHNRKNGKPGKAGESLLQLQGLAAFVCQTDPRRGEPLMEDIRALIAAELAE

SEQ ID NO: 6425 - protein, 446 aa, unidentified
  source 1..446: note = Related to PBIH01000019.1; note = Deltaproteobacteria bacterium
MSKIKVPPTETHEQRVELWEEIKKAGGIEPYIQQTLSAQGLAVHNNDTSRMNQKQKSAYKKSKRAEAEAEKVVRKATWKAYCATHLVHLGNGVFYNDLVDADKFDIENREQRISNNDLPNIEHVDALAEFLSLTLPEMRWLAYHRDATKNPHYKQFTIPKSDGSERVISAPRPKLKKAQHTILHKILDRMPIHGAAHGFVPGRSIASHADKHAGRKIVVKMDLKDFFPTLTFPRVKGLFRKIGYPEQVATVMALICTEPKRKEVEHDGEMYHVSLSHRSLPQGAPTSPTITNIVCMRLDRRMSGLAKKLGWSYSRYADDLVFSTNDTDINIGALLRLSEKVIRAEGFRRHPKKTHVMRQCNRQKVTGLIVNPTPSEEKTTSRVPRKVVRQVKAGIYNRLNGKPHKSGESLEQLRGLAAFINQTNPTLGRKFLDQIKTLVEREENEI

SEQ ID NO: 6426 - protein, 431 aa, unidentified
  source 1..431: note = Related to JAHBVW010000060.1; note = Deltaproteobacteria bacterium
MTEPALTWADVAAAGGIREWVDAEVARQGLASTGVPPNMTDAEKKLFKARRDEERRVRKELYKRAWSAYKRAHIVHLGPGVFWHDTADVDRFDADDPEKKRQDNALPKLADVEAFAKAVGVDIPRLRWLSYHREVDSGTHYRRWTVPKRDGTARLISAPKPDLKRIQRWITTEVTEHLPVHGAAHGFITGRSIVSNARVHAGAHVVVKLDIRGFYPTVTMRRVKGLLRRAGLGEQVATLMALLATESPREEVETHGKVHYVAIGPRSLPQGAPTSPSITNALCLRLDCRLAGLARKLGCRYTRYADDLTFSWHGDGKAAIGSLLRATTMIVRAEGFEIHTKKTRVMRKGARQKVTGLVVNEAQGRPTARVPRTTQRELRAAIRNRELGRPGKGESLEELKGMAAFIMMTDRERGRAFMERIDKLIAAREVK

SEQ ID NO: 6427 - protein, 398 aa, unidentified
  source 1..398: note = Related to VBLP01000042.1; note = Deltaproteobacteria bacterium
MTDAENKLYKARRDEERKVRRELYRRAWQAYRRAHVVHLGAGVFWHDTADVDRFDADDPEKRRQDSALPSLDDVAALAGALGLSIPRLRWLAYHRDVDTGTHYHRWWVPKRDGSKRLISAPKPELKAVQRWITREVTEHLPVHGAAHGFLVGRSIVSNARVHAGARVIVKLDIRGFYPTISMRRVKGLLRRAGLGEQVATVMALLATESPREQVATHGKTYFVATGPRSLPQGAPTSPSITNALCLRLDCRLSGLARKLGCRYTRYADDLTFSWHGDARPQVGALLRGVAMIVRAEGFEVHAKKTRVMRAGARQKVTGLVVNQAPAERPTTRVPRVTQRALRAAIKNRELGRSGKGETLEQLKGMAAFVMMTDAARGRALMARLDRLIAARDQAGGQP

SEQ ID NO: 6428 - protein, 434 aa, unidentified
  source 1..434: note = Related to JADJJK010000055.1; note = Myxococcales bacterium
MSEPVRPPVRWADIAATGGIREWVDAEITRQGLSDPGAGNLSDAEKKVYKARREEERRVRRELYKQAWAAYRQTHIVHLGRGVFWHDTADVDRFDADDPEKKRRDNALPELKDVEALSQALGLSVARLRWLAYHREVDTGTHYHRWRIPKRDGTPRLISAPKPQLKEAQRWITREITEHLPVHSAAHGFLVGRSIVSNARVHAGARVIVKMDIEGFYPTVTFPRVKGLLRKAGLGEQVATLLALLATESPREELVLEGKTVFVATGPRSLPQGAPTSPSITNALCLRLDCRLFGLARALGARYTRYADDLTFSFHGPAGEVDHVGTLLKAVTRIVAAEGFAIKPKKTRVMRSGARQRVTGLVVNAAPGRPLARVSRQQLRELRAAIKNRELGRPGKGESLDQLRGMAAFVMMTDRERGRMLLDRINRLAAPTEP

SEQ ID NO: 6429 - protein, 447 aa, unidentified
  source 1..447: note = Related to JADJUF010000001.1; note = Myxococcales bacterium
MTAGAKLAAVPWAEVAAAGGIRPWVDAALARQGLADPGVPSSMSDGEKKAYKARREEERRVRRELFRVAWAAYKAVHIVHVGAGVWWHDTPDVDRFDAAEPERKRADADLPALPDVEALAKALGLSIARLRWLSYHREVDTGTHYQRWTVPKRDGGVRPITAPKPTLKAAQRWIARSITEHLPVHGAAHGFLPGRSIATNAVVHAGAKIIVKLDIEGFYPTVTYRRVKGLLRKGAGLGEQVATLLALMATEAPREELLVRGRTCYVATGPRALPQGAPTSPSITNALCLRLDGRLTGLARSLGCRYTRYADDMTFSWHGGAAGQADRTNAIGKLLRAVEMIVAAEGFTIKRTKTRVMRGGGRQQVTGLVVNQADGRPPARVPRATQRNLRAAIKNRELGRPGRGESIEALRGMAAFVMMTDPARGRAFMARIDRLAERAGGAPAGSE

SEQ ID NO: 6430 - protein, 406 aa, unidentified
  source 1..406: note = Related to JADJFN010000004.1; note = Myxococcales bacterium
MSDAEKKAYKARRDEERRVRRELFRVAWAAYKAAHIVHLGPGVWWHDTADVDRFDAADPAKKQQDNALPALPDVEALAKALGLSIARLRWLSYHREVDTGTHYHRWTVPKRDGGLRPISAPKPELKAAQRWIARQVTEHLPVHGAAHGFLPGRSIATNAGVHAGAKIIVKLDIEGFYPTVTWRRVKGLLRKAGLGEQVATIMALVATEAPREELVVRGRPCFVATGPRALPQGAPTSPSITNALCLRLDCRLTGLARKLGARYTRYADDLTFSWHGDAARAADAGNAIGKLLRAVTEIVAAEGFTIKRTKTRVMRAGGRQQVTGLVVNQADGRPAARVPRATQRKLRAALKNRELGRPGHGETLEALRGMAAFIMMTDPERGRAFMARIDRLAQRAGEAPAGSERA

SEQ ID NO: 6431 - protein, 443 aa, Enhygromyxa salina
  source 1..443: note = Related to NZ_PVNL01000069.1
MANDTQTPPVSAVPADLPKWADIEAAGNIRSWVDAELTRLGLFEPGVDTSTLSDKQRKAYKAKREQERKVRRELMAKAWFVYRQHHLVHVGVGVWYHDTADIDRWDIPDLEGRRQLNELPELENVHALAKSLGLAIPRLRWLVYHREVDTGTHYHRWTVPKRSGKGVRLISAPKPDLKRVQSWIARNITEHLPVHGAAHGFLAGRSTLSNARVHAGARVIVKFDVRDFYPTVVLRRVKGLFRKAGYGEQVATVLALLCTECPREEIELGGRPHYVATGPRSLPQGAPTSPSITNTLCLNLDARLTGLAAKLGFRYTRYADDLTFSFHGPAGHKIAVGRLQKAVVDIVADEGFIVHPHKTRVMRSGGRQKVTGLVVNTAPEGEPVARVPRKVVRELRAAIHNRAQGKPGKGETLEQLRGMAAYVHMCDPAKGAAFMQQINSLPG

SEQ ID NO: 6432 - protein, 435 aa, unidentified
  source 1..435: note = Related to JAGQIO010000454.1; note = Myxococcales bacterium
MANDNATTTTAGPAWSEIEAAGNLRNWVDAELERRGLRDPGVDTSRLNDKQRKAYKTKREEERKVRRELMAQAWKVYRQHHLVHIGVGVWYHDTADIDRWDIADLEGRRAINELPELKDVHALAKILELPIPRLRWLIYHREVDTGTHYHRWTVPKRSGKGRRLISAPKPDLKRCQTWVARNISEHLPVHGAAHGFLAGRSTLSNAKVHAGAKVVVKFDVRDFYPTVSYRRVKGLFRKAGYGEQVATVLALLCTECPREEIEIGGRVHYVATGVRSLPQGAPTSPSLTNALCVRLDARLTGLASKLGFRYTRYADDLTFSFHGEGKVPVARLRRAVVDIVAAEGFEVHPDKTRVMRSGGRQKVTGLVINGAPEGRPEARVPRKVIRELRAAIHNREQGKAGKGESLDQLRGLAAYVHMCDPEKGRAFMARIDKLA

SEQ ID NO: 6433 - protein, 448 aa, Pseudenhygromyxa sp.
  source 1..448: note = Related to JABJWV010000001.1
MANDTSSTTATTADGPEWADIEAAGSIRNWVDAELDRRGLLDDGADTSRMSDKQRKAYKTKREEERVLRRKLMAQGWACYRQNKLVHVGVGVWYHDTADIDRWDIADLDGRRQLNELPELKDVHALAKVLELAMPRLRWLVYHREVDSGTHYHRWTVPKRSGKGVRLISAPKPELKRCQTWIARNISEHLPVHGAAHGFLAGRSTLTNAAAHAGAEVVVKFDVRDFYPTVTFRRVKGLFRKAGYGEQVAIVLALLCTECPRETIEIGGRTYHVATGPRSLPQGAPTSPSITNALCMRLDARLTGLARKLGFRYTRYADDLTFSYHRGEGGEGEQETGKIPVARLRKAVTEIVASEGFRVHEGKTRVMRSGGRQKVTGLVVNGAGEGVPTARVPRKLVRELRAAIRNRELGKPGKGESLEQLRGWAAYVHMCDPSKGRAFIARLEKLAE

SEQ ID NO: 6434 - protein, 437 aa, Plesiocystis pacifica
  source 1..437: note = Related to NZ_ABCS01000226.1
MANDTTAEVEGTPPKWADIEAAGNIRNWVDAELERRGLRDPGVDTSRLSDKQRKAYKAKREEERRVRRVLQGQAWQVYRQNHLVHVGVGVWYHDTADIDRWDIAGIDERRELNELPELKDVHALAKALELPIPKLRWLVYHREVDTGTHYQRWTVPKRSGKGVRLISAPKPTLKRCQTWVARNITEHLPVHGAAHGFLTGRSTVTNAAVHAGARVVVKFDVKDFYPTVSFRRVKGMMRKAGYGEQVATVLALLTTECPRESIELHGRTHYVATGPRSLPQGAPTSPSITNALCLRLDSRLTGLARKLGFRYTRYADDLTFSFHGAGKIPVGRLQKAVADIVKDEGFIIHPHKTRVMRKGGRQKVTGLVINGAPEGAAKARVPRKVVRELRAAIRNRELGKPGKGESLEQLRGMAAYIHMCDPAKGKAFLDRINALSS

SEQ ID NO: 6435 - protein, 442 aa, unidentified
  source 1..442: note = Related to JAEPMI010000008.1; note = Deltaproteobacteria bacterium
MADSHDSTEVSLPEWKGIAEAGGIESWIHRELERRQLIEEVDYASLSKAEKKAYKARRDEERRVRRLLRKHAWQAYKKAHVVHLGRGVFYHDTPDYDRYDIDGREERLADNALPEIADASALAEALGITVPTMRWLAYHREVDSGTHYRRWTVPKRDGRRRLISEPKPQLKEAQRWIAREITDHLPVHGAAHGFLAGRSTVTNAAVHAGARIVVKLDLKDYYPTITTPRVKGMFRKAGYGEQVATLLAMLCTESPREEIELDGKTWYVATGPRSLPQGAPTSPSITNAISLRLDLRLAGLARKMGFRYTRYADDLTFSHHQRSEAPIGSLFRLVGQIVVEEGFEVHPKKTRVMRSGSRQKVTGLVVNGADGAPAARVPRSVRRKLRAAIKNRELGRPGEGESLAQLRGWAAYVYMTDPAKGRALLDRLAALGGESDEGGTDG

SEQ ID NO: 6436 - protein, 433 aa, unidentified
  source 1..433: note = Related to JACKEN010000012.1; note = Deltaproteobacteria bacterium
MTTAAEDKLPDWAGIAAEGGIDAWVRSELMRRDLIDDRDTTQLSEREKKQYKARREEERRVRRLLQKHAWGAYRAAHVVHVGVGVFYHDTPDIDRFDIDDPGARRVLNDLPELADATTLAARLELTIPRMRWLAYHREVDSGTHYHRWKVPKRSGGERLISAPKPELKRVQHWIAEHITEHLPVHAAAHGFMAGRSTVSNAAAHAGARCVVKMDLEDFYPTITTPRVKGMFRKAGYGEQVATLLALLVTESPREEVPIDGKTFHVAVGARSLPQGAPTSPSITNAICLRLDTRLMALCRVLGFTYTRYADDLTFSWHQEGDAPVGHLLRAVGGIVTDEGFRVHRKKTRVMRQGRRQKITGLVVNGAHDVPARVPRLVIRQLRAAIKNRELGREGRGESLAELRGMAAYVNMSDPTKGRAFLQRLAALSKRGES

SEQ ID NO: 6437 - protein, 445 aa, unidentified
  source 1..445: note = Related to JAFGRB010000173.1; note = Deltaproteobacteria bacterium
MSDSTADKQRTEWRSIAEAGGTDAWVHQELLRQGLIDEGVDTASMGDKERKAYKARREEERRVRKILRKDAWAAYRRAHLVHVGTGVFYHDTADIDRFDIDDPEQRRQQNDLPALATAQDLAQALDLPMPRLRWLVYHREVDTGSHYHFWTVPKRSGGERLISAPKPDLKKAQRWIAEHISERLPIHGAAHGFVAGRSTVTNARLHAGAAVVVKFDLEAFYPTITFPRVKGLFRKAGYGEQVATVLALLCTESPREQVALKGKLYYVAVGPRSLPQGAPTSPSITNAICLRLDARLAGLARAAGWRYSRYADDLTFSWHRRDAAAPVGRLMRMLGRIGSDEGFALHRKKTRVLRSGRRQKVCGLVVNAAGDGQPRARVPRKIVRELRAAIRNRELGREGWDESLAELAGMASYVHMADPKKGRAFLDRIAALQAAGQQSGGEVSS

SEQ ID NO: 6438 - protein, 450 aa, unidentified
  source 1..450: note = Related to JAHQVK010000212.1; note = Myxococcales bacterium
MTESSTPPSSEYIDLPEWTAIAAKGGIHYWIQEELAKKGLLDDQAPSSPSVREKKQYRARRDEERRVRRRLAQHAWAAYRRAHLVHVGLDVFYHDTPDIDRYDVVDPPARRATNSVPEIPDARRLAEILDLPMPRLRWLVFHREVDSGTHYHRWTIPKRDGSERLISAPKPELKRVQKWISQQITEHLPVHGAAHGFLAARSTVTCAQVHAGARVLVKTDLKDFYPTITFPRVKGIFRKAGYGEQVATLLALLCTECPRDKIVRANKTYYVAVGPRSLPQGAPTSPSLTNVTCFRLDDRLTGLAKKFGVCYTRYADDLTFSWHTPGEASVGLLLGIIRGIVTDEGFELHPNKTQILSSGRRQKVTGLVVNRSDADVSVRVPRKVVRQLRSAIKNRENDRDGPESLAQLKGMAAYIHMADPVKGRQFLERIAQLEARQTVAVGSEMADRVE

SEQ ID NO: 6439 - protein, 456 aa, unidentified
  source 1..456: note = Related to JACQYO010000157.1; note = Deltaproteobacteria bacterium
MTEPNQSTQNPTGSVGGGSSELSVRVPDWAAVVEAGGRDAFIERELLRLGLVDESTEPGKLSDSEKKAFKARREEERRVRRELDKATWASYRAAHILHLGAGVFYSEGIDIDRFDLDDPKARRDANGLPDIANAQALAKLLGISMFRLRQLTYHRDVDSGSNYIRWMIPKRSGGLRLISAPKKELKRIQRFVAKEIVEHLPMHGSSHGFVRGRSTRSNAIKHAKAEVIIKLDLSSFYPTITFPRVKGLFRKAGYQEKIATLLALLVTESPREERHVENRTYYVANGPRSLPQGAPTSPAITNTLCLRLDSRLDGLCAKWGLVYTRYADDLTFSAKKGSKVHVGKAIGAVKRIVSEEGFVVHPAKTRIMRGGRRQKVTGLVVNAAPGAPLARVPRKLVRRLRAAITNRERNKPLREGAETIEQLRGYAAYVAMTDPPKGKAFLDRINRLAEREPTAG

SEQ ID NO: 6440 - protein, 443 aa, unidentified
  source 1..443: note = Related to JACPFK010000066.1; note = Deltaproteobacteria bacterium
MSQTNDPLTGQALVAPLDWGAVKEAGGRENFIDKELARRGLTDSSDPSVLGDSEKKSFKARREEERRVRKELEKAVWAAYRAAHIVHLGSGVFFNDAIDIDKYDLEDPKGRREANDLPDIPSPAELAKVLGISMRRLRQLTFHRDVDSGTNYVRWTIPKRTGALRLISAPKKELKRAQRWINREIVEHLPVHGAAHGFVRGRSTLTNATPHARAEVIVKLDLSDFYPTITFPRVKGLFRKAGYQERIATLLALLVTESPRDTRVLSGRTYYVANGPRSLPQGAPTSPAITNALCLRLDARLDGLARKFKVEYTRYADDLTFSAQRGTTPDLGRFLGAVKRVVREEGFLVHPKKTRIMRGGRRQKVTGLVVNAAKGRPVARAPRKLVRALRAAITNRERGKQAGPETLEQLRGYAAYVSMTDPARGKAFLERILRLADRGGAER

SEQ ID NO: 6441 - protein, 469 aa, unidentified
  source 1..469: note = Related to JAGQIK010000702.1; note = Myxococcales bacterium
MSEQPQTHTPDGAEAAAPPPPPPPAPAASPPEAAPRLTWDVIAEDGGIRGWIDAELRRRDLVDDGVDTQSMSDKQRKRYKARREQERRVRRELRKQAWACYREAHLVHLGASVFYHDTPDVDRYDIAEPEERLRENDLPLLKDARALADALHLSVPRLRWLTFHREVDSGSHYVRWTIPKRSGGTRLISSPKRDLKDAQRFIARKISEHLPVHSAAHGFLGGRSTVTNARAHAGAEVVIKLDIKDFYPTVTMPRVKGMFRKAGYGEQVATVLALLCTDAPREAMLLRGQTRYVATGPRSLPQGAPTSPSITNAICLRMDSRLSGLARKLGFRYTRYADDLTFSWHDGKKPAPVGMLLGGVRKIVSSEGFVVHPNKTRVMRKGRAQRVTGLVVNAAGEGAAPARVPRKLVRRLRAAIHNRERGKAREGETLAQLAGWAAYLNMTDPERAQPMLARIHRLMRGERDSSSGE

SEQ ID NO: 6442 - protein, 435 aa, unidentified
  source 1..435: note = Related to JAIOJK010001035.1; note = Sandaracinaceae bacterium
MSAEIQTTTPATAEPIPPWASVREAGGIREWVEAELARRGLIESVDTSALSAEQKKQFKARRDEERRVRRLLRKAAWASYKRAHLVHLGAGIFHHDTADLDRFDADDPEARRKDNDLPELADAQALAAALGLPIPTLRWLAFHREVDTGTHYHRWTVPKRSGGARLISAPKKTLKTAQKWIATNIVEHLPVHGAAHGFLPGRSTKTNAEVHVGARLVVKLDLSDFYPTITLERVKGLFRKAGYGEQVATVLALLCTESPREAISLRGRTCYVALGPRSLPQGAPTSPSITNALCLRMDSRLSGLARKFGFRYSRYADDLAFSWHGEGEGPVGELLGAVHRIVRGEGFVVHPKKTRILRCGRRQKVTGLVVNGQGPPRVPRALVRKLRAAIHHREHGKQGKGETLAQLRGWAAYVHMCDPQKGRAFLERLAKLGEA

SEQ ID NO: 6443 - protein, 449 aa, Haliangium ochraceum
  source 1..449: note = Related to NC_013440.1
MSDPSQQTATGTATGTDPVPPEWPQIAEAGGIHNWVQADLRRRGLIEEVDTASLSDKQRKAFRARRDEERRVRKLLYAQAWAAYKRAHLVHVGVGVFYHDVADYDRFDIAEPEQRRQENDLPALADTTALAEALELPIPRLRWLVYHREVDRHTHYHRWTVPKRSGGERLISAPKPELKRAQRWIARNITEHLPVHGAAHGFLPGRSTATNAAVHAGARVIIKFDIRDFYPSVTLPRVKGVFRKAGYGEQVATVMALLCTEPPREEMVLRDKKYYVAVGPRSLPQGAPTSPSITNALALGLDSRLAGLARSLACRYTRYADDLTFSWHGDSEAPIQRLKNAVARIVHGEGFRVHEGKTRIMRAGGRQKVTGLVVNAAAGEGAMPPARVPRDVVRRVRAAIHNRERGKPGGEETLEQLRGWAAYIYMTNPERGRQFLERLDALADDGSSS

SEQ ID NO: 6444 - protein, 475 aa, unidentified
  source 1..475: note = Related to JAESTW010000770.1; note = Kofleriaceae bacterium
MTASDTNQNPQTAKPQSAKPQSESPQAHSTSERVEWTVIAEAGGIHTWVYSELERQGLIDNVDTSTLTAAERKRYRKKRDEERVVRKILQKKAWKSYREAHIVHVGRGVFYHDTPDVDVYDVEDPKGRLESNDLPPIADALGLAKRLGIGIPKLRWLVFNREVDTGCHYHYWTVPKRDGGRRLISAPKPELKKAQAWIARTISEHLPIHGAAHGFVPGRSTVTNAAVHAGASVVFKFDIKDFFPSVTTNRVKGLLRKAGYGEQVATLMALLCTEFPREELMLRGRKHYVAIGARGLPQGAPTSPSLTNALCMRLDCRLTGLANSIGLKYSRYADDLTFSWHGEGKEAPVMRLRHAVRKIVSAEGFVIKDSKTRILRSGRRQRVTGLVVNKAESAEDARVPRFMLRQIRTAIYKLERGQEAKESLEQLRGWAAYVYMTDKKRGADMLSRLAAISSATTATTTSSASNSSTTTGAKI

SEQ ID NO: 6445 - protein, 442 aa, Sandaracinus sp.
  source 1..442: note = Related to PABA01000191.1
MSEDTLESEEAPAAVDPAAPPTARWPDIAAAGGIQPWVLAELRRRDLVDEGVDTSRLSAKEKKRFKARREEERRVRRLLKKHAWAEYRRAHLVHVGVGVFHHDTADVDKYDLPDPDARRAENDLPPLKDQHALAEALAIDIPTLRWLCYHREVDTGTHYRRWTIPKRSGGERLISAPKPTLMRCQRWIAQHVTERLPIHGAAHGFVPGRGTLTNAAAHAGAKTVVKLDLKDFYPTLTLPRVKGLFRKAGYGEQTATLLALLCTEAPREEMVIRGERRYVAIGDRSLPQGAPTSPSITNAICLRLDARLTGLAKKLGFTYTRYADDLAFSSDRRKAAVGKLVDAVYRITADEGFRVHPKKTRVMREGRRQQITGLVVNGQGEGPPARVPRKLVRQLRAAIHHRENGRPGKGESLEQLRGWAAYVYMCDPDKGRAFLDRLAKLQ

SEQ ID NO: 6446 - protein, 445 aa, unidentified
  source 1..445: note = Related to JACKDV010000022.1; note = Myxococcales bacterium
MTDASPERALPPWAEIAEAGGIDAWVVAELKARGLWEEGVDTSSLGDRERKKFKARREEERRVRKQLRRHAWSEFRRNHLVHVGAGVFYHDTADVDRYDIGDPETRRQDNALPKLAHAGDLAKEIGLTVPRLRWLVFHREVDTGTHYHRWHVPKRDGSLRLISAPKPQLKAAQRWIARNITEHLPVHGAAHGFVPGRSTVTNAAVHAGAEVVIKLDLQGFYPTITMPRVKGLMRKAGYGEQVATILALLCTESPREIIELNGKAHHVAIGPRSLPQGAPTSPSITNALCLRLDRRMQGLATKLGFRYSRYADDLTFSWHQADADAPVGKLLHRVRSIVGAEGFAVHPAKTRVMRSGRRQKVTGLVVNGVSAAEGAPEVPPARVPRKLRRMLRAALHNRTQGKDGPESLDRLHGFAAYVYMTDPRQGQALLERAAALREGAAGGTT

SEQ ID NO: 6447 - protein, 338 aa, unidentified
  source 1..338: note = Related to JAGQIQ010001415.1; note = Myxococcales bacterium
MTDPAATRPLPPWSEIAEAGGVDAWIVAELRARGLWEEGVDTSTLSDRDRKKYKARREEERRVRRELRRHAWAEFRRNNLVHIGAGIFYHDTADVDRFDIKDPDARRQDNALPKLPDTAALAKALGLGMPRLRWLVFHRQVDRGTHYHRWHVPKRDGGLRLISAPKPDLKAAQRWIARNITEHLPVHGAAHGFVPGRSTVTNAQVHAGARVVIKLDLQNFYPTITQPRVKGLLRKAGYGEQVATVLSMLCTESPREVIELRGTPHHVAIGPRSLPQGAPTSPSITNALCLRLDRRMQGLAGTLGFRYSRYADDLTFSWHADGEAPVGKLLHRVRSIVG

SEQ ID NO: 6448 - protein, 485 aa, Corallococcus terminator
  source 1..485: note = Related to NZ_RAVZ01000142.1
MTAKLESFVPAAPPQAVPEVPPAAAASNTAIASKREARRAAHDVLLARWKAITEAGGTEEWVQAQLLSKGALADEVDFSSLKEKEKNAWKEKKKAEAVERRALGRQAHEAWKATHINHLGVGIHWSEAPGPDRFDLEHREERARVNGLPALDTAEALAKALDISVSKLRGFAFHRDVDTGSNYVSWRIPKRDGSERTITSPKPELKEAQRWVLSNVVERLPVHGAAHGFVAGRSILTNALAHQGADVVVKVDLKDFFPTVTWRRVKGLLRKGGLPEGTSTLLALMSTEAPRELLSFRGKTLHVAKGPRALPQGAPTSPGITNALCLRMDKRLSALSRKLGFTYTRYADDLTFSWTKAKAPRARRAQGAPVAVLLARVKDVVEAEGFTVHPNKTRVARKGSRQRVTGLVVNEAKDGTPAARVPRDVVRRLRAAIHNRQKGKPGREGESLEQLKGMAAFLYMTDPVKGRAYLDQLAKLEATETPAQA

SEQ ID NO: 6449 - protein, 486 aa, Myxococcus fulvus
  source 1..486: note = Related to NZ_FOIB01000017.1
MTARLESFVPAAAPQAVATPAPQAPSANTVAQREARRAAHEALLARWKAIVEAGGADEWAQAQLVSRGLAVGELDFSSASEKEKTAWKEKKKAEAAERRALGRQAHEAWKATHVGHLGAGVHWEEEGGSDKFDIAHREERARANGLPELGSAEVLAKALGLSVSKLRWFAFHREVDTGSHYISWGIPKRDGGTRTITSPKPELKEAQRWVLSNVVERLPVHGAAHGFVAGRSILTNALAHHSADVVVKVDLKDFFPSVTWRRVKGLLRKGGLPENTSTLLALMSTEAPREAVQFRGKTLYVAKGPRSLPQGAPTSPGITNALCLKLDKRLSALSKKLGFVYTRYADDLTFSWTKTKQPKARRAQGAPVAVLLARVKDVVESEGFRVHPEKTRVSRKGTRQQVTGLVVNRARDGVASARVPRDVVRRLRAAIHNRQKGKPGREGESLEQLKGMAAFVYMTDETKGRAFLKSLEQLEAREKEAAPKAP

SEQ ID NO: 6450 - protein, 484 aa, Myxococcus sp.
  source 1..484: note = Related to NZ_CP012109.1
MTARLDPFVPAASPQAVPTPEPTPPAPDAAAKREARRLAHEALLARAKAIDEAGGADDWVQAQLVAKGLSVDDLDFSSASEKDKKAWKEKKKAEAVERRALKRQAHEAWKATHVGHLGAGVHWTEDRPADAFDVPNREERARANGLTELDSTEALAKALKLSVPKLRWFAFHREVDTATHYVSWTIPKRDGSKRTITSPKPELKEAQRWVLSNIVERLPVHSAAHGFVAGRSILTNALAHQGADVVVKVDLKDFFPSVTWRRVKGLLRKGGLAEGSATLLSLMSTEAPREAVQFRGKLLYVAKGPRSLPQGAPTSPGITNALCLKLDKRLSALAKRMGFTYTRYADDLTFSWTKAKQPKARRTQRPPVAMLLSRVQEVVEAEGFRVHPDKTRVARKGTRQRVTGLVVNTAGKNAPAARVPRDVVRQLRAAIHNRKKGKPGREDESLEQLKGMAAFIHMTDPAKGRAFLAQLAELESAAPATPAQ

SEQ ID NO: 6451 - protein, 485 aa, Pyxidicoccus fallax
  source 1..485: note = Related to JABBJJ010000287.1
MTARLESFVPAASPQTVSTPAPAAPAANAASQREARRAAHEALLTRWKAIVESGGADSWVQGQLVSRGLAVGDLDFARASDKEKTAWKEKKKAEAAERRALERQAHEAWKATHVAHLGAGVHWEEDAAGDKFDIAAREERARANGLPELDSTDALAKALGLSVSKLRWFAFHREVDTGSHYVSWKIPKRDGGSRTITSPKPELKEAQRWVLANVVEKLPVHGAAHGFVAGRSILTNALAHQGADVVVKVDLKDFFPSVTWRRVKGLLRKGGLPESASTLLALMATEAPREAVQFRGKLLYVAKGPRSLPQGAPTSPGITNALCLRLDKRLSALSKRLGFTYTRYADDLTFSWTKAKQPKAKRSQRPPVAVLLSRVQSVVEAEGFRVHPDKTRVARKGTRQRVTGLVVNEAANGKPAARVPRDVVRRLRAAIHNREQGKPGREGESLDQLKGMAAFIHMTDPVKGRAFLEQLAKLEAKEQQSPPAA

SEQ ID NO: 6452 - protein, 486 aa, Myxococcus stipitatus
  source 1..486: note = Related to NC_020126.1
MTGRLESFVPAAAPQTVPTPAPQAATATALVQREARRVAYEALVTRWKAIVEAGGADAWVQAQLVSRGLAVGDLESGVTEKEKTAWKEKKKAEATERRALLRQTHEAWKATHVGHLGPNIHWEEKDGGSDKFDIPHREERARANGMPELGSAEALAKALGLSISKLRGFAFHREVDTGSNYVSWGIPKRDGGTRTITSPKPELKEAQRWVLANVVERLPVHGAAHGFVAGRSILTNALAHQGADVVVKVDVKDFFPSVTWRRVKGLLRKGGLPENASTLLALMSTEAPRETVQFRGKTLHVAKGPRALPQGAPTSPGITNALCLKLDKRLSALSKRLGFTYTRYADDLTFSWTKAKQPKARRAQGAPVAVLLTRVKDVVEAEGFRLHPEKTRVSRKGTRQQVTGLVVNQARNGVPAARVPRDVVRRLRAAIHNREQGKPGREGESLEQLKGMAAFVFMTDAAKGRAFLDSLARLEARETPEAPKVT

SEQ ID NO: 6453 - protein, 483 aa, Citreicoccus inhibens
  source 1..483: note = Related to NZ_JAHNZT010000021.1
MTAKLESFVPAAPPQAIATPTPVTPTAQALVQRETRQAARAAVLARWKAITEAGGQDEWVHQQLVARGALAEEVDFSSLKEKEKTAWKEKKKAEATERRALKRLAYEAWKATHIGHLGAGIHWNEEGGADAFDIPHREERAKSNGLPEFTSAEDVAKALGLGVSKLRWFAFHREVDTATHYTSWRIPKRDGGSRTITSPKTELKAAQRWVLSNIVERLPVHGAAHGFVAGRSILTNALAHRGADVVVKVDVKDFFPSVTWPRVKGLLRKGGLPENIATLLALLATEAPREAVSFRGKTLYVAQGPRALPQGAPTSPGITNALCLRLDKRLSALSRKLGFVYTRYADDLTFSWTKAKAPKARRAQGAPVAVLLARVQEVVEAEGFRLHPDKTRVARKGSRQRVTGLVVNDAGPKVPAARVPRDVVRRLRAALHNREQGKPGKEGESLEQLQGMAAFIHMTDPAKGRAFMERLEKLSARPATTAA

SEQ ID NO: 6454 - protein, 474 aa, Archangium violaceum
  source 1..474: note = Related to NZ_JPMI01000131.1
MTAKLETFVPAAAPVVVPAPAPAAPSANVVARREVSQREEQARLARWKAIEEAGGQEAWVEAELKARGLAPEHEDPSGLSEKEKTAWKEKKKAEAAERRALKRLAWEAWRTAHINHLGAGVHWEEAGGPDTFDLKDREERARANGLPELESAQTLAKALGLSVSRLRWFAYHREVDTGTHYRSWEIPKRDGGKRTITSPKKELKEAQRWVLANVVERLPVHGAAHGFVAGRSIVTNAMAHKGADVVVKMDIKDFFPSVTWQRVKGLLRKGGLAEGTATLLALMATEAPREVVQFRGKTLYVAKGPRALPQGAPTSPGITNALCLRLDKRLSALSRRLGFAYTRYADDMTFSWKKSRGKTEAPVAVLIARVEKVLEAEGFRVHPDKTRVMRPGNRQVVTGLVVNEAAKGQPGARVPREVVRQLRAALHNREKGKPGKEGETLDQLKGMAAFIHMTDPAKGRAFLERLSALEKREA

SEQ ID NO: 6455 - protein, 481 aa, Cystobacter gracilis
  source 1..481: note = Related to NZ_JAHXBG010000001.1
MTSKLESYVPAAPPQPATAPAPGSPSPATLAQREARRQQHEALLTRWKAIQEAGGADEWVRAQLVAKGAAAEEVDFEELSEKQKSAWKEKKKAEAVERRALERQAWEAWKATHINHLGTGVHWDEQGGPDKFDVPNREERAKANGMPELDSPEALAKALGVTVSRLRWFAFHREVDTGTHYQSWRIPKRDGGQRTITAPKKELKAAQRWVLANVVERLPVHGAAHGFVAGRSILTNALAHRGAEVLVKVDVKDFFPSVTWQRVKGLLRKGGLPEGAATLLSMLSTEAPREVMEFRGKTLYVAKGPRALPQGAPTSPALTNALCLKLDKRVSAMAKRLGFTYTRYADDLTFSWRRAKGAKGKAQADAPVAVLLARVKSILEAEGFTMHPEKTRVLRKGTQQRVTGLVVNEAPDGVPAARVPRDVVRRLRAAIHNREKGKPGKEGETLEQLKGMAAFIHMTDPAKGRAFLQRLEALEKLEPPK

SEQ ID NO: 6456 - protein, 475 aa, Stigmatella aurantiaca
  source 1..475: note = Related to NZ_FOAP01000003.1
MTAKLEPHVPAAPPVPGEAPAPTRPDPAKQEARRAHHEALRLRWKAIEEAGGTDAWVRQQLVAKGVAADEVDFESLTDKQKAAWKEKKKAEATERRAQKRLAWEAWKATHIHHLGVGVHWDEAGGPDTFDVENREERAKANGLPETLDSAEALAKALGISLSRLRWFSFHREVDTGTHYQTWEIPKRDGGKRTLTSPKRELKAVQRWVLANVVERLPVHGAAHGFVAGRSILTNALAHRGADVVVKVDMKDFFPSVTWRRVKGLLRKGGLTENLATLLSLLATEAPREVVRFRGQTLYVAQGPRALPQGAPTSPALTNALCLRLDKRVSALSKRLGFTYTRYADDLTFSWRRTKAPGQADAPVALLLARVKGVLEAEGFTLHPDKTRVQRKGSRQRVTGLVVNEAPEGAPGARVPRDVVRKLRAAIHNREQGKPGPEGETLEQLKGLAAFVHMTDAEKGRAFLRRLEALEQRQAR

SEQ ID NO: 6457 - protein, 467 aa, Myxococcus sp.
  source 1..467: note = Related to JACSRE010000153.1
MTNRIDDHVFAAPPVLTTRAPPRVKLTAAERAERERQRTAAEARWLEIEAKGGVDGWVRAKLIEAGHHPDVAGPASEDEKKTFKEKKTAERAERKALRALANEARRFGTVGFLGNTVHWDDLKGPDDFDLKDRAARAERNGLPPWETATELAAAMDLSLSELRWLTFHREVSTSTHYHSWKVPKRSGGERTITAPLPKLKALQRWALEHYFEKLPVHAAAHGFLPARSVLTNALAHVGADVVVKLDVKDFFPTVSWKRVKGLLRKAGATEQVATLLALLCTEAPRQLIEFREQTLHVATGPRVLPQGAPTSPAITNALCLRLDQRLSALARALGCTYTRYADDLTFSFKKTPERKRLALGILVETTKDILKSEGFALHAKKTQVLRRGAAQRVTGLTVNEAGPQVAKARVARDVVRRLRAAIHNRAKGKPYREGESHAHLQGLAAWVFMSDPKRGAQLLEQVAKLPQ

SEQ ID NO: 6458 - protein, 478 aa, unidentified
  source 1..478: note = Related to JAGNNG010000134.1; note = Deltaproteobacteria bacterium
MTARIDTYVKASPVSAAQPRQGQLSAAERAQREQERADRQARWLAIREAGGIDKWIDQQLASRGLASDGGDESALIERDKAGYKAKKKAEAEARRALRQKAWQAYHATHINHLGAGIHWEDDPDVDRFDVENRSERARDNGLPEISTPEQLAKAMGLSIPKLRQLTYHRETDTGSNYYSFTIPKRDGSPRSIFAPKRDLKAAQRWMLRQVAERLPVHSAAHGFLPDRSILTNALQHVGAHTLVKVDIRDFFPTVTWRRVRGLLRKGGLSEQAATLLSLLATEAPREVVQFRGKTLHVATGPRALPQGAPTSPALTNALCMRLDRRMSGLARLLGCRYTRYADDLTFSFCHADGHTGTGRAPVGALLRGVGQILTAEGFKLHPDKTRVVRVGERQRVTGLVINQVPKGVTAPGARVPRDVLRRLRAALHNREQGKPGKPGETLDQLSGMAAFVHMTDPARGRVLLDRLAALKAKQPEAT

SEQ ID NO: 6459 - protein, 479 aa, Chondromyces apiculatus
  source 1..479: note = Related to NZ_ASRX01000060.1
MTAKIDPIVQAAQPAILPVTTAPSVKPAGTPEERQRAHEERVARWKAITEAGGIDAWVQAELTSRGLLVSGDPARMSERERSQWKERKKAEVKERRTLRRLAWKAYLGTHIAHLGQGVHWEDKKGADKFDVPQREERAKALGLPQLAGAEDLAAGMELSVARLRWLAFHREVDTGSHYRRWTIPKRDGSERLITAPKKELKRAQRWALRNVFEKLPVHGSAHGFLSARSIVTNAAVHAGADVVIKIDIKDFFPTVTWRRVRGLLRKAGLAEGPATLLALISTEAPREVVQFRGKTLYVASGPRVLPQGAPTSPAITNALCLRLDRRMAGLARKLGLRYTRYADDLTFSWKSPATGETSREVPRARAPIGPLLHGTREILGAEGFRLHPTKTAVMRRGDQQKVTGLVVNAAGPSVPPVRVPREKVRELRAAIRNRELGREGKGETLAQLKGLAAFVFMADPVRGRAFLDRLAALETRAGG

SEQ ID NO: 6460 - protein, 492 aa, Chondromyces crocatus
  source 1..492: note = Related to NZ_CP012159.1
MTAKIDPIVQAAAPVVLPVTTAPAVKPTETAEERQRALEERVARWKAITEAGGIDSWVQAELSSRGLLVSGDPARMSDRERSQWKERKKAEVKERRTLRRQAWSAYLSSHIAHLGQGVHWEEKTGVDKFDVAQREERARALGLPAIASAEELAAKLEIPVARLRWLAFHREVDTGSHYKRWFIPKRDGTQRLITSPKRDLKRAQRWALRHVFEKLPVHGTAHGFLSARSIVTNAEAHAGADVVVKVDIKDFFPTVTWRRVRGLLRKAGLAEGPATLLSLLSTEAPRDVVQFRGKTLYVANGPRVLPQGAPTSPAITNALCLRLDRRMSGLARKLGMRYTRYADDLTFSWRAPAAAVASETGKKGKGKADAKAAEPRPQAPVGALLRAARDILGGEGFRLHPTKTTVMRRGDQQKVTGLVVNAAGSSVPAVRVPRERVRELRAAIRNRELGREGKGETLDQLKGLAAFVHMADPVRGRAFLERIAALESRSSG

SEQ ID NO: 6461 - protein, 500 aa, Sorangium cellulosum
  source 1..500: note = Related to NC_010162.1
MTAKIDATVQARAPVVLPITTPPAPGGAAARFHAAAGAEARRLAHEERVARWKAIDEAGGIDAWVSAELTSKGALATGDPKAMSDRERAQWKERKKVEARERRSLRRLAWEAYVATHVNHLGAGVHWSDRVGPDRLDVPGLSERARAHGLPDLPGAAELASALGLSIPRLRWLAYHREVDTGTHYRRWHIPKRDGSARTISSPKRDLKRAQRWALRNLFEKLPVHAAAHGFLASRSIVTNAAAHAGADTIVKVDIKDFFPTITWRRVRGLLRKAGVAEGPATLVALLSTEAPRDVVQFRGQTLYVATGPRVLPQGAPTSPAITNAICLRLDRRASGLARKLGLRYTRYADDLTFSFRATEAPGLAGAARPRAPVGALLRGLREILSSEGFRLHPSKTVVMRKGSRQKVTGLVVNHASEGAPAARVPRERVRALRAAIRNRELGRPGKGETLAQLKGLAAFVYMTDPAKGRAFLGRIEALERNQPAPVGEAGPHDARPVLT

SEQ ID NO: 6462 - protein, 452 aa, unidentified
  source 1..452: note = Related to JADLAG010000095.1; note = Polyangiaceae bacterium
MTEAGGIDAWVSAQLAAKGLAVTGDPASMSDRERGQYKERKKAEAKERRALRKLAWEAYLETHVTHLGAGVHWEDDAGPDRFDAPNREERARLIGLPALETADALAGALEVPVAKLRWLAYHREVDTGSHYRRWQIPKRDGTARTITAPKRDLKRAQRWALRHVFDKLPVHGAAHGFLADRSIVTNAVAHAGADVVVKVDIKDFFPTITWRRVRGLLRKAGVAEAPATLIARLSTEPPREVVQFRGKTLHVATGPRVLPQGAPTSPAITNAICLRLDRRMSGLARKLGFRYTRYADDLTLSWRAGGPPAAPPAAAAPGPGSPGGARSQRPPIGSLLRGIKQILLSEGFRLHPSKTVVMRRGDRQKVTGLVVKGAGDWVPPARVPRERVRELRAAIKNRELGRPGKGETLQQLKGLAAFVYMTDPVRGRAFLDRLAALEALQVKSGGAGEPTG

SEQ ID NO: 6463 - protein, 484 aa, unidentified
  source 1..484: note = Related to JABWBE010000187.1; note = Polyangiaceae bacterium
MTAKIDTSVRAAPPVVLPITTTPPSPPRVSAEERARVLEERLSRWKAISEGGGIDQWVSAQLTAKGALVTGDPSRMSDKERAQYKERKKVEAKERRSLRKLAWEAYAATHISHLGAGIHWEDSTDADKFDIANREERAKTIGLPPLVGAVDLAKALDIPITRLRWMAFHREVDTGSHYRRWLIPKRDGSSRTITAPKRDLKRAQRWALRNVFDRLPVHGAAHGFLSARSIVTNAKAHAGADTVVKVDIKDFFPTVTWRRVRGLLRKAGMAEGPATLLALLSTEAPREIVQFRGKTLYVATGPRVLPQGAPTSPAITNAICLRLDRRVSGLAKKLGFRYTRYADDLTLSWRAPVKPDAGTSPRAPIGTLLRGLKEILQSEGFRMHPSKTAIMRAGMRQKVTGLVINKAGENIPDARVPRDTLRRLRAAIKNRELGRPGKGESLAQLKGLAAFVYMTDPVRGRSLLDRIDMLEARSEGGGSPTPAT

SEQ ID NO: 6464 - protein, 476 aa, unidentified
  source 1..476: note = Related to SECR01001138.1; note = Myxococcales bacterium
MDPWITAQLKAKGLLTEDLSDEEDEDEDESDDDDDEDSDDEDSNDEDSDDEDSDEDAPPRKAAAKKAVAKAAPKVKSDLGKREYKEKKQAEAVERRVLKRLARQAYTAAHIAHLGAGIFWRDDTRRPDAFDHPQRETRAQELKLELTDAKQLAGALGLTIPALRWLSFHREVDTGTHYRSWQIPKRDGKSTRTISSPKKQLKTAQRWLLRNVLEKLPVHGAAHGFLSARSIVTNAQVHAGAEVVIKVDIKDFFPSITWKRVKGLLRKHGLPEGVATLLSLLSTEAPRDVVQFRGKTLYVAKGPRALPQGAPTSPALTNAICLRLDRRLSGLARSLGFRYTRYADDLTFSWHPEPVLPGTSPQPGTGALLRGIGQILEGEGFSLNQAKTRIMRDGTRQAITGLIVNGAPGKATARVPRETLRQLRAAIHNREAGKPGRPGEGLEQLRGMAAFVHMTDAARGKALLARIDALAARDKG

SEQ ID NO: 6465 - protein, 470 aa, unidentified
  source 1..470: note = Related to JADJRH010000001.1; note = Polyangiaceae bacterium
MTAPFDPHLPADSPVRAEPRSTTRRSPEETAKLAAVRAERVALWKAIEEAGGIAAWVRAEIAKKGISTDGVDPSTLSDRQKSSFKDKKRAESEARRTFKRLAWDAYKETHITHLGGIYWDEDASPDKFDIDGREERAKDNILTDIQSPGALAQALGLTVAKLRWLTFHRDVDSGTHYRRWQIPKRDGSMRTITAPKLHMKTAQRWALRNVFDKLPVHGAAHGFLAARSIVTNASVHAGADVVVKIDIEEFFPTITFRRVKGLLRKAGLSEQAATLIALLCTEPPRESVNFRGKTVYVASGPRALPQGAPTSPAITNALCRRMDLRLSGLARLLGLKYTRYADDLTFSWKCPTPGAKAPLGVLLRGVTTILKSEGFRIHKKKTSIMRKGARQAVTGLIINSEVGAASARVPRDVIRNLRAAIKNRELGRPGKEGETLAQLQGLAAFVYMSDPVKGRTFLDRIAKLQAPTKT

SEQ ID NO: 6466 - protein, 468 aa, unidentified
  source 1..468: note = Related to JAEUKI010000081.1; note = Myxococcales bacterium
MASKLETMVSAAAPVEKEQPAPKSAPTEEQLAARAKAHEERVLRWKQVQEAGGADEWIRGELRKKGLLVESDPSRLGDREKGSFKEQKKAEAAERRALKKLVWDAYRATHVVHLGVGVHWSDHFEADRFDIERREDRLKANDLPEYKDAEGLAKAMGIDVPTLRWFSYHRDVDAGTHYRRWQIPKRTGGSRTITAPKRGLKAAQRWVLRNIAEKLPVHGAAHGFLSARSIVTNAQVHAGADVVVKVDVKDFFPTVTWRRVKGLFRKAGLNEATATMLAMVCTEAPRDVVEFRGRTLYVASGPRALPQGAPTSPAITNAICLRLDRRLSGLARVLGMVYTRYADDLTFSWRKSDDRAKAPVGALLGGVKKILRAEGFVLHPDKTTVMRDGDRQKVTGLVVNKAEGQPAARVPRETLRKLRAAIKNRELGRPGKGDETIDQLKGMAAFVFMCDAKKGQAFLDRIAKLEGK

SEQ ID NO: 6467 - protein, 434 aa, unidentified
  source 1..434: note = Related to NZ_CBTJ020000010.1; note = Candidatus Competibacter denitrificans Run_A_D11
MSETPPTWEEIAQVGDIERWVVAQLQQRGLLDEVADPAKLSGNALRQFKARREEERKVRKLLRQQAWAAYRKAHLVHLGADVFHHDTPDQDRYDLPDPETRRETNGLPALKDVQALAKALDLTIPQLRWLAFHREVDSGSHYQYWTIPKRDGGQRLISSPKPTLKKTQRWILRQMAERLPVHGAAHGFLPGRSIFSNAAVHAGARLLVKLDIRNFYPTVTWRRVKGLFRKGGYGEQVATVLALLCTEAPRELLQLDGKPYHVASGPRALPQGAPTSPALSNTVCLRLDCRLSGLSQKLGFRYTRYADDLTFSWHEHSPPPLGRLLRCARLILQTEGFVPHPEKTRILRRSRRQTVTGLVVNAAPDHSSPARVPRLKIRELRAALHNRLRGKPGKAGETLAQLRGWVAYLHMTDPDKAKPFLAQLNQLEARGADE

SEQ ID NO: 6468 - protein, 433 aa, unidentified
  source 1..433: note = Related to CP065007.1; note = Candidatus Competibacteraceae bacterium
MSETPPTWEDIAQVGDIERWVVTRLRQLDLLDEVTDPGKLTSAALHQYKARREEERRVRKQLRQQGWAAFRQAHLVYLGADVFHHDTPDQDRYDLPDPETRREVNALPALKDVQALAKALDLSIPRLRWLAFHREVDSGSHYQYWTIPKRDGGARLISAPKPTLKKTQRWILRQIAERLPVHGAAHGFLPGRSIFSNAAVHAGAHTIVKLDIRHFYPTVTWRRVKGLFRKGGYGEQVATVLALLCTEAPRELLPLDGQHVHVASGPRALPQGAPTSPALSNTVCLRLDCRLSGLSQKLGFRYTRYADDLTFSWHDSSPPPLGRLLRCVHAILKAEGFVPHPKKTRILRRGRRQTVTGLVVNETPAGSPARVPRAQVRRLRAALHNRLHGKPGKEGESLAQLRGWVAFLHMTDPERAKPFLAQLKQLEERGTDE

SEQ ID NO: 6469 - protein, 528 aa, unidentified
  source 1..528: note = Related to JAFKJJ010000105.1; note = Planctomycetes bacterium
MGLFDWMFRRGRKSDPEPIAPSPVSPPPPSEAPGRPAPKAEPQPEATGDPYAATEFLPVSRQEIVDAAKGGNLLSTAFQFGRQSIIPPASDPRTQLIDRAMVTHGLLSPEELNEIHRVGEEYDRVKPTDANLAAAAGLAGAAAVKAYRESKEREKERKKAESAARKKARADAIRHRRASDIIFLGRGVSGRLHLRMSDQQRLAAHELPVMHTPADVAGALGLSIKQLRWLAYHSEAATRTHYVKFQVPKKSGGMRTLAAPHKTLKGAQHWVLANVLNKLPVTEAAHGFVAGRGIVSNANPHVGKAVVVNLDLSDFFPTITFHRVRAVFERYGYSGSVASVLALLCTECPRATVTYAGTKYEAATGPRGLPQGAPTSPGLSNQVARKLDKRLLGVAAKLGLTYTRYADDLTFSGGPELAGKIGWLLAKVRNIAREEGFAVNEKKTRVMRRSTAQTVTGVVVNDKPSVSREELRRLRAILHRAKTEGLEAQNREGRPNFRSWLAGKIAFVNMVRPDAGAKLKAAFDALGR

SEQ ID NO: 6470 - protein, 523 aa, unidentified
  source 1..523: note = Related to VGZJ01000002.1; note = Planctomycetes bacterium
MGLFDWMFRRGRKVEPDPVAPPSTDASLRGAAKPAEPAPPPPPADQYAATDFLPITREEIVDAAKEHGRLLWTAFQFGRPSQIPPTSDPRTQIIDRALVTHGLLTPEDLTEIHTVGAEYDEVKPTEMAIAAAAGLAGNAAVQEYREAKEREKARKKAESAARKKARAAEVKRRRDTDIIFLGRGVSGRLHMRLSDEASLTARGLPVLHAPADVAKALGLTIKQLRWLAYHTEAATRTHYVKFEIPKKSGGMRTLAAPHKRLKAAQHWVLANVVNKLPTTDAAHGFVPGRGIVSNANPHVGKAVVVNLDLSDFFPTITFFRVRAVFERYGYSGSVASVLALLATECPRASVTYAGTKYEAATGPRGLPQGAPTSPGLSNQVARKLDKRLLGVATKLGLTYTRYADDLTFSGGPELAGKIGWLLAKVRHVAKEEGFAVNEKKTRVMRRSAAQMVTGVVVNDKPSVSRDELRRLRAILHRAKSEGLDAQNRENRPNFTEWLRGKIAFVSMVRPDTGAKLKAAFDAL

SEQ ID NO: 6471 - protein, 522 aa, Isosphaera sp.
  source 1..522: note = Related to PNKH01000071.1
MSAFDWLFRRTRKPDPEPPAPPPPLPPPVADAPGSPSPPPPVADPYGSEFLPVTRGEIVAAAKSGNLLSTAFQFGRPSVIPPTSDPRTQLIDRAMVTAGLLSPEELAEIHRVGEEYEKAKPTEANLAAAAGLAGDAAVRAYRAEKERRKAQKKAESAARKKDRAEAVATRRATDIIFLGRCVSGKLHLRLSDETRLAEFGLPVLHTPADVAKALGLTITQLRWLAFHTDVATRTHYVKFQVSKKSGGTRTLAAPHKTLKAAQRWVLANVAAKFPVTEAAHGFVAGRGIVSNAGPHVGKAVVVNLDLSDFFPSVVFARVRAVFERYGYSGAVATVLALLCTECPRAAVTYAGTKYEAATGPRALPQGAPTSPALSNQVARKLDRRLLGVARKLGLTYTRYADDLTFSGGPELNEKVGWLLAKVRNVAREEGFAVNEPKTRVMRRSAAQTVTGVVVNDKPSVDRAELRRLRAILHRAKAEGLAAQNRDGRPDFRAWLVGKIAFVRMVRPDAGAKLKAALDALPG

SEQ ID NO: 6472 - protein, 532 aa, Gemmata sp.
  source 1..532: note = Related to NZ_JAGKQQ010000001.1
MSMFDWIFRRKRDVTPSAESAPPSVPPPPDPRPQQQAPKAEPQAEAVGDPYSASEFLPISRQEIVDAAQKHGRLLATAFQFGRQSIIPPVSDPRTEIIDRALVTNGLLSPEELNEIHRVGEEYEKVRPTEQGMAAAAGLAGNAAVKAYREAKERAKARKKAESAERKKARAEAVRRRRATDVIFLGRGVSGRLHLRMSDEAKLTALGLPVLHAPADVAKALGLTIKQLRWLSFHTEVATRTHYVKFQVPKKSGGVRTLAAPHKKLKAAQHWILGNVINKFPVTEAAHGFVAGRGIVTNANPHVNKAVVVNLDLSDFFPSIAFFRVRAVYERYGYSGSVATVLALLCTECPRTAVTYAGTKYEAATGPRGLPQGAPTSPGLSNQVARKLDKRLLGVAAKLGLTYTRYADDLTFSGGAELAGKIGWLLAKVRNICREEGFAVNEKKTRVMRRSAAQVVTGVVVNDKPSVSRDEIRRLRAILHRAKSEGLDAQNREGRENFREWLAGKIAFVNMVRPDVGAKLKTALDSLGERPA

SEQ ID NO: 6473 - protein, 536 aa, Gemmata obscuriglobus
  source 1..536: note = Related to CP025958.1
MSLFDWVFRRKRDADTPPAPPPAAPTAPASSDKAPSGNTTSGTPGANAPRSSEGSEDQYAANDFLPISRQEIVDAAKKHGRLLATAFQFGRQSIIPPVSDPRTEIIDRALVTHGLLTPEELNEIHRVGEEYEKVRPTEQGIAAAAGLAGTAAVQAYRAAKEAEKERKKREAELRKKVRAEAVWRRRTTDIIFLGRGVSGRLHLRLSDEGRLTELGLPVMHTPADVANALGLTVPRLRWLAFHTDVATRTHYVKFSVPKKSGGTRQLAAPHKSLKAAQHWILANVVNKLPVTEAAHGFVADRGIVTNANPHVCKAFVVNLDLSDFFPSIAFPRVRSAFERYGYSGCVATILALLCTECPRAAVTYAGTKYEAATGPRGLPQGAPTSPGLSNQVARKLDKRLLGVATKLGLTYTRYADDLTFSGDADAAAKIGWLLTKVRHIASEEGFAVNEKKTRVMRRSAAQMVTGVVVNDKPSVCRDELRRLRAILHRAKSEGLDAQNREKLPNFREWLRGKIAFVSMVRPDAGAKLKAQLDAVS

SEQ ID NO: 6474 - protein, 528 aa, Frigoriglobus tundricola
  source 1..528: note = Related to CP053452.2
MSLFDWMFRRRRTSEPEPVQPPVPVEPPVPAVPPVTAAPETTKTEPAGDPYASAEFLPVSRQEIVDAARGGNLLSTAFQFGRSSTIPPASDPRTQLIDRAMVTHGLLSPEELNEIHRVGDEYDTVKPTDQSMAAAAGLAGAAAVRAFREAKEREKARKKAESAARQKARAEAVKRRRATEIIFLGRGVSGRLHLKLSDELRLVANGLPVLHSPTDVAHALGLTIKQLRWLAFHTEVATKTHYVTFQVPKKSGGMRTLAAPHKALKAAQHRLLETVVARLPVTEAAHGFVAGRGIVTNAGPHVGKEVVVNLDLSDFFPSITFPRVRAVFERYGYSGSVATVLALLCTECPRQAVTYAGTKYESATGPRGLPQGAPTSPGLSNQVARKLDKRLLGVAAKLGLTYTRYADDLTFSGGPELASKIGWLLAKVRHVAQEEGFAVNEKKTRVMRRSMAQTVTGVVVNDKPSIDRDELRRLRAILHRAKTEGLDAQNHEGRPNFRAWLAGKIAFVHMVRPDAGAKLKAALDALDS

SEQ ID NO: 6475 - protein, 528 aa, unidentified
  source 1..528: note = Related to LR594584.1; note = Gemmataceae bacterium
MSAFDWLFRRKRTPESEPPAQAPPAAPAPATPVATPPAASAPAPPKAPAADPMSSEFLPVTRAEIVDAAGKGNLLSTAFQFGRPSIIPPASDPRTQLIDRALVTNGLLSSEELTEIHRVGDEYEAVKPTEAGMAAAAGLAGEAAVKAYREDKGRRKAQKKAESAERKKQRAEAVKLRRETDIIFLGRGVSGKLHLRLSDESKLAERGLPVMHTPADVAKFLNLTIKQLRWLAFHTDVATRTHYVKFQVPKKSGGVRTLAAPHQKLKAAQHAILANIASRFPVTEAAHGFVAGRGIVTNASPHVGKVAVVNLDLENFFPTVVFPRVRAVFERYGYSGSVATVLALLCTESPRASVTYAGVKYEAATGPRGLPQGAPTSPALSNQVARKLDRRLLGVAAKLGLTYTRYADDLTFSGGEELTSKTGWLLARVRHVAQEEGFTVNEKKTRVMRRGAAQMVTGVVVNDKPSIDRDELRRLRAILHRAKTEGLDAQNREGRPNFRAWLVGKIAFVRMVRPDAGAKLMAALDALG

SEQ ID NO: 6476 - protein, 524 aa, unidentified
  source 1..524: note = Related to PNLP01000016.1; note = Planctomycetaceae bacterium
MSMFDWLFRRNRKTENVPLVPPPAPAPVADVPRAEAKPQAATPSPVDPYGSEFLPITRGEIIDASKKGNLLSTAFQFGRPSVIPPAADPRTHLIDRALVTNGLLTPEDLTEIHRVGDEYEKVKPTEIGMAAAAGLAGDAAVKAYKADKERRKAQKKAESAARKAARIEAVKARRATDIIFLGRGVSGKLHLRLSDEARLAERELPVMHTPADVAKLLGLSIKELRWLAFHTEVATRTHYVKFQIPKKSGGMRTLAAPHKKLKAAQHSILSNIVSRLPVTEAAHGFVAGRGIVSNANPHVGKTVVVNLDLENFFPTVVFPRVRSVFERYGYSGSVATILALLCTECPRATVTYAGVQYEASTGPRGLPQGAPTSPGISNQVARKLDKRLLGVAAKLGLTYTRYADDLTFSGGEALNSKTGWLLAKVRHIAQEEGFAVNEKKTRVMRRSAAQLVTGVVVNEKPSISRDELRRLRAILHRAKTEGLEAQNREGRPNFRDWLIGKIAFVSMVRPDVGGKLKAALDALS

SEQ ID NO: 6477 - protein, 547 aa, unidentified
  source 1..547: note = Related to JAIEQO010000648.1; note = Gemmataceae bacterium
MSLYDWLFRRTPKPDPEPTPEARGADAPRSPSPPPPPQPAQQGVNAPRSPQPPTTPEPQPVTDPYAASDFLPITRGELLKSAQADGNLMRNAWQTGRTSIIPDANDPRTKLIDRALVAHGLLTPEQLIEIHRVGDEYARAKPEGDPIARFAGMAGEAAVQAYREAKARLKEQKKAEAKAREERRAEEVKHRRATDIVFLGRGVSGRLHLRLSDEARLADFGLPVLHTPADVASALGLSIQQLRWLAFHTEAATRTHYVKFEVPKRSGGMRVLSAPHKTLKAAQRWILANVVSRFPVPVAAHGFVAGRGIVSNAGPHVGKAVVLNMDLENFFPSIPFPRVRAAFERHGYSGSVATVFALLCTECPRTTATYAGVKYEVATGPRGLPQGAPTSPALSNQVARKLDARLLGLAAKLGLAYTRYADDLTFSGGPEFQEKVGYLMARVRHLAADEGFTVNEKKSRVMRRSIAQSVTGVVVNDKPSICRDELRRLRAVLHRAKAEGLDAQNRDGRENFRAWLEGMIAYVSMVRPDVGAKLKAEFDRLIGASKT

SEQ ID NO: 6478 - protein, 490 aa, Urbifossiella limnaea
  source 1..490: note = Related to NZ_CP036273.1
MQPLPPADPYAAPDFLPIARGEIVSAAAGKNLMANAWQTGRTSIIPPADDPRTRLIDRALVTHGLLTPEDLAEIHRVGAEYARLKPSLENVALQAGFAGEAAVQAYREAKERLKQLKREEAARRKNERAEAVQRRRDTDVIFLGRGVSGRLHLRLSDPDRLAEYGLPVLHAPAEVAAALGLSIKQLRWLAFHTEAATRTHYVKFQVPKRSGGVRTLAAPHATLKRVQHWILEHVVSKFPVTEPAHGFVPGRGILSNATPHVGKAVVVNLDLSDFFPSVTFPRVRAVFERHGYSGSVATVFALLCTECPRTSATYAGTPYEVAIGPRGLPQGAPTSPGLSNQVARRLDKRLTGLAAKLGFAFTRYADDLTFSGDPEQAEKVGYLLSRVRHLAAEEGFTVNEKKTRVMRRNAAQTVTGIVVNDKPSVSRELLRQLRAILHRARAEGLDAQNRAGRENFRAWLDGTISFVAMVRPDVGAKLRAEYNALSERSS

SEQ ID NO: 6479 - protein, 533 aa, unidentified
  source 1..533: note = Related to LSTD01000254.1; note = Planctomycetaceae bacterium SCGC AG-212-F19
MGLFDWLFGRPGAKQPPAPAPAPQAAASAAAPGAAKPQTTETKGPKPQPAKAPNLSASDFLPITRIDLKESAEQIERWGPWFGRRDLIPPADNPRTKLIDRGLVTQGLMTPEQLVEIHEVGAAMDRVRPIQFQIQAQIAQSGQAAIEANRQRKAEIKAQKKAASAERKKKRSEAIAQRRATDIFFLGRGVSGRLGERTSDETKLTQLGLPVLATPADLAQALGLPIPKLRWLAFHTEVASRVHYVCFTVPKKSGGTRLLSAPHRTLAAAQQWIFANIVGKLPVEPPAHGFTPGRSILTNAQPHVGKNVVVNLDLEGFFPSITFPRIRSVFFRLGYSPAVATILALLCTECPRKQVTYNGKIYHVALGPRGLPQGACTSPGLSNQATRRLDKRLAGLAKKLGLTYTRYADDITFSGNEELKDKVGYLMARIRHIAEAEGFAINENKSRVLRRNAAQTVTGIVVNDRPGVSRKDLRRLRAILHRARHEGLEAQNRAKRPNFRAWLEGMIAYVSMVRPEVGKRLRDQLAALAPKGA

SEQ ID NO: 6480 - protein, 532 aa, Tuwongella immobilis
  source 1..532: note = Related to NZ_LR593887.1
MNPLERLLEFLGFTKTEADTSKPAKGKPAPADAKSAAGGSDASGAKKPSGPAVAKTFNLDASDLLPITSEELKSGLRKLLRSGGFRFVGRGMIPHGDERTRLINRALLSEGFLTAEQLEAITQVAVEFEELQKALARIEGQVNKSAKKAVEADKEEKARIKAQKKAEALAKKQKHAADVAHRRETDIIFLGRKVSAKLNDRKGNAELLAGYGLPAISTPAELAAALGLSVAKLRWLAFHTEVATRMHYVQFQIPKKSGGTRLLSAPHQSLAAAQEWIYREIIQKIPVETPAHGFVTGRSIVTNAQPHVGNPVLINMDLEAFFPTITWQRVRSVFHRAGYSPSVATILALICTECPRDTVEYAGKTYYVATGPRGLPQGACTSPGLSNLVARRLDKRLGGLCGKLGLTYTRYADDLSVSGPAEINEKVGYLMARIRHIAEAEGFQVNPKKTRVLRPNTAQLVTGIVVNAKPSLPKKELRRLRAILHQAQKNGLDAQNREQIPHFRAWLAGKISFVRMVRPELGAKLQAQFDAL

SEQ ID NO: 6481 - protein, 536 aa, Limnoglobus roseus
  source 1..536: note = Related to NZ_CP042425.1
MGFWDFLPKLFKPVPSESPPPSPSPIPAEPVAETFVPVPPMPVAEPPAAPPPGPIAVAPPPAAPSFLPITRDDLLKQGEEVRRTTGWMFFGRRDLIPPTSDPRTLLIDRGMVTQGLLTPDELAEMHRVGDEHAKHADRFRQITIKAGQTADQAVEADRAARVAIKAQKKAAAAAFKQTRADAVAVRRATDIIFVGRDVSAMMNDRSSDAERLKAAGLPVLHTPSDLAAALGLAIPQLRWLCFHTEVATRPHYVQFEVPKKAGGTRTLAAPHAKLAAAQEWVLANVLAKLPTEEPAHGFVPGRSTVTNALPHAGRDVVVNVDLEGFFPAVRFPRVRHLFRRLGYSGAVATLLALLGTECSRKRVVYDKQTYFVAIGPRSLPQGACTSPAVSNQIARRLDRRLAGLAKKLDWAYTRYADDLTFSAPPGHREQVGYLLARVRHMAAAEGFALNAKKTRVQRPESRQAVTGLVVNAAPAVPRDVVRRVRAILHRAKHEGLDAQNRTGHPNFRGWVEGMIAYVAMVKPTQGEALRKQYTAL

SEQ ID NO: 6482 - protein, 353 aa, unidentified
  source 1..353: note = Related to JAFATI010001137.1; note = Planctomycetes bacterium
KATDIMFAGKGVSALLGDRASDADKLAAAGLPVLHTPSDLAAVLGLTIPMLRWLCFHTEAATRIHYIQFEVPKKSGGTRTLSAPHRTLAAAQEWVLTNILSKLPAEEPAHGFVPGRSTLTNAAPHAVRDVVVNLDLEGFFPSIGFARIRHVFRRVGYSGAVATLLALLCTECPRKRVVYAGTPYFVATGPRGLPQGACTSPALSNQVARKLDRRLAGLARKLGLTYTRYADDLTLSSGPGFRDRVAYLIARVRHIAADEGFVVNAKKTRVLRPESRQLVTGLVVNAAPAVPRHVVRRLRAILHRARTEGLAAQNRDGHPNFRGWVEGMIAYIAMARPDTGRILRAALEELPRS

SEQ ID NO: 6483 - protein, 543 aa, Aquisphaera sp.
  source 1..543: note = Related to NZ_JAALJH010000005.1
MNILRRLLGWILGHTIPPAPPWPKVPAPPPPPSPASPERPSGPEPEMLGAAGPAKPVEKKDRPYGSIPEDYRPISREEILEAAAGRSLFSNVWFGRRDRIPPADDPRTALIDRAMATQGFLSPEQLVEIHTVGHEMERFRPTVEGISHQAGLAGAAAVEADRAERARIKARKKAEAEERKRLRAEGIALRKREDITFLGRRVSGRLGERTSRVEDLERSGLPILATPAEVARAMGLSVSRLRWLAFHAEVASRVHYVQFRVPKKSGGERILSAPHRSLRLAQEWIQLEILRKLPVGPEAHGFVPGRSILTNATPHAGKALVVNLDLEGFFPSIGFPRVRKVFEHLGYSGSVATILALLCTECPRKAVTLDGEMLHVATGPRGLPQGACTSPALSNQVAIRLDRRLAGISAKLGFTFTRYADDLTFSGDAEVEAKVGYLLARARHIAEGEGFAVNEKKTRILRRNNRQEVTGLVVNERPGVPRDEVRRLRAILHHARAEGLDAQNRENRPDFRAWLLGKIAFVRMVRPEVGDRLLAELRQLDAS

SEQ ID NO: 6484 - protein, 536 aa, Aquisphaera giovannonii
  source 1..536: note = Related to NZ_CP042997.1
MNVFRRLFGWLLGRRLKPAPSLPASRPAAPGSPQSPMTVAPTPAEVVAKKGRSYGLDAGDYLPISREEIKEAARGRSLFANAWFGRRDRIPPADDPRTATIDRAMATQGFLSPEELAEIHAVGEEMERLRPTAEHVGHQAALAGVAAVEADRAERARIKAQRKAEAAERKRLRAEAIALRRREDIVFLGRKVSARLGERASRVDDLQRAGLPVLSTPAELALAMRVSIPRLRWLAFHAEVATRVHYVQFRVPKKSGGERVLSAPRSSLRRVQRWILDQVLKNIPAGPHAHGFVAGRSILTNATPHAGKAVVVNLDLEDFFPSIGFPRVRKVFEQAGYSGAVSTILALLCTECPRKTVTYQGETLHVATGPRGLPQGACTSPVLSNHVAIRLDRRLAGVATKLGFAYTRYADDLTFSGPSEVDAKVGYLLAKVRHIAQEEGFAINAKKTRVLRRNARQEVTGLVVNDRPGVRRDEIRRLRAILHRARTEGLASQNREGRPDFRAWLLGKIAFVRMARPEVGERLLAEFHEIDRGRSA

SEQ ID NO: 6485 - protein, 556 aa, Paludisphaera sp.
  source 1..556: note = Related to NZ_JAHPZK010000060.1
MSIWQRFLQFIFGERSFRPAEPPPTFSPAVPPSLAERPTTAEAPRLTIPEASADPDFAADAGTHKDGQPKLAGKAVDPLDAGAYLPISREEIKREAKGKNLFNNFAFGNRSIIPPADDLRTKLIDRAMVTHGLLSPEQLHEIHAVGARMDELRPTMAAVEHKAAKAGEAAVEADREARARLKAQKKAEAIERKRLRAEGIAYRRATDIVFLGRGVSGRLGDRTCDASKLEAADLPVIATPTELAAALGVSVPRLRWLAFHNEAATRVHYVQFTVPKKSGGTRTLSAPHRSLAEAQDWIFREILARLPVEPPAHGFVTGRSILTNASPHCGKRIVVNMDLEGFFPSIGFARVRSVFQRLGYSPAAATILGLLCTESPRRSVVYDGVAYHVATGPRGLPQGASTSPALSNQVARRLDRRLSGLSTRLGLAYTRYADDLTFSGDEAFEGRVGYLMARVRHFAAEEGFAVNEAKSRILRQGTAQTVTGLVVNDRPGVRREEVRRLRAILHRARTEGLEAQNREGRPDFLAWLRGKIAFVAMARPETGALLKAELEALLAG

SEQ ID NO: 6486 - protein, 511 aa, Paludisphaera sp.
  source 1..511: note = Related to NZ_JAALJI010000068.1
MAAPPPTPEASTDPYFSARTDPTKEASPKKVDPLDAGDYLPITREEIKEEAKGKNLFNSFAFGLRSVIPPADDLRTKLIDRALVTHGLLSPEQLREIHDVGARMEAMKPTMAAVEHRAARAGEAAVAADREARARLKAQMKAESAERKRIRDEAISQRKATDILFLGRGVSSRLGDRTGDASKLAEAGLPVVSTPAELAAALGISVPKLRWLAFHNEAATRVHYVQFTVPKKSGGTRTLSAPHRSLAEAQGWILREVLAKLPVEPTAHGFVTGRSILTNASPHCRKRLVVNMDLEGFFPSIGFRRVRSVFGRLGYSPAVATILALLCTECPRRSVVYAGETYHVATGPRGLPQGACTSPALSNQVTRRLDRRLGGLASRLGLTYSRYADDLTFSGDEVLEGRVGYLMARVRHLAGDEGFAVNEAKSRVLRRGTAQTVTGLVVNDRPGVRRTEVRRLRAILHRARSEGLAAQNREGHPDFLAWLRGKIAFVAMARPDVGAALRAELESLLVR

SEQ ID NO: 6487 - protein, 645 aa, Singulisphaera acidiphila
  source 1..645: note = Related to CP003364.1
MLRRSAVVDSAPETASPRVLFFWPGAVAVRRAESTVVPGVRLQPRASVNTLGRRFEVGQRPVPVLPTPNPSAGDMNLFHRLLRFLFGYEPPARSASQPRPTPAPAPAPEPPTTPDAIAATLTEAFGKTAETTAPALLPDATADPYFAVTADVQSTATNQGKGNGKSSLGLEANAYLPISREEIKKTAKGIDRFGNPWFGRRDLIPPTDDPRTNLIDRAMVTQGLLSPTQLHEIHDVGARMDQIRPSLAAIESRAAVDGAAAVAADREARVLLKARKKAEAAQRKQERIDQVAHRKATDIVFLGRGVSAGLNDRQSDLDALTGAGLPLLSTPADLAAALSLSISKLRWLAFHTEAATRTHYVQFTVPKKSGGLRTLSAPHRTLAEAQRWIFQEIVAKLPVESAAHGFVAGRSIVSNAEAHCRRAVVVNMDLEAFFPSIGFPRVRRVFRKLGYSPAVATILALLTTECPRRTVVYGGTTYHVATGPRGLPQGACTSPGLSNQVAIRLDRRLSGLARKFDLSYTRYADDLTLSGDATLEAKVGYLMARLRHIAGEEGFAVNEAKSRVLRQATAQTVTGLVVNDRPGVRRAEVRRLRAILHRAKSEGLASQNRDGHPNFLAWLHGKIAFVAMARPELGAALRAELDSLL

SEQ ID NO: 6488 - protein, 524 aa, unidentified
  source 1..524: note = Related to JAIEMG010000080.1; note = Gemmataceae bacterium
MGFFSRLIERLFGKTDTGVIVPKQAAPGATAGAAPQAAPPLARPLNLSADNFLPIARDELKEAAKDVTRWGPWFGRRDVIPPADDPRTRLIDRGMVANGLLTQEQLVEIHQVGAEMERLRPLQFGVSNLAAQAGESAVQAERARRTEIKKQKKAEAADRKKRRAEAIVQRHATDIVFLGRGVSARLGERTSDGEKLKSLDLPMLQTPAELASALGIGVPRLRWLAFHAEVARRVHYVGFTVPKKSGGTRTLSAPHRSLAAAQEWILRNILDRLPVEASAHGFVIGRGTLTNANLHVGRAILVNMDLQDFFPSIGFPRVRSVFQRLGYSPAVATVLALLCTECPRRPVEYDGQSYHVAIGPRGLPQGACTSPALSNQVARRLDRRLHGLALTLGVTYTRYADDLTFSGAAEFNARVGYLMARIRHIAEDECFAVNARKSRVLRRNTAQRVTGLVVNDKPGIGRQEVRRLRAILHRAAKEGLEQQNREGRPNFTAWLHGKIAYVSMVRPDLGARFQAQLHAILQGK

SEQ ID NO: 6489 - protein, 645 aa, Stieleria sp.
  source 1..645: note = Related to JAJKFQ010000002.1
MADKATTEKFELYVVDLVKSGQTFTASDVVIGARARGIDVRHNESRDIIHDLHRRGVLGPAYSRTTVPLTDSTRPFVYHPTNINPSEYRSSFTDVSSSLRSGHRSQPKRGFLGRLIQSLFGGGDDESKSGRKQRSGDQPAPADLSSNPSVPPKSSRRMPQRRKNVTLDLDAKSFLPIDRDELLSSAKKVNLWASPWFGRRDLIPPLDDPRTNLIDRGMVAEGLLTSDELRRIHEVGAEMDFYRPDDLLLRHQAQRSASGAIEAQRQASAERKALKKAEAAERRQQREKEIQYRRANQIDYLGRRVSTQLHLCQSDADKLQAVNLPVLHTTKDLADAMGIEISRLRWLAFHEDVASRIHYVSFSIPKRSGGTRTLSAPLPRLAAAQRWIYAQILRDLPVGDCVHGFVPGRGIVSGAQPHIGQEVLLNMDLEDFFPTIGFARVRHAFHWLGYSPAVSTVLALLCTEAPRREVSYQGTAYQVATGPRVLPQGACTSPAISNLVTERLDRRVIGFANKFGLTYTRYADDMTLSGGTDFAGQIGYAIAKIRHIAEEEGFRVKTSKTRVLRRNAAQRVTSLVVNDKAGVGRRKLRQVRAILHNASKTGLQAQNRDNHPNYRASLEGMIAYIAMTRPDQAATMRAKLDAIAD

SEQ ID NO: 6490 - protein, 547 aa, Rhodopirellula baltica
  source 1..547: note = Related to PPHI01000001.1
MSMADKATTEAVERFVIELVNCDEAFTAADVTLGARAAGIQVHYSDSRNILHDLHRRGILGTSYQRSSVQLTDGTKPFVYHPVGFTANHYRSNQSSLMASDHPDQVSQPKPGLLARLKQFLLGRGDSDRSDSSKDARSLANQAPATQATRAAQRKNVTLNLNAPSLLPISRKELLAGAKSINLWSSPWFGRRDVIPPIDDPRTLLIDRAMITAGLITPEELARIHEVGAQMDRYRPDELLMRHQANRAGRDAVAEDRRAKAERKAAKKAESEAKRQRRREEIEIRRATRIDFLGRRVSTKLHLCESDEERLNAAGLPILHTTTELADAMGIQLSQLRWLAFHDDVASSTHYVEFDIPKRAGGVRRLSAPLPRLAEAQRWIYSQILRGMPVDDCVHGFVPGRGTATGAAPHVGQDVILNMDLEDFFPSIGFARIRHTFERLGYSPAVSTVLGLICTEAPRRKVSFQGATYYVATGQRVLPQGACTSPALSNLVAGKLDRRILGFAKCIGATYTRYADDLTLSGGQDLANRIGYTIARFVISARTKASG

SEQ ID NO: 6491 - protein, 544 aa, unidentified
  source 1..544: note = Related to NZ_VSZO01000001.1; note = Proposed Roseiconus lacunae
MADQSPNQASNQQPASPNPKLGWLGRIFRSLFGGPTRRPDRSSDSFAAMAQQPRPLPPRRREKVTLDLDAKAFLPIDRDELLSDAKQINLWASPWFGRRDLIPPADDPRTSLIDRGMVTEGLLTPDELTRIHEVGAEMDYYRPAELFLRHQARQAGRDAVELDRQTRAERKARKQAEAEAKRIRRRERVERRFATQIDFLGRGVSTQLHLCESDVDRLKEAGLPVIQTTTELADAMGIEIPRLRWLAFHSHVAERSHYISFRIPKKSGGTRTLSAPLPRLAAAQRWIYSQILRERPHPECVSGFVPGRSILTGAAPHVGSQTVLNLDLEDFFPSIGFARIRHAFQFIGYSPAVATVLALLCSEAPRRKVRFNGGEYYVATGPRVLPQGACTSPALSNLIAAKLDRRISGLASKLGATYTRYADDLTLSGDRDFDDKAAFAMACVRHIAEDEGFRVKLSKTRVLRQNAAQRVTGLVVNDKAGVGRKKLRLIRAILHNAEKTGLNAQNRDHHPNFRASLEGTIAFVAMSNPERAAKLRRQLDAVPD

SEQ ID NO: 6492 - protein, 653 aa, unidentified
  source 1..653: note = Related to DNWZ01000159.1; note = Planctomycetaceae bacterium
MADSNAQKIVTDITRRRAAAGESFSAFDITTEARSQGAFIRHGEARDLVQALFQNGSMGADYRRTVLDLGGGARPFVYHRFDADLTTYRSTASGAAPVSPPANRPGQATPPAVGQGSTSGRSGGLIRRVWNFLGGGTTSDAGNPTTDDATHSGSKTPSPANPDNPKTTGTIRKVLNLTASAFLPIQRDDLIRQASGLSLWSNIWFGRRDMIPPVNDPRTLLIDRGMLSAGMLSAEELAEMHRIGDLYAKHSGEVTRIRSEGALAGQAAVDADRQARAEAKAKKKAEAAERKAKRRAEIEHRRANDILFLGRGVSQGLADRTSDLAKLEKLELPLASTPAELAAVMGTTVSNLRWLAFHADVATRTHYVSFEIAKRSGGVRKLSAPHVRLAAAQRWIYSSILRGVKVHDAAHGFVPERSIVTSAKLHVGQAVLINADLENFFPSIHWTRIRKVFRCLGYSPAVATILALICTECPRREVVYDGQTYYVATGPRGLPQGACTSPALSNLVAMRLDRRLSGLATKFDIRYTRYADDITLSGGDELGRRLGYVMARLRHITADEGFAINEKKTRVQRRHQAQVVTGLIVNDRVSVTRKELRRLRSILHHAATEGLDSQNKHHHPNFRAYMSGMIAYVAATRPALAREMKKQLSQVRS

SEQ ID NO: 6493 - protein, 643 aa, Rhodopirellula pilleata
  source 1..643: note = Related to NZ_SJPM01000010.1
MDNNARQIVTTITRRRAAAGESFTAFDITTEARGQGAFVPHGEARDLVQALFQGGEMGAAYRRTVIDLGGGARPFVYHRFDVDARTYQTPSGSRPIVPTPTPAAPVPNAPTADTSSSSPPTNQGGLIRRVMNFLGGSARSDVAANNPSASTFGGAAAPPSRRKTLNLDASAFLPITRDEMMRESRTSLFWSGAWFGRLDLIPPTTDRRTLLIDRGMMSAGLLSAEQLAEIHRIGELYSKYAKDLQVIQHAGQVAGQAAVDADRKARAEARQKKKAEAQEKREKRRAEIEHRKRNDIVFLGRRVSGGLADRESDVGKLRSLELPVLSTPAELAAAMDLAISDLRWLAYHADVATRSHYVSFDIQKKSGGLRRLSAPHKRLKAAQSWILENVLGSAVVHDAAHGFVPGRSTITGAKEHIGQAIVLNADLENFFPSIHWTRVRKVFQTLGYSPAVATILALVCTECPRREVQFNGQAMYVATGPRGLPQGACTSPMLSNMVALRLDRRLAGLANKFEMKYTRYADDLTLSGGDELGRRLGYVMARLRHIAVDEGFAINESKTRVQRRHQAQSVTGLIVNDRVSVSRSELRRLRAILHSAKSQGLESQNRDDHPDYRGYLTGLLAYVAATRPALAAEMKRELDSIRN

SEQ ID NO: 6494 - protein, 644 aa, unidentified
  source 1..644: note = Related to JAGQQE010000043.1; note = Planctomycetaceae bacterium
MADAQTNNAVQQAVLDFVRSMTMFTAYDVTLAVRNQGVVARHGEVRDVVHSMFQDGILGAAWQRTAVDIGTDTRPLVYHHFNQDPRTYKSPSTGSAAKPATNSGQSGSPSPGSAASGSGKGFFQRIVGAFFGQGSSPVTPSNHPASGGAQVPSQPLRTPKQRPPITIDLDASAYLPISRSDLLSEAKKTNLWGSPWFGRRDLIPPVEDDRTKLIDRAMLTQGLLTPEQLTEIHRVGAEMDKYRPDQLLINQKSQKAGQAAVDEERQSKAALKKQKKEEAALRKQLHRQAVADRKANDIVFLGRGVSSRLGDRTSDDTKLQAAGLPVMSTPSDLANALSITVPQLRWLAFHSDVASRTHYVNFTIPRKSGGVRILSAPHQRIAAVQQWILAEVVSRLPVEGCAHGFVPNRSILTNARPHVGQQVVLNMDLENFFPGITYPRVRKMFQTIGYSGSVATILALLCTECPRRTVTWSGEVFHVACGPRGLPQGACTSPAISNQVVKRLDRRLQGLARKHNLVFTRYADDLTFSGGSDFDTNVAWVMACVRHIAEDEGLVVNEKKNRVLRRNTAQIVTGLVVNDKPSVSRKKLRQIRAILHRAQQEGLESQNRDGHPNFRAYLDGYISFISMTRPEIAARLKEQLANVS

SEQ ID NO: 6495 - protein, 646 aa, Rubripirellula tenax
  source 1..646: note = Related to NZ_SJPW01000002.1
MTDSTTRQVVSQLVLNQVAAGAMFTAYDITLQARGRGMQLRHGEGRDLVHELFNTGRMGTDYTRTVVDLGTDANPMVYHRRGDSPRTYQSGSTGATAASAPPGALPTQPFPPAAAPPANTPGLIGRLVKGLFGGGKDQPIVGRVVGDGGNAASGDDVGALALRPPASLDLDASDFLPISRDDLMSAAKTTTLWGNPWFGRRDIIPPIGDPRTKLIDRAMVARGILTPDQLAEIHRIGADMDHYRPTQILIESQAHSAGRSAIEVDDKRKAEEKAKKKAEAKERKEKRQSDIAERKATDIVFLGRGVSGQLHLRDSDAEKLAAADLPILSTPAELASALGLTISKLRWLAFHNDVATRTHYVRFEIPKRSGGTRQLSSPHKLLAEKQRWILKEILNKLPVEDSAHGFVRDRDILTNAIPHVGKDVVLNMDLENFFPSIGFPRVRQVFKGLGYSPAVATILALLCTESPRRAVTYAGQPYLVASGPRGLPQGACTSPAISNQVAKRLDRRVQGLATKFGVAFTRYADDMTVSGGAEMTTRIGYMMAKLRHIAEDEGFVINRSKTRVLRRNTAQIVTGLVVNDKPTVSRTQLRRIRAILHHAHHDGLSAQNREQHANFRAWMQGMIAFVAMTRPELAKDFLAQLQSVRD

SEQ ID NO: 6496 - protein, 522 aa, unidentified
  source 1..522: note = Related to JAEUIP010000375.1; note = Planctomycetaceae bacterium
MANGMLQQLIARMGRIFGSIFCSYKRSPGTQSRATTAPAQGQAVRPASRPEAPPLPPRANKTLDLAASQFLPISRSELLVAAKGTRLWGNVWFGRRDLIPPADDARTLLVDRGMVTEGLITPEELAEIHRVGAEMDLHRPAQAAIQHQTQKAGQAAIDELRAEKARIKAEKKVESAARKAARQSAIDQRRANDIVFLGRRVSGKLGHRESDPQRLQQLNLPVLQTPADVAVALQISISQLRWLAFHAEVAERTHYVYFDVPKKTGGFRRLSSPHAKLAAVQRWILEQVLNKLPTQPAAHGFIAGRNILSNAMPHVNQSVLINMDLENFFPNITFPRVREMFARLGYSGAVSTVLALLCTECPRRAVIFHGATYQVATGPRGLPQGACTSPAISNQVAVKLDRRLQGLASKMELNYTRYADDLTLSGGDALRERVGYVMARVRHFAEEEGFRVNNQKSRVQRRNSAQIVTGLVVNERPTVSREKIRRIRAILHRAQTEGLEAQNRQNHPYFRAWLEGYIAFIA

SEQ ID NO: 6497 - protein, 514 aa, unidentified
  source 1..514: note = Related to DNMF01000374.1; note = Planctomycetaceae bacterium
MDVVSLPDHRPGRSPVSSVDTSKSRRSAPPAPFSFLPKIKSERNFLDLRGAADLWDRGCVVGFWGRLLRLILGQNAGSGLTEQLQASGTAKSRNRSSVFFPAQSLQAPQLLPPASVAETVVGPVGAEGSRIRSTLSVVARREAQQRARDNERRRLREIRRTDRLSRDITYLGRGVSGWLNERISDVARLQSAGLPVLSGPADVAKALGISLQSLRGLAFHAEVTRLTNYLRFTVPKRSGGQRELSVPHRRLAAAQRWILRTILDRLIVSEQAHGFVSGRGVLTNAQQHCGQAVLLNLDVQNFFPSISFARVRRVFMAAGYSKCVATILALVCTECPRREVVFEGRRLWVATGIRGLPQGACTSPALSNLVCLRLDRRLQGLAMKLGLVYSRYADDLTFSGGADLRQRAGAVLKSVGAILGSEGLQVHPWKTRVQPRSTAQVVTGLVVNDRPGVCRREVRRVRAILHRAATEGLERQNRDGHPNFVAWLNGRIGWIGQSRPELGRKLMEELRGLR

SEQ ID NO: 6498 - protein, 468 aa, unidentified
  source 1..468: note = Related to DQCF01000782.1; note = Planctomycetaceae bacterium
MATGFWGRILRALLKSDDSDQSASAASPNVTAADSVVGESTVAAAAGLTRRAFEAPHLLPVGKQSESAGSGRQTQSDDASGSSSGRTSLAVAARREARRRARENERLRLQAIRRTDRLNRDITYLGQGVSGWLNERVSDEERLRQSGLPVLATPADVARALGISLRSLRGLAFHAEVTRLNNYVRFTIPKRSGGVRVLQAPQRRLAAVQQWILREILDRLPVSAQAQGFVRGRSVVTNAALHCGQAVVLNLDVQEFFPSIPFARVRRVFISAGYSKCVATILALVCTECPRQELTFEGRRLWVASGPRGLPQGACTSPALSNLVCLRLDRRLQGLSARLGLVYSRYADDLTFSGPAELRQRVGAVLKSVTGILQAEGLQVHPGKTRVQPRSTAQLVTGLVVNDRPGVRRDEVRRIRAILHRAAREGLQAQNREGHPNFRAWLCGRIGWIGQSRPELGQQFLQQLNALQ

SEQ ID NO: 6499 - protein, 539 aa, unidentified
  source 1..539: note = Related to JAEUII010000041.1; note = Planctomycetaceae bacterium
MSTQDSRGFFGWLRRLLFGDPIPAPKQAAASAATSTHGTAKPVTTAQNPAQQQNAPSLKAGLDASSFLPITRDEIISSTRTRWLWSGAFWGRRDLIPPVSDTRTKLIDRGMLTQGMLTAEQLAEIHRVGLEMDAVRPSMTLIRSEAEKAGAEAVVASREERKKIKAQKKEEAARRKEQRARDIAARFATDITYLGRRVSGRLNDRTSDVAKLEAAALPVLQTPADVAGALGLTIPQLRGLAFHSEVTSRSHYIQFSIPKKSGGVRLLSAPHRRLANCQRWIHTQILSKLEVAAQAHGFVVARSTVTNATPHCGKAVVFNTDLEGFFPSITFPRVRKVFQRLGYSPAVATILALLCTECPRRTVEFGGQTLFVATGPRALPQGACTSPALSNQAALRLDRRFQGLATRMGLTYTRYADDITFSGNEELKSRTGYLMARIRHVVQDEGFRVNEAKTRVQRQSTAQSVTGLIVNERPGVLRSKVRRLRAILHQAKSSGLEAQNRDKHPNFRAWVEGMIAYIAMSRPDTAEVLRQQYAQIRET

SEQ ID NO: 6500 - protein, 537 aa, unidentified
  source 1..537: note = Related to JADZDL010000180.1; note = Planctomycetes bacterium
MLFGGSPRPRPAARTPARPAPGRAASPGGSQPTVQPTVSSASPPRPSGLGKRLQAPDLTPLAGSELKRSLRQRGQSSWSIFGGASWWGRRDLVPPSTDERTNLIDRGMIGRGLTSADEVAELHRVGDEMLQRDPRRDGGAAAGEIAVQKDRAERAQQKQQKREAAAQRRAERAAAVAARRANDIIFLGRGVSKGLADRTGDATRLVGAGLPVLATPADVATALELPIPRLRWLAFHADATAQPHYVRFSVPKRSGGTRDLAAPMPRLKATQDWILANLLAKVPTHAAAHGFVPGRSTVSNAVPHLQALAVINCDLKDFFPTIHVHRVRGCFEELGYSPAAATILALLCTEAPRRLVEYAGRPLHVATGLRCLPQGAPTSPALSNLIARRLDARCLGIARKLGFTYSRYADDLSFSTHEPAALARIGYLLARIRHIARDEGFAVNEKKTRVLRPSSSQRVTGIVVNGAEPRIPRATVRRLRAILHQAEKTGLEAQNRDGHPDFANYLAGMLAWVRMVSPQQAEPLLAAWRRVRRSAAD

SEQ ID NO: 6501 - protein, 536 aa, unidentified
  source 1..536: note = Related to JAEUHU010000483.1; note = Planctomycetes bacterium
MQLLFGAPPRPRPAARPPARPAPAAPNAAAPTSARPEPRPAPPRPADVGHRLEAPNLTPLAASELKRSLRQRGQSSWAIFGGASWWGRRDLVPPSTDERTNLIDRGMVGRGLTTVDELAAMHRVGDEMLRLDPRRDGGAAAGEAAVQADRAERARVKQQKKEEAARRRAERAAAVAARRANDIGFLGRGVSKGLADRSADAARLGGAGLPVLATPADVAAALQLPIPQLRWLAFHAEATERPHYVRFTVPKRSGGTRDLAAPMPRLRATQDWILANVLAKVPTHAAAHGFVPGRSTVSNAAPHLRPLAVVNCDLQDFFPTIHVHRVRGCLEELGYSSAAATILALLCTEAPRRLVEYAGRPLHVATGPRCLPQGAPTSPALSNLIARRLDARCLGIARKLGFTYTRYADDLTFSTTDPEALARIGYLLARIRHIAQDEGFALNEKKTRVLRPSCSQRVTGIVVNGDQPRIPRATVRRLRAILHQAEKTGLEAQNRDGHPDFANHVAGMLAWVRMVSPQQAEPLVAAWRRARRNDAG

SEQ ID NO: 6502 - protein, 576 aa, unidentified
  source 1..576: note = Related to CADCUQ010000908.1; note = Phycisphaerae bacterium
MPLAVGGVGMGWFDWLKPRKTPDEGPPAPSPGLTHGDLSGLVAQPGPPTPGTVPTDPRVVTTRVPTTQEPATPTVASAGTPASASRAARRSPSSPPPESLDYDLGPFAPISQSDLRAQAGKLTNAWRTLYLFGRTSRIPPANDPRTNLIDRAMVSGGLLTPEELAEIHAVGEAYDRARPDLQVELAKAELSAVLPEQERAERKARKRAEAAERKRLRAEAVAERRATDVVFLGRGVSTQLHDRTSDAEALAKLGLPVLSTPADVAAALSVTIPQLRWLAFHSEASTVSHYVRFEVPKRSGGTRQLAAPQPHLAAAQAWVLANVLSRVPPHDAAHGFVPGRSTVTNAAPHVGRAVVVGADLTDFFPTVTFARVRGVFRQLGYSPAVATVLALLCTESPRRTVTYANRPFHVATGPRALPQGACTSPALSNLAARRLDSRLSGIGRKLGFAYTRYADDLTFSGGAEQLAKVGYLLARLRHIAQDEGFAVNEKKTRVLRQSASQQVTGVVVNQRPGVPRDVVRRLRAILHRAQFEGLPAQNRENHPHFEAWVRGMVAYVQMVNPDQARPLREALDALPG

SEQ ID NO: 6503 - protein, 598 aa, unidentified
  source 1..598: note = Related to NZ_CP063458.1; note = Proposed Humisphaera borealis
MGLLNWIKKLVSGKSPGRPSGGQSASDLAREFGQTIDPGLLAGQGSQPPVNQPPTVPPQRPTVVKVPANWISTGQAPSSATNTPNSAAASTIPYASLALRAAVPPAPANRLSPSPAESFDYDLGPFAPISADDLRTGADRLKNNWNNLWLFGRSNRIPPADDPRTKLIDRAMITEGLLTPQELAEIHAVGQAYDAARPDLQVELAKAQVAVTLPEQERAERKARKQAEAAERKRKHAEAVALRKQADIIFLGRGVSNQLHDRVSDVAKLTAIGLPALSTPADVAAAMDLPVSRLRWLAYHSDAATVSHYVRFTVPKRSGGTRQLAAPHDSLAETQQWILANVLSRVPTHDAAHGFVPGRSTVTNAMPHVGKPLVINCDLRDFFPTISFGRVRGIFKQLGYSPAVATIFALLCTESPRQEVVYAGKTFHVATGPRALPQGACTSPAVSNLASRRLDSRLAGICRKLGFTYTRYADDLTFSGDAALNDKVGYLLARVRHIADDEGFAVNEKKTRVQRPHVAQKVTGIVVNDRAGVPRDVVRRLRAILHKAGKEGLAAQNRENIPHFEAWLRGMIAYVHMVNPKQAKPLAEAMGRIAPTTT

SEQ ID NO: 6504 - protein, 518 aa, unidentified
  source 1..518: note = Related to JACQZM010000063.1; note = Candidatus Riflebacteria bacterium
MGFFDWLIELLVGGPSTDRFSSPQPPPRRPPGARQSRRLDLDIEQFTPLSDSEVKKQARTLGRAWSNPWFGRRDLIPPPEDPRTLLIDRAMVGHGLLTPEELVRIHEIGLEMDKVRPDLAMAKVEAQAAVARTVEERRARKLARQQESARLKKLGAEAVAQRRATDIVYLGPGVSRGLADRRSNVEKLAAASLPVLASPADVAQALGLAVPRLRWLAFHSDAASRLHYVRFTVPKKSGGTRELSSPHRALAAAQRWVLTSVLDKVPTLPAAHGFVKGRSTVTNASVHVNRAVVVNLDLVDFFPSITFPRVRGVFQRLGYSPAAATVLALLATEAPRRTVAYAGKTFHVATGPRALPQGACTSPALSNLVARGLDARLSGIAAKLGFAYTRYADDLTFSGPDEVQNLVGYLMARVRHIAGDEGFAVNEAKTRVQRRNTAQQVTGIVVNQRPNVPRTEVRRLRAILHRAATEGLAAQNRQNHPRFAEWVQGMVAYISMVNPAQGKPLAEALARLDAKKGP

SEQ ID NO: 6505 - protein, 518 aa, unidentified
  source 1..518: note = Related to JACPRC010000003.1; note = Planctomycetes bacterium
MGFFDFLRRLFGGGEAGDPPPPLAFPAKALPPKPAPPLPPKKRAPPTSYEADFLPISDKELHAKAATEEVRTSPWWGRTDTIPPADDARTKLIDRALVTRGYLTPEQLEEIHQVGDLMLLKKGDEAMVRQEAKRAVERRKEERAARKAEMKRLAEERRRAHAAEVASRRATDILFLGRDVSGGLADRRSDVEKLRTAGLPILASPAEVAAAMGLTIPQLRGMAFHIDAATVTHYVTFRIPKKSGGMRDISAPKPRLATAQRWLLENVLSKIPVEPPAHGFLTGRSTVTNAAPHVRRAVVVNMDLKDFFPSITFPRVRGIFEKMGYSPAASTIFALLTTEAPRRVAEYEGKRYYVAIGPRGLPQGACSSPALSNLAAGRLDRRLGGLAAKLGWTYTRYADDLTFSGDTIIPKGTKDPKSVAWLLARTRHIISEESFEVNEKKLRVQRRNTAQVVTGIVVNDKPAVPRAERRRLRAALHRARFVGLKEPARVRGEVAYVSMVNAEHGGRLKVRLDALLKR

SEQ ID NO: 6506 - protein, 498 aa, unidentified
  source 1..498: note = Related to JACQFK010000217.1; note = Planctomycetes bacterium
MGFFDWLRNLLFGGMPQKKAVIVRPAQPVFPLRPAPARLPAAAPKAPPPAPRPTADYAAEDFAPISDKELRQKSKSSEVATSPWWGRTDTIPPGDDARTKLIDRALVTRGYLTPEQLAEIHRVGDLMLLKKGDEAILRVQAQAAVARSKEERAALKAEKKRQAEERKKAHAEAVARRKAADIIFLGRGVSGGLAGRTSDEGKLRKFGLPSLATPDQVAAALSIPILRLRWLAFHSEASTVSHYVRFQIPKKSGGLRDIWAPQPKLAAAQAWILENILSKVPAGPVAHGFVPGRSTVTNAAPHVKRTIVVNVDLRDFFPTITFPRVRGLFESLGYSPAVATVFALLCTEAPRREVEYSGRKYFVATGPRALPQGACTSPALSNLAAWTLDRRLGGVAAKLGWTYTRYADDLTFSGDTLVPKGEKNPKSVGWLLARTRHLCEAEGFEVNEKKVRVQRRNAAQTVTGIVVNEKPSTSRAERRKLRAILHHARFEGIEKQNR

SEQ ID NO: 6507 - protein, 536 aa, unidentified
  source 1..536: note = Related to JAGQQS010000445.1; note = Planctomycetaceae bacterium
MLLRLLRFFFGLVRPKSSAERGTHPGALPSSLTGRDLTPPRTVQSATASNPETGSSSPGPSGLNGLDTDKFAPSTVEEAWTATGRADWRSVFLDSRGAIPPSEVPRVQRIDRTMVGMGLISESELAEIHDIGDRMSQYQSDAAFVASSGESAVAQSREERRRQREEKQAAAEARRKQRREQIAQRRANDIVFLGRGVSRGLADRRSNIEQLQEQCLPVLSSPADLAQSMGMSISLLRWLTFHSDAPTRVHYVSFDVPKKSGGMRRLSAPHRKLAEAQHWVLTNILNLLPVHACAHGFVARHSVVTNAELHVGASVVINADLSNFFPAITFARVDGMFQKLGYSPAIATILALLCTECPRQPLQFGETMYYAATGPRSLPQGACTSPAISNQIAGKLDRRMSLLAEKLGWRYTRYADDLTWSVCGEAIPSIGYVLARIRHIVEDEGFELNHAKTRVQRRSQQQSVTGVVVNDRMNVPRPTIRRIRAILHNAKRTGLDAQNRNSHPHFRDWLTGMIGWVHMVNPEQGRRLMSALAELS

SEQ ID NO: 6508 - protein, 536 aa, Fuerstiella sp.
  source 1..536: note = Related to JACMKP010001266.1
MLIRLLRFLFGWSKPAAPAEVASPREPAPSSLTGRDLSQPASVQSATVPKADSRAAAPPRSNLSGLDTDKFAPITVDEALAATAKADWKSAYFDSRGVIPHPSLPRVQVIDRTMVGMGLISEQELAEIHDIGDRMGQFRSDAEFIAIAGERAVVESREERQRRKELRKAEAEARRNLRREQVVQRRATDIVFLGRGVSRGLADRRSNVELLQNNGLPVLSSPAELAQAMGVSISLLRWLAFHSDAPTRVHYVSFDVPKKSGGIRRLSAPHRKLSVAHHWILTNILNLLPVHTCAHGFVAQHSVLTNAEPHVAASVVINADLSNFFPTITFSRVDGMFRKLGYSPAVATILALLCTECPRQALKFSDTIYYAATGPRALPQGACTSPAISNQIAAKLDRRMSAMASKLDWKYTRYADDLTWSTTGEVTPSVGYVLARMRHIVNDEGFELNHAKTRVQRRSQQQSVTGVVVNDRMSVPRQTIRQVRAILHNAKRTGLDGQNRDAQPHFRDWLTGMIGWIQMVNPEQGRKLRSELAELS

SEQ ID NO: 6509 - protein, 535 aa, unidentified
  source 1..535: note = Related to QWOO01000305.1; note = Planctomycetes bacterium
MLLRLLRFLFGISPPTAPRDVRSSLQERDLSGVPGSTKSTSGSSATSLTTGAGRSAPAGLSGLDTDRFRPQPGTDLTSLGRMTDWQFSAADTRNLIPSEESPQVRAIDRAMVGMGLITETELVRIHDIGRQMAPLLSAASFIQSAGASAVKESREERQRRKAEKKETARLKQIAHLEQVQHRKATDIVFLGRGVSRGLADRRANIEKLQDAGLPVMSSPSDVANAMGLTVSRLRWLAFHSEAPTRVHYVSFEIPKKSGGTRRLSAPHRQLAAAQHWILTRVLNLVPVHENAHGFITQRSVVTNAVPHVNSSIVINADLKDFFPSITLARVDGLFRSLGYSPAVATIFALLCTECPRQTVQMHGTTYFAATGPRALPQGACTSPAISNRITHKLDRRMSAMAAKLGYRYTRYADDITWSTSDESAVAVGYVLARIRHIAEDEGFELNHAKTRVQRRSQQQSVTGVVVNDQLGVARETVRTIRAILHNAERTGLASQNRNQHPQFESWLTGMIGWISMVNPEQGQKLRQHFDKVRGS

SEQ ID NO: 6510 - protein, 539 aa, unidentified
  source 1..539: note = Related to QWPK01000237.1; note = Planctomycetes bacterium
MLIRLLRFLIRLALPTPQPPRDTPSSLAGRDLSGQPGSASRTVSSVANTTVSSSGPAAPKGSSLSGLSTDKFAPMSVADALSATAAADWRSANFDSRSVIPPADLPRIQVIDRTMVGMGLISEQELAEIHDIGREMTQFQSDAAFIHQAGERAVAISREERQRLKEQKKAEAEQRRVLRRQQVAHRRATDIMFLGRGVSRGLADRRSNIEKLQAGGLPLLSSPADLANAMGLTISKLRWLAFHSDAPTRVHYVSFNIPKKSGGTRRLSAPHQQLAAAQHWILTNILNLIPVHQNAHGFVAQHSVVTNAAPHVGSSVVINADLKDFFPSITLARVDGLFRRIGYSPAIATILALLCTECPRDTVTFCGTTYHAAIGPRALPQGACTSPAISNLVAHKLDRRMSAMADKLGWRYSRYADDLTWSIEAEPSPSVGYVLARIRHIVDDEGFSVNHEKTRVQRRSQQQSVTGVVVNDRLSVSRDTIREIRAILHNAKSTGLAAQNRNEHPHFESWLAGMIGWIDMVNPQQGGKLRAELIELLRK

SEQ ID NO: 6511 - protein, 308 aa, unidentified
  source 1..308: note = Related to JACPHK010000356.1; note = Planctomycetia bacterium
MGVAIPKLRWLAFHSEAPTRTHYVYFKVPKKSGGERRLAAPYKQLAAVQRWILDSILNQLPVHDAAHGFVRERSTVTNADLHVGADVVINADLCDFFPTITFYRVEGLFRSFGYSPAVATILALVCTECPRDAVTFSGETYYPATGHRGLPQGACTSPAISSLICRNLDVRFAGIANRMHWRYTRYADDLTFSTSTEHGDKIGYLLARIRHISEDEGFRINAKKTRVQRNHTRQSVTGIVVNDKRSIDRNTIRRLRAILHNAKRTGFAAQNTEQRPHFENWLRGMIAYVAMVNPERGHELREQYEALR

SEQ ID NO: 6512 - protein, 525 aa, unidentified
  source 1..525: note = Related to JAGQPR010000143.1; note = Planctomycetales bacterium
MGLFNWLSNLLGKSPAGNKSSVDRGSVVIPELSEPRPESKKRGPIRLNGLDAQQFAPLEDNEARELAKSLGRSIWNDTFFGRRDLIPPTSDARTLLVDRMMIADGITTADELAEIHAVGLEMDRLRPQLAHAAARADRAVASNRQARAERKARKKSEAADRLRLRAEAIAERKLNSIDFLGRGVSRGLPHRQSDAQLLEQRSLPVLHTPADLAQAMQLTISELRWLAFHSEATERIHYVQFAIRKKSGGVRLLASPHLKLRTTHRWILANILSKIPLDNAAHGFVVGRGIVSNAQPHVGKSVVVNVDLADFFPSITFPRVAGLFRGLGYSGAVATILGLLVTECPRQRVRYAGRELWVASGPRSLPQGACTSPAISNAIAWRLDHRLAAIASKLDWTYTRYADDLTFSTSGDNAEKIGYLLARLRHICENEGFRLNHNKTRVQRRNMQQSVTGVVVNDRCGVSRKVVRQLRAILHNAKQTGLAAQNRDGHPDFQNWLQGMIAYVHMVNPDQALPLKQKFEQIIGP

SEQ ID NO: 6513 - protein, 533 aa, Posidoniimonas corsicana
  source 1..533: note = Related to SIHJ01000002.1
MGMFDWLSGLFGRASSGRPTAPAAGAASPAPPPVRSSAPEQQPRPRQSGPKRLEGLDASQFAPLEIDDARGQAKRLSRSFGRLVWGNRTDRIPPANDARTLLIDRMMVAEGLVTPEELADIHRVGAEMDRLRPDYDAAHRAGAKAAEQAAASSRQEREQRKAEKKAAAAERKRERAEQIAERRRSDIVFLGRGVSRGLADRQSYPDLLGSFGLPVMATPADVVKAMGFLDIAELRWLAFHTEAATRTHYVQFTTRKKSGGVRVLASPHQKLRRAQGWVLENIIAKIRVDDAAHGFVAGRSTVSNATPHVGQQVVVNADLKDFFPSITFYRVEGFFRRLGYSGAVATILALLTTECPRQQVTYAGQTLWVATGPRCLPQGACTSPGLSNAIAWKLDRRLGGMARGLGWTYTRYADDVTFSASGEPAAKVGWLLARLRHLAQEEGFELNHKKTRVQRQNAQQSVTGLVVNDRVGVSRKTVRRLRAILHNAKQTGLEAQNRDNHPNFTGWVQGMIAYVAMANAEQGASLQAAFDEL

SEQ ID NO: 6514 - protein, 541 aa, Aeoliella mucimassa
  source 1..541: note = Related to NZ_CP036278.1
MGLFDWISNLFGGSSSTANPPKPESSDSAGPQGPASTSSSSSPAPTPPQPPRPGPPAPPKSKRLEGLDASQFAPIEEAAALRQAKSMRLRFWTSTWFGLRDRIPPASDERTKLVDRLMVADGLATPEELAEIHEVGAEMDRLRPALDDAAKQAGQAVSRNKEDRAKLKAQKKAEAAERKRLRADAIAERKRNDIVFLGRGVSRGLADRESNAEKLEGRGLPVLHTPSELATAIDLPLSTLRWLAYHNEAAEQVHYVQFQVRKKSGGIRVLASPHKKMRRAQQWILDNILTKIDIHEAAHGFVAGRSTVTNAAMHVGQQVVVNVDLQDFFPSVTFPRVEGFFRSLGYSGAVATILALLVTESPRQRVRYAGKELWVATGPRSLPQGACTSPALSNAISWTMDTRLTAISSKLGWSYSRYADDLTFSTAGEASQQVGYLLARIRHITQEEGFGLNRKKTRVQRRSAQQSVTGIVVNDRAGVARKTVRQLRAILHNAKTTGLAAQNREGRPDFEAWLQGMIAYVRMVNPEQAASLTDAYEQLRY

SEQ ID NO: 6515 - protein, 540 aa, Blastopirellula marina
  source 1..540: note = Related to PZKM01000007.1
MNFFRRLKQWFAPGQERSAQQTPSQLPASVENRDYTSPSPGTPPASQPTTPNRSTSPPSSPQPRPESTLSGLDASRFQPLTQDEAMESTSQPGWRTAYWDPLNVIPSASLPRIRVIDQTMVGMGLIDAEELAEIHDIGEQMAQFRTDYHVIQHAGQAAVQAARNARDARKAEMKRLAAERKQQRQQAVAQRKATDIVFLGRGVSRGLADRRSNIERLQASGLPVLSSPAELAEAIGISVGTLRWLSYHHPASKTTHYHSWKIAKRSGGERTISRPHKKLEHAQRWVLDHLLSKLPTHDAAHGFVPGRSTLSGAVPHVGASVLVNVDLQDFFPTIDFARVAGLFRGFGYSPAVATILALLTTEAPRRMIRSGSETLHVAVGNRSLPQGACTSPAISNLICQRMDKRLSGMAASIGWCYTRYADDLSFSSVEQADKVAYLLARVRHFTDEEGFQIKASKTRVLRRSNQQSVTGIVVNDRPSIDRKTIRQLRAILHRAKSEGLERQNRIGHTNFRGWVAGMIAYVEMVNPQQGRKLREAFGTI

SEQ ID NO: 6516 - protein, 505 aa, Bremerella volcania
  source 1..505: note = Related to NZ_CP083740.1
MSPPSESGQASEFSPAASRPTTSSPSPPPESELSGLDASRFQPISHDDALEATSDPSWKTAYFDPLNVIPSVSLPRIRVIDQTMVGMGLITAEELAEIHDVGEQMSQFRTDYYAIQAAGQQAVQSSRDAQAARKAELKRLAEQRKQAHEEAVAKRKATDIVFLGRGVSKGLADRRSNIERLQACRLPLLSSPADLADALDVSIGTLRWLAFHHPASRTTHYHWWKIQKSSGGERTICCPHSKLANAQRWILNNILGKVPLHDAAHGFVPSRSTLTGAKPHIGSRVLVNVDLKDFFPTIDFARVAGLFRGLGYSPAVATILALLTTESPRMRLRSGKTTLYVAVGNRSLPQGACTSPAISNLISRRMDKRLFGIANSIGWRYTRYADDLSFSCSDREDKVAYLLARVRHVTSEEGFQIKESKTRVLRKNSQQSVTGIIVNDKASIDRKTIRKLRSILHRAKFEGLEKQNRLGHPNFSAWLAGMIAYVEMVNPEQGNKLRLAYESLG

SEQ ID NO: 6517 - protein, 534 aa, Blastopirellula cremea
  source 1..534: note = Related to QPEV01000010.1
MNFFRRLTKWITSGRDSSADQPVPSQMPASVENRDYTVPNTPQTPSAPASNPSPPEQPQTSNLAGLDASRFQPLSQDEALDATSQPGWQSAYWDPLNVIPSTSLPRIRVIDQTMVGMGLIDAEELADIHHIGEEMAKYRTDYHVIQHAGHAAVQAARDARAARKAEMKQRAAQRKQEREAAIAERKATDIVFLGRGVSRGLADRRSNVERLQASSLPVLSSPADLAQAMGIPVATLRWLSYHHPASKTTHYHSWQIAKRSGGVRTISRPHKNLEDAQRWILESILAKLPTHDAAHGFVPGRSTLTGATPHVGAKVLVNVDLQDFFPTIDFARVAGLFRGFGYSPAVATILALLTTESPRRVIRSGSETLHVAVGNRSLPQGACTSPAISNLIARRLDKRLAGMARSIEWQYTRYADDLSFSCRESEEKVAYLMARVRHLTSEEGFLVKESKTRVLRRHAQQSVTGIVVNDRPSIDRKTIRQLRSILHKAKSEGLERQNRIGHTNFSGWVTGMIAYVEMVNPQQGQKLREAYEAL

SEQ ID NO: 6518 - protein, 555 aa, Stieleria neptunia
  source 1..555: note = Related to NZ_CP037423.1
MGLFEILKQIFAPGQRRPGPPRGAPSDPSAIDPGSLTPPRQAEPSPATSSAPLSSATPATTPAPAATSKPAGGLEGLDASRFQPLTPSEALDATAQPGWQTAYWDPLNVIPSTHLPRIRVIDQTMVGMGLIDADELAEIHDIGQRMSKFRTDYHVIADAGQQAVDQSQAARDARKQEMKKRAAERKQAHQQAVAHRKATDIVFLGRGVSKGLADRRSNIERLAASDLPLLSTPADLANTLGISIGTLRWLSFHHPASKTTHYHHWKVPKRSGGERTISRPQKKLESAQRWILESILAKRPTHDAAHGFVTQRSTLTGALPHVGSQVVVNMDLENFFPTIDFARVAGLFRAMGYSPAVATIMSLLCTESPRRVIRSGDETLHVAIGNRSVPQGACTSPALSNLICKRLDNRLVGMAESIGWRYTRYADDLSFSCPIAKDGTDQGAQASAKIGYLLSRVRHFADEEGFRVKESKTRVLKRSTRQSVTGIVVNDRPSIDRKTIRRLRAILHRAKHEGLEAQNREGHPNFAAWLAGMIAYVQMVNPAQGQKLRKQMDLL

SEQ ID NO: 6519 - protein, 542 aa, Rhodopirellula sp.
  source 1..542: note = Related to NZ_ANOF01000123.1
MGLFRVLKQFFAPGRNPPQDATRAQATAPSSIDHRDLTPPTTPVVTTGPDYVPLNSLPATPPRESSGFDGLDASQFQPLTQDEAMEATAEPGWRTAYWDPLGVIPSADLPRIRVIDQTMVGMGLIDAEELAQIHSLGEEMSRFRTDYYAVQDAGNQAVQQTRDARTARKAEMKQRAAERKKQHDADVAHRKATDIVFLGRGVSRGLADRRSNIERLKSSELPVLSSPADVASALGISVGTLRWLAFHHPASKTTHYHTWTIAKRSGGDRTISRPQKKLAAAQQWILDSLLSQIPVHDAAHGFVPGRSTLTGAQPHVGSQIVVNMDLQDFFPTIDFARVAGLFRALGYSPAVATIFALLCTESPRRVIRSGGETLHAAVGNRSLPQGACTSPALSNLIAKRLDKRLAGTAKSIGWQYTRYADDLTLSTKVNSSKVGYVLARVRHLAKEEGFVVKESKTRVLRQCTQQSVTGIVVNDRPSIDRKTIREIRAILHRAKFEGLEKQNRIDHPNFAGWVSGMIAYINMVNPQQGGKLRRQLDELSMR

SEQ ID NO: 6520 - protein, 544 aa, unidentified
  source 1..544: note = Related to JACKHI010000001.1; note = Phycisphaerales bacterium
MGLFDFFKQMFGGRSVQEKCVRCRQPLRMGALFCGNCKHPRGAPYPIPLAQTKRSDQGAANAPRVRPQNLVGLDADKFKPMTTSEAMATIDNEDSFKSAYLDSLNAIPDASLPRIQVIDRTMVGLGLIAPEELVHIHDVGKAMGELRGDWSSIHARGQQAVQLSREERAARKQQKIEEAARRRQARAEAIARRKATDIVFLGRGVSRGLADRRANVEALKRAGLPVLAAPSDVSVAMNISIPRLKFLAFHSDAPERVHYVSFSVPKKSGGMRLLSAPHQSMDEAQRWILDNVLCKIPTHSAAHGFVTGCSTVTNAEPHVGARTLVNVDLKDFFPSITFPRVMGLFQSLGYSPAVATIFALLCTEAPRRVMKYAGRVFHAATGPRSLPQGACTSPAISNLVARGIDRRLEGIARRLDWTYTRYADDLSFSRKDAGEPHVGYLLARIRHIAQDEGFEVNEKKTRVQRPNQRQTVTGLVVNDKVNVSRKDIRRIRAILHRAKHEGLARQNREDHPYFESWLRGMIAYISMVNPTVGQSMRTQFDALA

SEQ ID NO: 6521 - protein, 544 aa, unidentified
  source 1..544: note = Related to JACMKE010000965.1; note = Burkholderiales bacterium
MGLWNVLARLFGGGSASTNPTPPTQPQDARAPVGMPYGRGSAVNTPPPPPRTLARPGSPSPTRPAPTNLNLDPGQFAPVGAAELKKRAGELRWNWASVNFDRRDQIPSAGDPRTALIDRALVAQGLLTPEQLVEIHETGAQMAELRPELRNLQNIAADAALADEAERRARKEAKKAEADRRRAERAEAIKQRRATDIVFLGRGVSGGLADRRANIERLQALGLPVLATPADVAKALGLEVSRLRWLAFHSEAAAVTHYVRFQIPKKSGGTRELAAPHRDLARCQEWVRIQILDRVDLHDAAHGFVTGRGTLTNARPHLGRAAVVNADLKDFFPTITFPRVKGVFQQLGYSPASATVLALLCTECPRGVVNYDGRELHVATGPRGLPQGACTSPALSNLVARGLDNRLSAFARRLGWTYTRYADDLTFSADGEAMGQTARLLTGLRHIVGDESFVVNEKKTRVQRPKTRQTVTGIVVNRHPNVPRDTVRRLRAILHRAKTEGLTAQNREAHPHFEGWVRGMIAYVAMVNPERGRELLAEFELRKR

SEQ ID NO: 6522 - protein, 544 aa, unidentified
  source 1..544: note = Related to JADJTK010000010.1; note = Opitutaceae bacterium
MGLFSTLFRWLRGGPTLDEARRAAARRVPADRAPEGQPYRAAVPGAGARPPVLPSAQPSSRPAAGKLNLDAGQFTPLSPEEVKKRAASLSWNWSTVNFDRRDQIPSTAEPRTALIDRALVAQGLLTPEQLVQIHEVGAQMAALRPELANIHTIAHNAVAADAAERRLRKERKQAEAAQRRTARATAVAHRKATDIVFLGRGVSGGLADRRANIERLQLLGLPVLGPPGDLAQALGLEVSRLRWLAFHSEASAVSHYVRFRIPKKSGGTRELAAPHRDLARCQDWIRRNILDRVPLHEAAHGFVTKRNTLSNATPHVHRAVVVNADLKDFFPSITFPRIKGVFQQLGYSPAAATVLALLCTECPRTAVKYEERELWVATGPRGLPQGACTSPALSNLVARGLDGRIAGLARKLGWTYTRYADDLTFSTDAEGAPKTAWLLARLRHIVGEENFLVNEKKTRVQRPNTQQSVTGIVVNQHPNVPRETVRRLRAILHRAKTEGLAAQNREAHPHFAGWVRGMIAYIQVVNPERGRELLADFEALPQGR

SEQ ID NO: 6523 - protein, 551 aa, unidentified
  source 1..551: note = Related to SLWZ01000015.1; note = Proposed Chthoniobacter flavus
MIPLGAIAGALVVLLRQLFKGSKPQPRRSSPPPPVPRPGDRPYTPGAPPPIPPAAGAARPAQPSPPRSAPPRSTTLNLDAGQFTPVSAEEAKKQARGIKWNWASVNYDRRDQIPAPTQPRTLLIDRAMVAQGLLTPEQLVEIHDVGAKMAELRPDLAGIGNVADHAVAADQEERRRRKEQKIAESAERQRKHAEAVAQRRATDIIFLGRGVSGGLADRRANVEKLQQLNLPVLATSGDVAKVLDLEISRLRWLAFHSEACAVTHYVRFTIPKKSGGTRELAAPHREMARCQLWIKLNILDRIPLHEAAHGFVAHRGTMSNAVPHVRRDVVVNADLKNFFPTITFPRVKGIFQELGYSPAVATILALLCTECPRQRVTYAGRELHVATGPRALPQGACTSPALSNLAARGLDARLTGLARKLGWDYTRYADDLTFSTSGAPAQKTAWILARLRHIAQEENFTVNETKTRVQRPSAQQTVTGIVVNKRPNVPRETVRRLRAILHRAKTEGLAAQNREQHPHFAAWVGGMIAYMQMVNPERGKKLKAEFDALPK

SEQ ID NO: 6524 - protein, 404 aa, unidentified
  source 1..404: note = Related to SEGX01000707.1; note = Verrucomicrobiaceae bacterium
PSRQAIQAKQQAEAQAAEQALADDDAARAAAREARKAAAAARREQRAAAIAERRRTDIVFLGRGVSGGLADRRANVERLTAFGLPVLASPADIARVLGISVPRLRWLAFHSEASSVSHYIRFTIAKKSGGIRELAAPHRDMAAAQQWILTNILNVPPVRDCAHGFVRGRNVMTNAVPHVRRDAVVNADLKDFFPTVTFPRVKGIFESLGYSPAAATVLALLCTDSPRRLVEYEGEKLHTAAGPRALPQGACTSPALSNMAARKLDARLEGLARATGWTYTRYADDLTFSANGETASRCGGLLQALRRLCAEEGFTVNEKKTRVQRPNSQQSVTGVVVNQRPNVPRTLRRRLRAILHQARTTGLAAQNTENHPNFPMWLRGMIAWVSSTNPDEGRRLLEAFKDLK

SEQ ID NO: 6525 - protein, 528 aa, unidentified
  source 1..528: note = Related to JADLHC010000305.1; note = Planctomycetia bacterium
MGFIDWLRDLFLGPEFRPKDRSQPPPQRPGAVPDPVFPPRNVAIPGQNPLAQRPAPAPRTPPPPPRKLNLTAAAFAPISDAEAKKQGEAARSAFNPWWGRRDLIPPPDDPRTLVIDRSMVAHGFITPQELTGIHDVGRQMEELRPDLNQVEAQANQAVLAAQADREELKKRKKAEAAEKKRRHAEDVLRRRSTDIVFLGRGVSKGLSDRRANVEKLQAAGLPVLATPADVARALGLTVPRLRWLAFHTEASPVTHYVRFEIPKKSGGMRALAAPHRDMARCQQWILANILGKVAPHAVAHGFVKGRSTLTNAAPHCRRDVVVNADLRDFFPTITFPRVLGIFAQLGYSPAAATVLALLATESPRRPVEVDGTTYHVACGPRALPQGACTSPALSNLAARGLDRRLAAIATKLGWIYSRYADDLTFSTSGEAKTGYLLARLRHIARDEGFTVNEDKTRVQRRSDAQSVTGIVVNEFPSTPRKERRRLRAAMHKAKTSGLAPKDLARARGMAAYVAMVNPAQGAKFAALR

SEQ ID NO: 6526 - protein, 529 aa, Prosthecobacter sp.
  source 1..529: note = Related to JAIPJY010000032.1
MGLLSLIRRLLGRDQPSQPPPIPRPSTSPRHNVVPQVRATSQPPQRKTLSQLDSQVFAGLSGAETKQQAKAMGRPLWSNLFAFGRQSVIPPVSDERTLMIDRAMVGEGLITPEELTAIHEIGLKMEELRPSYEGARHQGQVAVNADKAAKAELKRQKKAEAATRKAEREAAIAQRKATDIIFLGRGVSGGLADRRSHVEKLQEAKLPVLSTPAELATALELPVKRLRWLAFHAEVAVVTHYIRFQIPKKSGGMREISTPHTDLARAQSWILQNILEHVPVSGVAHGFVRERGTLTNARSHTGKDVVLNADLKDFFPSITFPRVRGIFQQLGYSPAVATVLALLCTECPRRTVTYDGQTYHVANGLRALPQGACTSPALSNLCARKLDLRFAALAAKHGWTYTRYADDLTFSTRGEPAKATALILSRLHNIVQDEHFEVNTAKTRIQRRNAQQSVTGIVVNDRCNVDRKTRRRLRAILHQAEKTGLPAQNRIGHDNFAGWVSGMLGYVKMINPQQGMKLFKAWDLLGGQK

SEQ ID NO: 6527 - protein, 528 aa, unidentified
  source 1..528: note = Related to JADJPW010000004.1; note = Verrucomicrobiaceae bacterium
MGLFSFIKSLFGGSSTPPPLPRRETTPVRNAVPQAKTPPQPPKRQTLAHLDSQVFEAISSEAAKKQAKAMGRPLWSNLFAFGRQSVIPPVTDPRTLMIDRAMVGEGLITPEELTQIHEIGEKMAELRPDFNWARHQGQAAVNADKAAKAELKRQKKAEAAKRKADREAAIAHRKASDIIFLGRGVSGGLADRRSHVEKLQEAKLPVLSTPAEVATALELPVKRLRWLAFHAEVAVVTHYIRFQIPKKSGGVRELAAPHADLARAQRWILQNILERVPVSGVAHGFVKGRGTLTNARSHTGKDVVLNADLKDFFPSITLPRVRGIFQQLGYSPSVATVLALICTECPRRTVEYDGQTFHVATGPRALPQGACTSPALSNLCARKLDLRFAALAAKHGWTYTRYADDLTFSTDDEAAKATALILSRLHHIVKDEHFEVNEAKTRIQRRNAQQSVTGVVVNDHCNVPRKTRRQLRAILHQAAKTSIPAQNRIGHDNFTGWVSGMLGYVKMINPQQGEKLFKAWDMLGEKRP

SEQ ID NO: 6528 - protein, 532 aa, Rubinisphaera sp.
  source 1..532: note = Related to NZ_JAALXT010000006.1
MFRWLLNFLGLAPNPRPTARQRTIADSWTAERTSAAPQSTPARSVSAQKKQTSASPEALNAAQFTPIGDRDLKEQAKNLGSAWSNPWFGRRDIIPPADDPRTQLIDRAMVTHGFLTREELADIHAVGEEMSEYRPDTVLVSHRANQLVAEATADREELKRQKKAEAEERKRQREEEIAERKRTDIVFLGRGVSKGLADRRANVEELQKNNLPVLATPGELAKAMEFPIPRLRWLAFHTVAAERVHYISFTVPKKSGGERVLSAPHRDMAAAQRWILENILEAVPVHEAAHGFVRKRSTVTNAEPHVGQEMLVGCDLEDFFPSITVFRVMGVFEQLGYSPAVATILALLCTECPRRKMIYAGQTFYAATGPRALPQGACTSPALSNLVCRRLDSRLTGLAKQFGANYTRYADDLTFSGSGDVANMAGWVIAKIRHVVADEGFTLNRKKTRVQRPNMRQTVTGVVVNERPGVPRKLVRRLRAILHNAQTTGLAAQNRENHPHFESWVEGMVSYIQMVNPSQGEPLRAALATIRN

SEQ ID NO: 6529 - protein, 507 aa, unidentified
  source 1..507: note = Related to JADZEF010000026.1; note = Planctomycetaceae bacterium
MPIGVQPESSGDERSAPAPTRRRENLAALNAEQFAPLEHDEVREQADQLGSLWGNPWFGRRDLIPPASDPRTQLIDRAMVGQGLLTPEDLVDIHRIGDAMDAVRPDLALAVAEADRAVTRSAEERAALKAEKKAAAAERRRLHAEQVTHRRATDIVFLGRGVSKGLAERTPNVAALQQAGLPILATPADVAAALSISIPRLRWLAFHSVATKRTHYVSFTVPKRSGGVRTLSSPHRSLAQCQEWILRNILDRIPVHAAAHGFVRGRSTLSGARPHVGAEVVLNVDLKDFFPTITFPRVKGVFQQLGYSPAAATILALLCTECPRRPVEYAGEKLYVATGERGLPQGACTSPALSNLVVRRMDARLQGIAQRLGWIYTRYADDMTLSTSGDAAQRLAYVMARVRHIAGDEGFALHAEKTRVQRPNVRQCVTGIVVNERAGVPRETVRRIRAILHRARHEGLAAQNLDGIPHFEGWLRGMIAYIRMVNPRQGAPLQHAFDELMPPGTVR

SEQ ID NO: 6530 - protein, 429 aa, Rhodopirellula rubra
  source 1..429: note = Related to NZ_JACHXU010000001.1
MSVWDSLRRLIAPPKLPKTSEADRHAMAESFNLHRKRPLPAVRLKEQLDLSWLARRRTAPAAEPFGYLGDGVSYELGQRVTDVERLSSAGLPVLKTPEQLAEAIGFSARRLRWLAYHRDAQASCHYIHFIVEKKSGGVRSIAAPRPQIAACCRWIDREILRLIPPHDAAHGFVLGRSTTTAAQPHVGQDVIVNMDLSDFFPTITFPRVRGWFASLGYSRQTATVLALLCTESPRTPIDMDTSNVNASSIDTVNHSRLWLATGPRQLPQGACTSPAISNLVCRSMDRRLTGLCEKLGWTYTRYADDLSFSTSGKDDSQIGYLMHRVGGIVRDERFAINDSKTRVQRRSGRQTVTGLVVNDRIGVPRETVRQLRSILHHAKTEGLEAQNREGHADFLGWVTGMIGYVGFVDPAKGERLRSQLDQVLKQETT

SEQ ID NO: 6531 - protein, 408 aa, unidentified
  source 1..408: note = Related to DNPC01000265.1; note = Planctomycetaceae bacterium
MWDRLKRLFSGSAKSPRRSAAQFNTRRGNQSDERVLPYWSQRTPLADSAEARFSYLGNGVSHEAADLATDAELLKKLELPVVETGNQLAEAIGFSPKRLKRLAVHSAQTRSCNYFYFTVPKRSGGERLLAAPRPQIDACCRWILREILDKISIHPAAHGFAKGKSIKSNAEIHTQQQVIVNLDLLDFFPAIEFRRVRGLFESLGYNGQIATLLALLTTEASREPVPSPAGTLWAATGPRHLPQGACSSPSISNLICRALDRRLSGLCRSLSWNYSRYADDLTFSASAVAGQRVGYMLHRIRGIVREEGFQVNESKTRVQRPSQAQTVTGLVVNDGVSVSRSTVRMLRAILHNASLHGLESQNRDNHPHFAAWLEGMIGHVVNVDPQHGVKLQRQFRQLKKQQVSHNHE

SEQ ID NO: 6532 - protein, 321 aa, unidentified
  source 1..321: note = Related to JAFLCQ010000046.1; note = Planctomycetes bacterium
LPVLATPADVARWLDLSIPRLRWLAFHSDSTTVSHYVFFTVPKKTGGVRRLSAPHAGMAAAQRKIFQEILPRLRIHDAAHGFVTGRSIRSNATPHVGAHVVVNLDLKDFFPSITFPRIRGLLTAAGYSPCASSILALLCSESPRQVLGLGGQRLFVATGPRALPQGACTSPGLANLAARILDARLAGLVAAWGWTYTRYADDLTFSTQNAQADIGRLLTAVRNIVADEGFTVNEEKTQVQRRSQAQEVTGLVVNQRAKAPRELIRRIRAILHRAEREGLAAQNREGHRDFAAWLGGMIAYIAMTDPATAARYRAQLERVPR

SEQ ID NO: 6533 - protein, 602 aa, unidentified
  source 1..602: note = Related to CP043547.1; note = Planctomycetales bacterium 10988
MLLSSRLFFPLDVSSQKYFFYLPEFREWVVMSFFDWLQKLFGSASPEEQRPIPPRKSPEDPNPVATPEPQPSPTTETLKPSKVADPPARVSKTARAVKITEQEEPPKPPVSSVSGDALAMGELAPLSLDEAKSEAKASNISWRMSGGWDRRDRIPSLENPRTSLIDRAMIGHGLITAEELEEIHRVGAEMDELRPLREHALELARQQVAAEEQDKQKIKEEKKKEAARRAAVRQAEIELAKKTDIVYLGRGVSQGLANRQSNREQLDQLQLPFLDHPDELAKILEVEIPQLRWLTFHNEAAERTHYLQFEIPKKSGGSRILSAPHQALSKTQQWVLTNILQKLPTHEAAHGFVPGRSTVTHANLHVGCDLVAQMDLADFFPSITFPRVRGLFESFGYSPAIATILALLCTEAPRRTIELSGKRYYVAEGPRSLPQGACTSPALSNLIARKLDARLTGMSQKIGWTYSRYADDLTFSWKGSAGENGKQPNYGYLLSQVLAIIDEETFALNEQKTRIQRPSQRQQVTGIVVNDRPGVPRPVVRRLRAILHQAQKTGLAAQNRENHPHFAGWVQGMIAYISMVQPEKGKQLQAAFEQVPKDDAVN

SEQ ID NO: 6534 - protein, 563 aa, unidentified
  source 1..563: note = Related to JADLAG010000600.1; note = Polyangiaceae bacterium
MGLWDKVKTLLGLGDGAQQPGAGEDAGGGQGSSPAAPAQPARPAAAQGSAKPAAAQPPAAVQQFSAAPAPAAAQRPAKQRQKPTDPYDAKGILGLSADEVRKRALKINPYKTAWIGRVDTIPPQSDERTALIDRGLILRGLLTEAQIAEIHRVGDIWLKHHEAARLAGTVAAKTAEKAIADIKREKEARKAEKKRLAAERRERRAAEIARRRAEDIIYLGRGVSAGLADRRAHVEALEERGLPVLSTPGDVARALGLTISQLRWLAFHGDAVERPHYVYFEVPKRSGGKRLLSSPHRSLAAAQAWILHDILERLPVEAPAHGFVQGRSTVTNARPHIGRDVVVNLDLSDFFPTITFPRVRGVFQRLGYSPAAATVLALLCTEPPRRELEYDGQRYWVAVGERGLPQGACTSPALSNQVARKLDRRLAGMCKKHGFEYTRYADDLTFSAPPGKRAEIPMLLARVRHIVTEEGFAINPKKGRIQRAAGRQEVTGIVVNDKLGMPREEVRRLRAILHAAKKTGLAAQNREGLPDFEAHIRGKLAYLQMIDRQRAAPLLAALDALAG

SEQ ID NO: 6535 - protein, 541 aa, Sorangium cellulosum
  source 1..541: note = Related to NC_010162.1
MGFWDKLKSMLGLGGAEQGERSPGGVEAEQAQGAQAGPAAATQPAARAGQPRVAAGAKPRPADPYDAGGILGLSADELRRRALKINPYQTAWIGRVDTIPPQSDERTALIDRGLVLRGLLTEAQLAEIHRVGDLWLRHKDAAALAGTVAARSADEAIERLKREKLARKEEKRRQSAERKRQRAEAVARRRAEDILFLGTDVSAGLADRRSHVESLAQRGLPVLSTPADLAAALGVAVPRLRWLCFHGEAVERPHYVYFDVPKRSGGTRQLAAPHASLAAAQAWVLREILEKLPVEAPAHGFVKGRSTVTNARPHTRRDVVVNLDLSDFFPTITFPRVRGVFHRLGYSPAVATLLALLCTEAPRRPVEYDGQRYWVAVGDRALPQGACTSPALSNQIARKLDRRLAGMCARAGFTYTRYADDLTFSAPPGKRGDIAMLLARVRHIVEEEGFAINPDKGRIQRAGGRQVVTGVVVNDKPSAPREEVRRLRAILHAAKKTGLAAQNRSGVPDFEAHLRGRIAYVQMIDRERAAPLLAALDALTG

SEQ ID NO: 6536 - protein, 567 aa, Chondromyces crocatus
  source 1..567: note = Related to CP012159.1
MSFWNKIKSLLGVGANDEPAGEKQRDEPADGGDGQRARTKPVVTASSSVAAKFSGASTPSPPARKPATTPTRPKTTATKQPAKAAPPNSPPTTGVLLGLSKDELRQRALKIDPYRTAWIGRVDTIPPQSDERTALIDRGLILRGLLSEEQIQEIHRVGDLWLRHHDALRLATSKAAKTVELAFEQMKRERAERKVQKQREAAERRRRRVEDVARRRAEDIIFLGSGVSSRLVDRRSHIEALTERGLPLLSTPADVARALGISVPRLRWLCYHGDAVERPHYVYFEVPKRSGGKRLLSAPHASLAQAQTWILRSILDKLPTENPAHGFVAGRSTVTNAREHLGRDIVVNLDLRDFFPTITFPRARGVFQRVGYSPAVATILALLCTECPRREVDYDGQRYWVAIGDRGLPQGACTSPALSNQVARKLDRRLAGMAAKHGWTYTRYADDLTFSAPPGKRSGIPMLLARVRHIVTEEGFTLHPSKGRIQRAARRQEVTGIVVNDKLSVPRDELRRLRAILHAAKTTGLEAQNREQRPDFEAHIRGKIAYVAMVDPEKAAPLRAALDALPR

SEQ ID NO: 6537 - protein, 561 aa, Chondromyces apiculatus
  source 1..561: note = Related to NZ_ASRX01000016.1
MSFWDRVKAFFGGGKGEGTEAPPYDAPTQRAPAQRAATKGTSGSGTKASQGAATSTSPAASGAPAASRRTFVKWITEAFSTDPAVTTRAIMSMSAAEIRRRALTINPFRTAWIGRVDVIPPQSDERTALIDRSLILLGLLTEEQIVEIHRVGDLWLKHREASRLVALSAARNAEQALADLKRERAARKEQKRRDAVERRRKRAEAIARRRAEDIVYLGAGVSAGLADRRSHIEALAARGLPLLASPADVAKALGVSISRLRWLCFHSDAVERPHYVYFEIPKRSGGKRLLAAPHASLERAQHWILREILDKLPVEPPAHGFVKGRSTVTNARPHVGRDLVVNLDLSDFFPTITFPRVRGVFRRLGYSPAVATVLALLCTEPPRRPVEYEGQRTWVAVGERGLPQGASTSPALSNQVARKLDRRLTGMAEKHGWTYTRYADDLTFSAPEGRRGDLAMLMARVRHIVTEEGFALNPRKGRVQRASGRQEVTGIVVNDKLGVPRDEVRRLRAILHAAKATGLEAQNREKIPHFEAYLRGKIAYVAMIDPAKAAPLHAALEALSR

SEQ ID NO: 6538 - protein, 573 aa, Polyangium fumosum
  source 1..573: note = Related to NZ_SSMQ01000028.1
MGFWDKVKSFIGTGKPGEGEPGKNEPDDKPKAASASTTSSSSSSSTKSTTTGAATGSATTAVATFTSTSPAPAAKKKDKPKPKDPYDTSGILGLSADEMRKRALKINPYQTAWIGRVDTIPPQSDERTALIDRGLILRGLLTEAQIEEIHRVGDLWLKHNEATSLASTVARKKADEAIEELRRQKAERKAEKKRLAAERKKKHAEAVAKRRAEDIIFLGRGVSGSLGDRRANVESLQKQGLPLLSTPAEVAKALGLPIPRLRWLCYHNDAVEKPHYVYFEVPKRSGGMRLLSAPHEALSKAQQWILQNVLAKLSIEAEAHGFVKGRSTVTNARAHLGRGIVVNLDLSDFFPTITFGRVRGLFESIGYSPAVATIFALLCTESPRRKVVYDGTTYWVAVGERGLPQGACTSPAISNLVARKLDRRLTGMTRKMGWTYTRYADDLTFSAANEVVDDGKGGQKKGRGDLGILLARVRHIVQEEGFAINPKKGRVQHAGGRQEVTGIVVNDKLGMPREEVRKLRAILHAAKKTGLAAQNRENIPHFEAYLQGKIAYLNMVDPERAMQLAKAFLEIPR

SEQ ID NO: 6539 - protein, 566 aa, unidentified
  source 1..566: note = Related to JADJXL010000001.1; note = Polyangiaceae bacterium
MGFWDKVKTFIGPGKPGEGEPKKDDPAPAAKPASTPATTSTSASGKTASASSAVGAVSTFTASTPAKTAAAKPKKDKPKDPYDASGILGLSADELRKRALKIDPFRTAWIGRVDTIPPQSDERTALIDRGLILRGLLSEEQIEEIHRVGDLWLKHHEAANLASTVARKRADEAIAELKKEKAAKKAEKKRLAAERKKKRAADVARRKAEDIIFLGRGVSGKLADRRANVEALQKNGLPILSTPAEVAKTLGLPIGKLRWLCHHNDAVTRPHYVYFEVPKRSGGTRLLSAPHENLAKAQEWIFNNILQKLPTENPAHGFVKGRSTVTNAKEHVGQGIVINLDLSDFFPTIGFGRVRGLFESLGYSPAVATIFALLCTEPPRRKVTYDGTLYWVAVGDRGLPQGACTSPAISNLVSRKLDRRLLGMTRKMGWTYTRYADDLTFSAEMQEIEGGKKGRKDLGMLLARIRHIVQEEGFAINPKKGRLQHAGGRQEVTGIVVNDKLSMPREEVRRLRAILHQAKKTGLEAQNKEKRPHFESYLKGKIAYLNMVDPDRAMQLAKAYMEAGGR

SEQ ID NO: 6540 - protein, 568 aa, Polyangium sp.
  source 1..568: note = Related to NZ_CP079217.1
MGFWDKVKTFLGNEKPGEGEPKKDDAPPAVKGPATPASSGGAKPAQSAKNAAAPPPVATFTTTQPVITPAPAPATGAKKGKPKDPYDASGILGLSAEELRKRALKINPYKTAWIGRVDTIPPQSDERTAIIDRGLILRGLLSEAQIAEIHRIGDLWLRHREVTSLAESVAKQKASEVIEELRRQKAERKAEKKRLAAERKQKRAEEIARRRAEDIIYLGRGVSAGLGDRRSHIEALGERGLPLLSTPADVAKALQIPVPRLRWLCFHSEAVEKPHYVYFEVPKRSGGTRLLSAPHEALAKAQQWILHNILEKLPVEDPAHGFVKGRSTVTNARPHLGQQVVVNLDLSDFFPTVTFLRVRGFFEKIGYSPAVATIFALLCTEPPRRRVVYDGQPYWVAVGTRGLPQGACTSPAISNGVSRKLDRRLTGMSKKMGYTYTRYADDLTFSAPAPAGEDGDKARNDIGILLARVRHIVQEEGFAINPKKGRVQHAGGRQSVTGIVVNDKLSVPREEVRKLRAILHAAKTTGLAAQNREGIPHFEAYVRGKVAYLHMVDPERAAPLLRALEALG

SEQ ID NO: 6541 - protein, 549 aa, Pyxidicoccus fallax
  source 1..549: note = Related to JABBJJ010000008.1
MGSFWNRLKGLFTGGDTPGDAAPAQGTTAAPPAGTAAPSTGAPASTATPPQAQAPQAPAVRNPYEANEAILGLSPEEFRKRALKIVPWRTAWIGRVDTIPPQSDERTALIDKGLLLRGFLTREQLAEIHRVGDLWLKHHDADRLAHAAAAKTAEAAVEARRAERKKRKEEKQRQSAERKQQRAEDIARRKREDIIFLGRGVSSGLADRRSNIEALQASKLPVLSSPADVAKALGLSIPQLRWLCFHQEAAEKTHYHYFEVPKRSGGKRLLSAPQPTLKQAQAWILENILEPLPTEAPAHGFIRGRSTVSNAAAHLDRDVVVNLDLKDFFPTITFRRVRGVFRRLGYSPSVSTVLALLCTESPRRQVDYDGKRYWVAVAERGLPQGACTSPALSNQVARKLDRRLRGRMAKLGWEYTRYADDLTFSAPAGKREQVPFLMAAVRHVAEEEGFALNPNKGRVQRVGGRQSVTGIVVNEKLSVPREEVRRLRAILHQAKTTGLAAQNRENRPDFEAWLHGKIAYVCMVDKPKGLKLLEAFEALRSGKQASAGS

SEQ ID NO: 6542 - protein, 534 aa, unidentified
  source 1..534: note = Related to JACPVI010000075.1; note = Myxococcales bacterium
MASFWGRVRGFFGGGQPPSDFETSAPSPGASPVPRAAAPASAASPAKNPYLANEEVLGLSAEELRKRALKITPWRTAWIGRTDVIPPQSDERTAIVDRGLVLRGLLTKEQLAEIHTVGDQWLKHHEAMSMAGALAAKSADQAVEQRRKEKAQRKAEKQKLAQERAQARAAEVARRKKEEVAFLGPGVSSGLSDRRSNIEALAAAGLPVLSTPADVAKALEVTVPELRWLCFHSEAAERTHYRTFEVPKRSGGVRLLAAPKKKLAKAQGWVLRSILEKLPTEKPAHGFVKGRSIVSNAAAHLGRDVVVNLDLKDFFPTVTFPRIRGVFKKAGYSPAVATVLALLCTESPRREVEYEGRRYFVAVGPRALPQGACTSPALSNQVARKLDRRLRGRMAKLGFEYTRYADDLTFSAPPGKREKVGFLKAAVRHLVEEEGFTVHPEKGSVLSSSRRQRVTGIVVNRKLSVPREQVRRLRAILHQARKTGLAAQNREGRPNFEAYLQGMIAWVSMVDREKGQNLARQLAELVVAGRRAAG

SEQ ID NO: 6543 - protein, 535 aa, unidentified
  source 1..535: note = Related to JAIBBR010000058.1; note = Myxococcaceae bacterium
MERDGRYLYNPYSGDSSATALRNAPPAPAPAPVRTTAASTPAPYQTPPPPRTINENSYAANPEILGLSADDLRKRALKIVPWRTAWIGRVDTIPPQSDERTALIDRGLMLGGYLNEKQLAEIHTVGDLWLRHQDATRLAEAAAAEAADDAIEALKAEKARLKAEKKKAAAERRAARAAEVARRRAEDIIFLGRGVSKGLHDRRSNIERLTEKGLPVMSTPADVAAQLGLTVPKLRWLCFHSDAAQTVHYTAFEILKRSGGTRLIAAPRPTLAKAQTWVLRNLLEKLPVEENAHGFVKGRSTVTNARAHVGRDVVVNIDLKDFFPSIGFRRVRGVFKRLGYSPAVATVLALLCTEAPRRKVEYDGHTYFVAVGERALPQGACTSPALSNQVARRLDKRLRSRSQKAGWTYTRYADDLSFSAPAQRPAAAQLQAMVRHVAQEEGLAVNPKKGRVLVRGGRQQVTGIVVNQKTSVPRAQVKRLRAILHQAKKTGLAAQNREQHPDFTAWLKGMIAYVTMVDSAKGHKLKAAFDALSPS

SEQ ID NO: 6544 - protein, 635 aa, Minicystis rosea
  source 1..635: note = Related to CP016211.1
MASFWDKLKSWIGGGPSSTPPDPSEETSDLARRVEAIVVRRMTRKESFEAIEIADEAASAPEDRTVKGIAAASAVVARLYDEGRFEPLGYTRTKLADGNWLYHLKGADLSKQSATAPAARTTPRSTAPATRTAPQTTPAQTTAPVPAAPAPKAKDPYAASEILGLSADEMRKRALRINPYKTAWIGRVDTIPPQSDERTALIDRGLILRGLLTEKQITEIHRVGDLWLRHHEATRLAASTAAVAAAKQMEDIARERAEKKAQKKREAIEREARRAEDVARRKREDIVYLGVGVSKGLADRRSHVEALLDRGLPVLSTPADVARAMGLTISELRFLCFHAEAVEKPHYIYFEVPKRSGGKRLLASPQPRLAKAQAWVLHEVLEKLPTEDPAHGFIKGRSTVTCAIPHVGRDVVVNLDLSDFFPTITFSRVRGVFERLGYSPAVATIFALLCTEAPRSLVEFEGRRYHAAVGPRALPQGACTSPALSNQVARKLDRRLAGMAKKHGYTYTRYADDLTFSADGKSATDLGMLLARVRHVVSEEGFAINPKKGRLQRAARRQMVTGVVVNDRPSVPREEVRRLRAILHHAEKTGLAAQNRENVPHFEAHLRGRLAYLHMIDPERAAPMLARFEAIVARA

SEQ ID NO: 6545 - protein, 508 aa, unidentified
  source 1..508: note = Related to JADJRH010000011.1; note = Polyangiaceae bacterium
MPPPRSTKPSAGQAPPIQAAAPPPPKPQPEDPLAAEILGLSAQELRKRAIKINPYQTAWIGRTDTIPPQNDERTAIIDRGLILRGLLTPDQITEIHRIGDQWLTHREAAKMAQILAARSVEEALAARRAEREAKKAQKKAESEARKARIKEEIARRKAEDIVYLGAGVSHLLHDRRSHLETLESRGLPILSTPADVARALNLPIGKLRWLCFHSEATEKPHYRYFEIPKRSGGTRKIAAPQPELAKAQEWIFTHILQKLPTEDAAHGFIPNRSTVTCAAPHVGKDVVINLDVKDFFPTITFVRVRGVFQKLGYSPAVATIFALLCTEAPRVETSFEGQTLWAAVGPRACPQGACTSPALSNQVARKLDRRFVGMSKKHGFVYTRYADDLTFSAPEGKRAEIGMLMARVRHILAEEGFTLHPDKGRVQRRQHQQLVTGIVVNQKLGLDRKHIRRLRAILHAAQKTGLEAQNRENIPHFEAHIRGHLAYLHMVAPDKAAPLLQALNSLPK

SEQ ID NO: 6546 - protein, 628 aa, unidentified
  source 1..628: note = Related to JAFEBD010000111.1; note = Deltaproteobacteria bacterium
MSFWKKVKGFFGGGGGDEPPEGLTGHDPKVAAEVIAVLRVRCAAQTSFEAVDIADEVTRDDASRGVAQIRAACAIVEALYESGWFSTLDYVRTGAIYHHTSKAPSSYAPPRGGSTFPPPAPPAPRPAAPPTTPTATNPTAPAAPAVPAVDPLAAEAILGLSPEEFRKRALTIKPYQTAWIGRVDTIPPQSDERTALIDRGLLLRGLLTREQLEEIHRIGDQWLLHHESVKLAEIAAQANVEAYLRAAREEKARLKAQKKAESAEREAVRKALVAKRRAEDIIYLGRGVSGGLADRRAIVEELERRGLPLLGSPADVARALGLTVPRLRWLAFHAEAPSRTHYVYFEVPKRTGGLRLLSAPHDDLKKAQHWILENILAKLPVTDAAHGFVSGRSVVSNAAAHLCRDVVVNCDLESFFPSITFGRVRGVFEAIGYSPAVATILALLCTEAPRTKVTHEGKTYWVAVGARGLPQGAPTSPALSNQVARKLDQRLTGLGRKLGWSYTRYADDLTFSAGPGKREQIGYLLARIRHIAQDEGFAMNRKKTRVQRAARRQEVTGVVVNDKLSLAREELRRLRAIVHGAQKTGLAAQNREGREDFEAWLRGKIAYVSMIDAAKGEKLRAALDAAPP

SEQ ID NO: 6547 - protein, 625 aa, Labilithrix luteola
  source 1..625: note = Related to NZ_CP012333.1
MSFWNKVKQFFGAGEAPEGPAKTGDALSAHDAALVREVSAIIQIKCQNGELFQAVDVADQGGYAAKGIPQIRAACAVVEALHDTGRFDALGYTRTDAVYHPVGASPDSYVRPRAAALGSPPAPAPRPAPVAQPAPVSAVRQADAKDPLDGGDILGLSAEDFRKRALKINPYRTAWIGRVDTIPPQSDERTALIDRGLILRGMLKPEQITEIHRVGDLWLKHHDAMRIAEIAAQKNADAFLEARRAEKAALKEQKKREADERRAKRKAEIAQRRATDIVFLGRGVSAGLADRRTHIEELARRGLPILSTPQDVAKALGLDVPRLRWLAFHAEAPARTHYVHFEIPKRSGGTRLLSAPHDDLKKAQHWILEFILSKLPVTEAAHGFVPGRSTVTNARMHVGRDVVVNCDLKDFFPSITFKRVRGVFEVIGYSPAVSTILALLCTEAPRTKVVHEGREFWVAVGERALPQGAPTSPALSNQIARKLDQRLEGVCKKIGWSYTRYADDLTFSAESGQRERIGWLLARVRHIAQNEGFALNAKKTRVQRNARRQDVTGVVVNDKPATPREEIRRLRAILHGAKRTGLEGQNRQGHPAFEAYVRGKIAYVSMIDREKGEKLRRELDVITGS

SEQ ID NO: 6548 - protein, 538 aa, unidentified
  source 1..538: note = Related to JACRCQ010000074.1; note = Deltaproteobacteria bacterium
MGFWDKVKAFFVGPPAEPSVADDDSESGSSPPPAKGSRSSTQAPRAPSRAAESAPPQSADSFAAGEILGLSAKDMRARALKINPYHTAWIGRIDTIPPQSDERTALIDRGLILRGLLSKSQIDEIHRVGDIWLRHHDAAKLAEAVAAAKAQRAVDDMRARKAEEKRRKKEEAAQRKALRAEQVQRRREEDIVFLGRNVSASLADRRSHVEKLSEAGLPLLATPSDVAKALGITIRQLRWLCFHAEAALKSHYVYFEIPKRTGGTRLLAAPHRHLAQAQRWVLDNILRRISPSEPAHGFVAQRSTVTAAAPHVGMDVVVNLDLKDFFPTITFPRVRGLFKSMGYSPASATVLALLCTECPRTPVDHEGLRYWVAAGERALPQGACTSPAISNLVGRKLDRRLVGMSTKMGWHYTRYADDLTFSAPAGHREAIGILLARVRHILQEEGFQLHPRKQHIQRAARRQQVTGIVVNHKLAVPREEVRRLRAILHNARRTGLAAQNRDDIPHFESWLQGKIAYVQMVDAELGRKLAEQYRALTG

SEQ ID NO: 6549 - protein, 529 aa, unidentified
  source 1..529: note = Related to JADZES010000060.1; note = Deltaproteobacteria bacterium
MGVWEKLKGLFSRPPPPPSGPGGPATPSSASSLSSPSNLSGAGASGAPASDPYQASAILGLSYDEMRKRAMKIDPMRTAWIGRVDTIPPQSDERTALIDRGLILRGFLTKEQIGEIHRVGDLWLRFHEADRLATTVAQREAGELMKNLAEEKAKKKEEKKRLAAERRAARQQAIEKRRREDIIYLGAGVSSGLRDRRSNLERLNGAGLPVLSTPADVAAALDVSIGRLRWLCYHSDAAERLHYVRFTIPKRSGGQRAIAAPLPDLKRAQAWILESVLEKLEVEPEAHGFVAGRSTLTNATPHLKREVIINLDLADFFPSIGFRRVRGVFEAIGYSPAVATIFALLSTEAPRMEVDYDGQKLQVAVGERALPQGAPTSPALSNRVARKLDRRLRGMATKHGWTYTRYADDLTFSAPTGHQGEVPIMQARIRHIVGEEGFAVNLKKGRVQRRSGRQEVTGVVVNDRPGLPRTEVRKLRAILHQAKKTGLAAQNRQSHPRFEAWLRGKIAYLMMIDPARGKAMAAELDALVG

SEQ ID NO: 6550 - protein, 659 aa, unidentified
  source 1..659: note = Related to JAEUKI010000057.1; note = Myxococcales bacterium
MAGLWDRIRAFFRSGRGGDADAQIEQAVRVALVRRVSGRSVFTPLELAYDIVPREDRSDEVIEAIATALDRLYVRAYFGPFNYARSIDPKSAYRYVYHPAGTRVPGTTPDTTRVRAEPESEPPPPPAPTRSTRASTVSGSTRAPTSVSSRGGSTARGASTTTSGRGAPSSARGAYRTAADPYARPEILTLSAEELRARAVKIDPYKTAWIGRVDTIPPQSDERTAIIDRGLILRGLLSEAQITEIHRVGDLWLRHSEAARLAATTAAKTAEDAVRQMREEKVRKKAQKIKEAAEKKRRYAEGVAKRRATDIIFLGRGVSSKLGDRRSDIEKLDAQGLPVLSTPKDVADALRTTISELRWLAFHSDAAERTHYVTFTIPKRSGGTRSLSAPHEKLARAQKWVLEHVLAKLPTEIPAHGFIRGHSTVTNALPHVKRDVVVNLDLKDFFPTVSFARVRGVLEKVGYSPAVATVLGLLCTESPRQIITYADKPYHVALGPRALPQGACTSPALSNQVARRLDRRLSGLCAKMGWTYTRYADDLTLSADEGHRGELPVLIAKVREIVEDEGFKINPKKGRVQRKSARQTVTGVVVNDHPTVPRDEYKRLRAILHRAKFTGLDAQNKEARPHFDKWVEGKIAYISMVDATKGARLKAAFDAIPKT

SEQ ID NO: 6551 - protein, 611 aa, Sandaracinus amylolyticus
  source 1..611: note = Related to NZ_CP011125.1
MSFWKKVVDFFTGGPTSIETSAVGTSGSPLEAAIWSAIKSRMAKGESFTPIDVVDDATSSTPGRTVKTITDGIAFVDAFFARGLFAPHGYTRTLTSTPSGQNWLYHPASSAPLVAMPAIVAQPALKASAPAIDPYDVGSLLTLTPAELRTRALKIVPWRTAWIGRTDVIPPESDERTALIDRGLELRGLLTRAQLVEIHRVGDEWLKHKDAPRLAQSRAAKNAEEAVAQLRAERARTKEEKRAASEARKKARAERIARRKREDIVYLGRGVSALLGDRRAHVEKLNALGLPVMASPADVATALGVTIPALRFLCFHAEAARRAHYVQFDVPKRSGGVRRLSAPMPRLAAAQQWVLEHVLEKLPVERPAHGFVPGRSTVTNAREHVGRDIVINLDLESFFPSITFPRVRGLFVGVGYSPAVATILALLCTESARTRAEYDGAKYDVATGPRALPQGACTSPAISNQIARKLDQRLRGLAVARGWTYTRYADDLTFSAPEGKRSEIARLIARIRHVVEEEGFRIQVKKGRVQRAGGRQTVTGIVVNETHKLGVPREDVRMLRAILHNAKKTGLAAQNRDAKPDFEAWLRGKIAYVQMIDRARGDALLRALDAL

SEQ ID NO: 6552 - protein, 531 aa, unidentified
  source 1..531: note = Related to JAGQIZ010000659.1; note = Myxococcales bacterium
MGLWDSVKRLFGGGDAASPDEGKEEREERGGGSAARGGVYRSAPERGEPDAIDPYGKSPVMGYSEDDVRARFFALRRGGISPFFHPDLLPAPDDEFTQLVDRSLVLAGLLTQEELEAIHRTGLEWRKHRHRADHARIVGKAAAGEAVEILKQERAENAKRKKAEARARREARRQAIEQRKREDIIHLGRGVSNRLGDRRSHVEKLQAAGLPVLSGPADIAVALGITIGQLRWLCFHDEASRTSHYHQFTVPKRSGGVRVLAAPMPHLKRAQTFVFDNILRKLEVEEPAHGFIRGRSTVTNARPHVGQDVVVNLDLEGYFPSVTFPRVRGVFEHLGYSPAAATILALLCTECERRPMRYAGQRYHVAIGDRGLPQGACTSPALANQVTKRLDRRLAGLCRAFGWQYTRYADDLTFSAPAGKRAEIPKLLGAVKRLITEEGFTLNPKKGRIQRRGGCQEVTGIVVNDKLGLARTEVRKLRAILHNARKTGLEAQNREGRPHFRAWLQGKLAYLAMIDRDKGTAMLRELEELPS

SEQ ID NO: 6553 - protein, 573 aa, unidentified
  source 1..573: note = Related to JAFLCL010000034.1; note = Deltaproteobacteria bacterium
MFGPHGYTRTLLQTPAGTNWVYHPKSSAPAAVAPVPGAAAVAPRPATASSAGTVRGPLVPQGSRLPASVTAHTASGGAPAKDPYDLGVFLTLTPAEHRARSLKINPYQTAWIGRVDVIPPESDERTALIDRGLELRGLLTRPEIVEIHRIGDLWLKHKDAARLAESIAHKNVEELLAQERIARQLAKTKKKEESAAKRTREAEDVQRRKREDIVYLGRSGLARNVSKGLSDRRSNIEKLAARGLPRLSSPADVARALELEIKTLRFLAFHADAQRHAHYVQFEVPKKKGGTRTLSAPKPQLAKAQKWILEEVLEKLPVDPVAHGFVKERSTVTNARPHAGKAIVINQDLVDFFPTINFARVRSVFQRAGYSPAVATIFALLTTECPRIQATYAGHTYYVATGQRGLPQGACTSPALSNLVASRLDRRLTGYTSKHGWTYTRYADDLTFSSAEEAEPGSPSGVAKLLATLHHIARAEGFTIHPDKGRIQRKSKRQTVTGIVVNEAHKLGVPREDIRLVRAILHNAKKTGLAAQNRDLSPTFEAWLRGKIAYITMVDRARGLAFSEELEHLDLGR

SEQ ID NO: 6554 - protein, 566 aa, unidentified
  source 1..566: note = Related to JAIBCE010000038.1; note = Sandaracinaceae bacterium
MFGPHGYTRTLLQTPAGTNWIYHPKAQAPTALAPVVKAAAAAPVPVAAKGPLVPQGSRLPSSVTGHTASAGPVKDPYDLGVFLTLTPAEHRARALKINPYQTAWIGRTDVIPPESDERTALIDRGLELRGFLSRAEIVEIHRVGDLWLRHKDAARLTESIAHKNVEALLAQERLAKQLEKARKKDMAAAARAKHADDVARRRREDIVYLGRSGLAPGLSKGLADRRSNIERLASQALPRLSSPADVARALEIDVKKLRFLAFHADAQRHVHYVQFEVPKKKGGMRTLSAPKAELAKAQQWILDNVLERLSVEKQAHGFVKGRSTVTNAQPHQGKAIVVNQDLVDFFPSITLRRVRAVFERAGYSPAVATIFALLTTECPRTRATYAGHEYHVAVGPRGLPQGACTSPALSNLVASRLDRRLQGYTQKHGWTYTRYADDLTFSCDLEPAADSGNDIAKLLATLHHVARSEGFTVHPDKGRIQRKSKRQTVTGIVVNEASKLGVPREEIRLVRAILHNAKKTGLAAQNRELSPTFEAWLRGKIAYIAMIDRSRGLALQKELDSLDLGR

SEQ ID NO: 6555 - protein, 548 aa, unidentified
  source 1..548: note = Related to JADLFP010000335.1; note = Acidobacteria bacterium
MFKRLIDKFRQLVSHPDSPEPPMPSHGPSSAPPPREAAPGAPPLPRAAPGADPKPSTLDQYSPPDILGLSKEELRKRALLVNPYRTAWIGRVDTIPPRSDERTALIDRGLVLRGLLNEEQLAEIHRVGDLWLTFHDAERLASAAAGKTADEAIEEARKAKQAAREEKRRQAAERRARRAEEIALFRKTHLAFRGEGVSAGLSDSRSEIEKLEAAGLPVLASPPDLARVLDVSVSRLRWLAFHSEAVTRPHYTYFRIAKKSGGTRLLAAPHKDLEKAQRWIFENILAKIAAEKGAHGFVKGRSTVTNAVPHKGRAIVVNIDLRDFFPSITFPRVRGLFQSLGYSPAVATVLALLCTECPRVEAVLDGKTFYVAAGQRGLPQGAATSPALSNLVARKLDRRLSGLARKRGFIYTRYADDLTFSCGRDKDSELGRFLASVRHILTEEGFTINPKKFRVQRSSARQRVTGIVVNRKLSVPREEVRRIRAILHQAKSAGLAAQNRENLPNFESWLEGKIAYISMVDRARGAVLKAELDRVQRQRPAEDSSSTA

SEQ ID NO: 6556 - protein, 558 aa, Sandaracinus sp.
  source 1..558: note = Related to PABA01000104.1
MGLWSWLGKVFRRVRAWLAYNPELPPPPPEAPKVDELPPPAGGSGGAGVGYGTATAKTWTTAKAKAQQKKPPPKPKKAVDPWDTGELLTLSPEELRARAMHIQPWKTQWIGRVDVIPPESDERTALVDRGLVLRGFFTEAELAEIHAIGDAWLEHKDAARLARARAAKDVDAALAQLRAEERERKARKKREAAERRERRAREIAERRRTDIVFLGRGVSHSLADRRAHVEKLEARGLPVLATPKDVADALGLPIPRLRFLAHHDEALQRAHYVQFEVPKRTGGMRTLAAPKPDLAKAQTWILEHVLAKVPVHDAAHGFVPGRSTATCARPHRGRAAVVNLDLKDFFPSITFPRVRGVFAELGYSPAAATILALLCTECPRREVRFAGVTYHVAVGERGLPQGACTSPALSNLVARRLDARLAGLAEKRGFAYTRYADDLSFSTGDPKAVAPLLAIVRKIVREEGFRENGKKTRVQRAAGRQTVTGLVVNEPDRLGLPREEVRRLRAILHNAKKTGLAAQNRGGHPDFEAHLRGKIAYLAMVDAPKAARFRAELDALTG

SEQ ID NO: 6557 - protein, 576 aa, unidentified
  source 1..576: note = Related to JADZAM010000038.1; note = Sandaracinaceae bacterium
MLARAKARSHFSAINIDVVVARALSAGERAEIAPWVEQLFRRGVLQGHAYTRTLVRAGDRVIWIYHPQDQAPEPVSPGSPAPSAAAASHAAPRPAAHAAGPLLDAGSLWKLSPDELRARALDVKPYLTAWIGRVDVIPPASDERTALIDRGLVLRGLLTEAQILEIHRVGDLWLEHSDAARLAQLRAYKKADDAILALRARDAELKAEKRKLAAERAQRRREEIARRKNEDIVFLGRGVSERLHDRRADVEKLERLGLPVLATPADLAKALGLRAPELRFLAFHAEATERPHYVQFDVPKRSGGTRRLSAPLPKLAAAQRWILDNVLCKVAPHDAAHGFVPGRSTLTNARPHLKKGVVVNLDLQDFFPSITFPRVRGVFASLGYSPAVATILALLTTEPPRRAVRYAERTLHVAVGSRGLPQGACTSPAISNLACRKLDRRLSGLAAKHGLTYTRYADDLTLSGPKDTHVARLLASLRHLIESESFRVNDKKGRVQRAGGQQTVTGVVVNDKPSVPRSERKRLRAILHQAKKTGLEKQNRAGVPSFEAHLRGKIAYVSMIDGTRGAELAKALDALD

SEQ ID NO: 6558 - protein, 544 aa, unidentified
  source 1..544: note = Related to SHBB01000309.1; note = Sandaracinaceae bacterium
MDALHERGVPGAYDFERTLLSVAGRSVWIYHPIGASPNQPSTPPPPVATPASPTRTKAKQKGKEKALPDPYAAGPLMTLTAAELRARALTIEPWRTAWIGRVDVIPPQSDERTALVDRGLVLRGFFTEEEIAEIHRVGDLWLEHKDATRLAKARAQKSADDAIQALREEAKRERARKKAEAAEKKKQRAAEVARRKAEDIIFLGRGVSGRLNDRRANVEKLAEAGLPVLATPADVAKALGLTVPRLRWLAFHAEASEQGHYVQFEVPKRSGGTRRLSSPKKALRAAQTWVLNNVLARCGTEDAAHGFVPGRSTVTNARPHVGRRVVVNLDLEDFFGTITFPRVRGLFVSLGYSPAAATVLALLTTEAPRREVRYDGKPYRVAVGPRALPQGACTSPALSNLVARKLDRRLTGLAKKHGWTYTRYADDLTFSRDDDTQVGALIATVRHVVTEEGFRINEKKGRVQKSGGQQTVTGVVVNDKLSVPRAEIRRLRAILHNAKKTGLSAQNTSGHPHFEAHVRGMIAYVRMVDPERGAKLAAQLAAVR

SEQ ID NO: 6559 - protein, 556 aa, unidentified
  source 1..556: note = Related to JACKEC010000023.1; note = Sandaracinaceae bacterium
MEIAPYVDGWVEAGLLDKHGYTGTEQIVAGRAVWIYHRVGQPVAGVTPSTRVNAPAPTAPKAAPQKAKKKEKKKRKWFDPWDAGDLMSLTAAELRARAMKIVPWRTAWIGRVDVIPPQSDERTALVDRGLILRGFFTEEQIEEIHRIGDLWLKHKDAAKLARAAAAKSADAAILQLREEAKQKKARLKEEAKARAEKQRADVAHRKATDIVYLGRGVSGQLHDRRSNIERLESQGLPLLAAPADVADALGVTVSRLRWLAFHDEAAPAGHYSFFEIPKRSGGTRLLSAPKAELRAAQSWIHENILKKVALEAPAHGFVPGRSTVTNAAPHVGRDVVVNLDLEDFFPTITFARVRGLFTSLGYSPAVATVLALLTTEAPRRRLTYAGRPYFVAVGRRGLPQGACTSPALSNLVARKLDRRMAGLAKKLGWTYTRYADDLTFSAPAGQRDTVGRLFAHVRHIVQDEGFRVNEKKGRVQRKGGRQTVTGVVVNERLAVPREEVRRLRAILNNAKKTGLAAQNRDDHPHFEAWLRGKIAYVSMVDPDRGAKLAAQLAELS

SEQ ID NO: 6560 - protein, 540 aa, unidentified
  source 1..540: note = Related to JADJGV010000002.1; note = Myxococcales bacterium
MGFWDKVKRFFGGGGALQPDPSAPTAAPPSTPTPSTPAPAPAHTAPAPPAARTAPAPTSTDDSARFRNPAILGLSAAELRKRALRINPYQTPWIGRVDTIPPQSDERTAIIDRGLILRGLLTAAQIEEIHRVGDLWLAHHDAMRLAAAAGAASGEAAVAAERARRAEAKRAKQAAAAARAAARAAAVAARRATDIIFVGRGVSAGLADRRSHVEQLAAAGLPVLAAPADLAAALGLTVPRLRWLCFHADAPAKTHYTYFTIPKRSGGTRKLAAPHRQLAAAQRWIFDQILAKLPITDAAHGFVPGRSTVTNARPHVGQRIVINLDLADFFPSITFPRVRGLFASLGYSPAIATLLAMLTTEAPRVEVEFAGRTHYVATGPRALPQGACTSPTLANLVARKLDRRLGGATRKLGWTYTRYADDLTFSAPAAGSAQVALIFARVRAIVTAEGFAVNEAKGRVQRGGRHTVTGLVVNDRLAVPREQVRRVRAILHGARTTGLAAQNRAGHPDFRAWLQGTIAYIHMVDPARGAAFQAQLDALS

SEQ ID NO: 6561 - protein, 467 aa, unidentified
  source 1..467: note = Related to JABFYI010000076.1; note = Polyangiaceae bacterium
MEELRARAAKVRPWLSPWGWRMDIIPPASDERTSLIDRGLVLNGYFTEAQIQEFHRIGDLWLEHKDTARTIAARALETAKADLEELKRKKLEEKAAKKVAAEERRKAHRAAIEKRRLEDIVFLGRGVSGKLADRRSDVEALQRAGLPVLSSPADVAKALEITIPTLRWLAFHTEAAGAIHYRQFEVPKKTGGVRLLSAPRPKLAAAQRWILESVLAKIAPEADAHGFVDGRSTVSNAKPHVGRDVVVNVDLKDFFPSIHFPRVRGFFETLGYSPAVATVFALLTTEAPRRRVEYAGKPYWVAAGPRGLPQGACTSPAISNLVSRRLDKRLSSMGKKHGATYTRYADDLTLSLDPGRREQIGMLLARIRHIAEDEGFRVHPKKVAIQRSGGRQMVTGIVVNRGLSVPREEVRKIRAVLHAAKRSGLAAQNREGHADFRAHLRGKIGYVMMVDRQKGERLLRELEALAP

SEQ ID NO: 6562 - protein, 659 aa, unidentified
  source 1..659: note = Related to JABFXY010000131.1; note = Polyangiaceae bacterium
MGFWDKVKSFFGGASPPGGGDGGDGGNGDSDEAPPLFNERGLPTDAFTQFVERRVRVRAKKEHLFTRHDIARIVVKKLESPPSAAETFAANAVLKLKKAGLFEELGYECSYSSTVRGEVFHPEGTDPDEYPGAGGGPPSGVRRVQPQPVAPVAPAAPPPPRPATPAAAAPARAPTTPYRSNPFDAGQSLGMSADELRRRAMKIVPWRTPWIGRVDVIPPASDERTALIDRGLVLRGYFTEEQIAEFHRIGDLWLEHKDAASFVAARGKEQAKLDLEALKQKKLQEKAEKKRAAAERRERLREAIAKRRAEDIVFLGRGFSGKLADRRSDVEALERAGLPVLSTPADVARAMELSIPTLRWLAFHSDAAETIHYRQFEVPKKTGGVRLLSSPLPKLAQAQQWILENVLAKIPTGGDAHGFVPGRSTVSNAKPHVGRDVVVNVDLRDFFPSIHFPRVRGLFESLGYSPAVASILALLTTEAPRRRVVYAQKPYWVAAGPRGLPQGACTSPAVSNLVARKLDTRLAAMSAKHGARYTRYADDLTLSLEPGRRDQIGMLLARIRHIAEDEGFTVHPDKVFVQRAGGRQLVTGIVVNRGLSVPREELRRLRAVLHAAKKTGLEAQNRDGLPDFRAHLRGKIGYVMMVDREKGSQLLRALEATPP

SEQ ID NO: 6563 - protein, 469 aa, unidentified
  source 1..469: note = Related to JAEUKE010000177.1; note = Myxococcales bacterium
MSAEELRKRAMKIVPWRTPWIGRVDVIPPASDERTSLIDRGLVLSGYFTEEQIAEFHRIGDLWLEHKDAATFAAQRARAQAKLDLDALKRQKLEEKAAKKQAAAARRAALRDAIAKRRAEDIVFLGRGFSGKLGDRRSDVEALERAGLPVLSTPADVARALGVPIPTLRWLAFHSEAAQTIHYRQFEVPKKTGGVRLLSAPRPKLAAAQRFILESILEKISPGPDAHGFVSERSTVTNARPHVGRDVVVNVDLRDFFPSIHFPRVRGLFEQLGYSPAAATVLALLTTEAPRRRVTYAGVAHWVATGPRGLPQGACTSPAISNLVARRLDKRLGAMATKHGGVYTRYADDLTISLESGRREQIGMLLARVRHIAEDEGFTVHPKKVAVQRAGGRQTVTGIVVNRGLSVPREEIRRLRAVLHAAKKTGLAAQNRDDLPDFRAHLRGKIAYVAMIDRDKGARLLQALEQTPP

SEQ ID NO: 6564 - protein, 550 aa, unidentified
  source 1..550: note = Related to JACQYO010000047.1; note = Deltaproteobacteria bacterium
MLRVAGFWDWLKKAFSDPEAPPGPSSSGSTPTPPSPAPSGAAPASATSTPTSSPGKSNDKSATKGRNYDANPEILGLSEAELRKRALRITPWRTAWIGRVDTIPPQSDERTAIIDRGLILTGRLTEAEVAEIHEVGDLWLKYHGRVELARSEAKKASQRAADQIAADREALKKQKKEEAAARKKARAEAILDRKQNDIVYLGRSVSARMNDRRANVEKLHQLGLPVLATPKDVAQLLEISVPKLRWLSFHAVATERPHYISFHVKKRSGGLRLLSAPHKELKKAQKRIATQILDKVDPGPVAHGFIKARSTVTNATPHVGQDVVLNLDLSDFFPSVTFPRVRGLFQSFGYSPAVATVLALLATESPRRTVKYDNRTYHVAVGERALPQGAPTSPAIANLVARKLDRRLSGLARSAGWSYTRYADDLTLSTRGEARKKTPWMYRQVREIISSEGFVVHPKKGRLQRKGGCQTVTGVVVNHKLGLPRREVRRLRAILHGAKKSGLASQNREGRADFPAYLRGKLAYLAMVDPQKGKKMLAELDTLEGRHRPE

SEQ ID NO: 6565 - protein, 547 aa, unidentified
  source 1..547: note = Related to JACPFK010000116.1; note = Deltaproteobacteria bacterium
MAGFWDRLKQLFGDGPSPKGSDPDAGPPSSSRSPSRDGDPVPPASSKAGAQSPEKGQKSPARSYDANPEILGLSESDLRKRALRITPWRTAWIGRVDTIPPQSDERTAIIDRGLILTGRLSEAEIAEIHEVGDLWLKHHGKADLARAEAKKASSAAIAELHAEREAKRKQKKEEAAERRRLRADGIAERRRTDIIFAGRSVSSRLADRRANVEKLVALGLPVLATPRDVAELLGISVSKLRWLAFHAEATERPHYVTFHVKKRSGGLRLLSAPHKELKRAQKKIATQILDRLDVGPAAHGFVKGRSTVSNAKIHLGQDVVLNLDLSDFFPTISFPRVRGLFQSFGYSPAAATLLALVATEAPRRVIKYEGRAYHVATGPRALPQGAPTSPALANLAARKLDRRLLGLAKSAGWVYSRYADDLTFSTKGEPRKKTPWVFRQISEIVSSEGFVVHPRKRRVQHKGGRQTVTGVVVNEKLGLPRDEVRRLRAILHGAKKNGLASQNRDGRSDFPAYLRGKLAYLAMIDPGRGKKMLRELDVIEGRKPAPT

SEQ ID NO: 6566 - protein, 305 aa, unidentified
  source 1..305: note = Related to JADJBV010000001.1; note = Deltaproteobacteria bacterium
MAFHAEAATRTHYVRFTVKKRSGGERQLAAPHQKLKAVQRQILQKILERLDPGPYAHGFVKQRSTVTNAQAHLARHDLINLDISDFFPTIHWRRVRGLFKSFGYSPAVATILALLVTEAPRTLAEYDGKKYWVAIGERVLPQGAPTSPAISNLVSRRLDLRLAGLAKKRGWRYTRYADDLTFSAGEKKRPDIPWMMRQAKEILAAEGFVLHPNKQRVQRKGRRQTVTGIVVNQKLSVPREEVRKLRAILHGAQKTGLAAQNRENLPHFPAWLRGKLAYLSMVDPAKGKKMLAQLDALEGRRPTPV

SEQ ID NO: 6567 - protein, 545 aa, Sandaracinus sp.
  source 1..545: note = Related to JACKED010000002.1
MWLYHPEGVDPRGTGKAPAAVLPPSPKAASTTGTAGSTTSATTASNNSSSTGGWKPPAERANDGDPFDTAGTLTLTPEQLHERAKKIVPWRTAWIGRVDVIPPASDERTALIDRGLVLRGLLTQEDIDEIHRIGDLWLLHKDADRMASTLAHKSAEAAIQARRRERAERKAQKKAEAAKKKAARDAAVAERRATDLFFLGEGVSSQLHDRRTEIERLETLGLPILATPADVAAHLGVEVPRLRFLAFHQEAAQTTHYVQFEVPKRSGGTRTLAAPKPGIAAAQERILETILAKLPLDEAAHGFVTGRSTVTNARPHQGRDLVINLDLKDFFPSVTFPRVRGLFRSFGYSPAVATILALLCTESPRRELSYDGRSYQVAVGARALPQGACTSPAISNLVARKLDRRLRGLAAKHGLAYTRYADDLTFSADADKRGELGMTLARLRHVIEDEGFALNPKKVRVQRKGGRQTVTGIVVNEPTKLGLPREEVRRLRAILHAAKTTGLQAQNRAGHPDFRAHLAGKIAYLAMIDPARARTLREALAACTG

SEQ ID NO: 6568 - protein, 396 aa, unidentified
  source 1..396: note = Related to JAGQRJ010000919.1; note = Planctomycetes bacterium
PSDNPPSERGLKAEQREAARRKEAREEAQREARLARVEARREREAALRQRLAREVLYAGEGVSATVAHAASDVARLEAGGLPVAHSALDLAHLLGLDLPALRWLTFHREVARSTHYRQYQVAKRRGGFRTISAPRPKLKAALRAVRERILGRLAVSPQAQAFVPGRSTLTNARPHLRAAVVVKLDVVDFFGSFSFPRVRGWFRARGYSGMVSTLLALLTTEAPRVEVELDGARYYVATGPRVLPQGAPTSPELTNLLALRLDRRLAAYGAKHGWTYTRYADDLTFSRADEPEGCVSRLLGTAEAILRDEGLRLNHDKQCVTRRGRQQRVTGIVVNEVAGLPRRDLRTFRAAVHRVTRDGFKDVHERQRMLGYASYVRMVKPALGERWLEALREVRS

SEQ ID NO: 6569 - protein, 394 aa, unidentified
  source 1..394: note = Related to JAHBXY010000086.1; note = Planctomycetes bacterium
MTEGPRKSVRVEAEEAARRAEAREEARRAARLARAAAVRARRATHAARLTREVLHAGEGVSARLPAARSDAAALERRGLPVMHDAADLATLLGMDMRALRWLTYHRDVATVTHYRQFQVPKAKGGVRTISAPRPALRAAQQAIRQHVLARLEPTVHAQAFVRGRSTLTNARPHLRAAVLVKADIRDFFGAIDFPRVRGLFEALGYSGMVATLLGLLTTEARRVEADLDGQPAWVAVGPRALPQGAPTSPELTNQIARRLDARLAGYARRHGWVYTRYADDLAFSSQDGARERVGRLLGVVRAALEGEGFQLNPDKLVVVRRGRQQRVTGVVTNDVAGLPRATLRRFRAAVHRVTRAGFADPAERARMLGYASYVKMVKPALGERWLRALREVPA

SEQ ID NO: 6570 - protein, 428 aa, Myxococcus stipitatus
  source 1..428: note = Related to JAKCFI010000006.1
MSWFASTLAWFKRWTRAKPVTRDVSGLDAPTGRDGRPLDVVSETVRLSGPLKPGHLRQIKRDPRLLPKGKRVYARNLKRWMGAGEARRFFSRSMLTRDRSVRDLLPDEAQLARYGLPVWRTEEDVAAALGVTVGRLRHYASHRPRERVRHYVTFTVPKRSGGVRWVHAPKRRLKTLQRRLLMLLVAKLPVSAHAHGFVTGRSVRTGAAPHVGRRVVLKLDLKDFFPSVTLPRVRGLLLALGYGYPVAATLALLMTEAERQPVEVDGTVFHVPVSARVCVQGAPTSPGVCNAVLLRLDRRLAGLAKRYGYAYTRYADDLTFSGDDLGALERVRALAARYIQDEGFTVNRDKTRVQRRGGAQRVTGVTVNAGLGLSREERRRLRAMIHQEGRDGADAERSAYIDGMLAYVKMLNPEHAEKLSRGRKRRGS

SEQ ID NO: 6571 - protein, 428 aa, Myxococcus sp.
  source 1..428: note = Related to NZ_CP012109.1
MSWLDSTLSWLKARFTRPVTRSTTGLDAPVDAQGRRVDVVSETVVMSGPLKPGHLRQIHRDARLLPKPQRRYTPGRAKWMPAAEARRLFSGTLRTRNRNLRDLLPDEAQLARYGLPVWRTEEDVAAALGISVGMLRHYSIHRSRERVRHYVTFAVPKRTGGVRLLHAPKRRLKALQRKLLEVLVSKLPVSQQAHGFVSGRSIKTGAQPHVGRRVVLKLDLKDFFPSVTSARVRGLFIALGYGYAVAATLAVLLTESERQPVDIEGTVFHVPVGPRVCVQGAPTSPALCNAVLMRLDRRLAGLARRYGYTYTRYADDLTFSGDDLSALERVRALAARYVQEEGFTVNRDKTRVRRRGGAQRVTGVTVNATLGLSREERRRLRAMLHQEGRDGEDSTRRAYLDGMLAYVKMLNPEQAARLVRKRKPRAGG

SEQ ID NO: 6572 - protein, 426 aa, Myxococcus fulvus
  source 1..426: note = Related to NZ_FOIB01000012.1
MSWFDSTLGWFKGLFTPKPVTRDVSRLDGSARDASGRAADVVRETVATSGPLKPGHRREIIRDARLLPKGRRVYTPGRKPLMTRGEARRFFSTTFRTRNRDVRDLLTDEAQLTRYGLPVWRTEEDVAAALELTVGQLRHYATHRIRERVSHYVTFSVPKRSGGTRLLHAPKRKLKALQRRLLTLLVAKLPRSEHAHGFVSGRSIKTGAAPHVGRRVVLKLDVKDFFPSVTVGRVRGLLLALGYGYPVAATLAVLMTEAERQPVEVEGTVFHVPVGPRACVQGAPTSPGLCNAVVMRLDRRLAGLARRYGYTYTRYADDLTFSGDDVGALEKVRALAARYVRDEGFEVNAAKTRVQRRGGRQRVTGVTVNAGLGLSREERRKLRAMIHQEDGGDAKQRARIDGMLAYVKMLNPEHAARLARRRKPRG

SEQ ID NO: 6573 - protein, 426 aa, Myxococcus eversor
  source 1..426: note = Related to NZ_JAAIXY010000026.1
MSWLDWFKGLFSPKPVTRDVSRLDAPFERDASDRPPDVVRETVATSGPLKPGHLRQILRDARLLPKGKRVYTKKRKRLFSALEARRFFSTAFRTRNRNVRDLLPDEAQLARYGLPVWRTEEDVATALGLSVGQLRHYSTHRARERVSHYVTFTVPKRSGGQRLLHAPKRKLKAIQRRLLDVLVSKLPVSEQAHGFVTGRSIKTGAAPHVGKRVVLKLDLKDFFPSVTVSRVRGLLLAFGYGYPVAATLAVLMTEAERQRVDVEGTVFHVPVGPRVCVQGAPTSPGLCNAVLTRLDRRLAGLGRRYGYAYTRYADDLTFSGDDVGALEKVRALAARYVREEGFEVNAEKTRVQRKGGRQRVTGVTVNEGLGLSREERRKLRAMIHQEDRDGGDAKRSARIDGMLAYVGMLNPEHATRLARYRKPRGG

SEQ ID NO: 6574 - protein, 431 aa, unidentified
  source 1..431: note = Related to VBLP01000080.1; note = Deltaproteobacteria bacterium
MGSWLRRVFGPGAESPSGDSSGADRADRAGPATASAAAAAGTRRGGPLRPNQRREAVRDERLLPKPEPRRPWRAPKSRPIIPADAGARLFSDSLRTRNRELRTLATDPAQLARHGLPIWDTERDVADALGISLGELRHHAIHRRRERVEHYVTYAIAKRSGGQRIIHAPKTRLKAILRKLHGALVGKLPVSEHAHGFVAGRSVRTGAAIHVGKRVVLRLDLREFFPTVTAARVRGYLIALGYGYPVAATLALLTTEPPRQRVDIDGTIFHVPVGPRTCVQGAPTSPGLCNAILHKLDRRIAGLARRAGFAYTRYADDLTLSGDDLDTAHRLRRRVERVIREEGFEVNPAKTRVMTGRGAQRVTGVTVNRVLGLSRRERRQIRAMVHCGDPDRARQVEGLLAWVEMLNPAQADALRRAPRKPPARPGARPDR

SEQ ID NO: 6575 - protein, 440 aa, Hyalangium sp.
  source 1..440: note = Related to NZ_JAHXBF010000024.1
MSFFSTLRAWMGSLFGEKPVTREVTRLSSEPETPSAKQGPTKTVLGRAKDTVVEKVVMTGPLKEKHRRLLKRDARLLPKPSRKRRWEKREKVMSQAEARRLFAGTLRTRNRNHRDLLPDEEQLVRYGLPVWRTEEDVAQALGLTVRRLRHFSIHRERDPVSHYITFAVPKRSGGQRLIHAPKSGLKAVQRKLLSLLVEKLPVSPHAHGFVKGRSVRTGAEGHVGKAVVLRLDLKDFFPTVTYARVRGLFIALGYGFPVAATLAVLMTESERQPVEAEGKVYFVPVGPRVCVQGAPTSPALCNAVVLKLDRRLAGLARKHGFTYSRYADDLSFSGPSEETAERLRALAKKIIEEEGFQVNAAKTRLQRRGGRQTVTGVTVNQVLGLSRKERRKLRAMIHQETSRPADAERSARIDGKLAYLSMLNPQQAEALRTRRKGRTS

SEQ ID NO: 6576 - protein, 433 aa, Hyalangium minutum
  source 1..433: note = Related to NZ_JMCB01000011.1
MSLFPKLLTWVKTVFGQGPRTRQVTRLSSANGGPVDASGRPVDVVTEEVVLKGPLKEKHRRLVKRDPRLLPKPPRKSHWEKRKKVMSAEEANRLFSGTLRTRNRNLRDLLPDEAQLERYGLPVWRSEQDVATALGITVRQLRHFSVHRQRDRVSHYVTFALPKRSGGQRLIHAPKKGLKAVQRKLLSLLVEKLPVSPLAHGFVKGRSVRTGAEGHVGKAVVLRVDLKDFFPSVSYARVRGLLIALGYGYPVAATLAVLMTESERQPVEVDGQVFFVPIGPRVCVQGAPTSPGLCNAVVLRMDRRLAGLARKHGFTYSRYADDLSFSGPEQKTAEKLRALAGKIIAEEGFQVNAPKTRLQRRGGRQTVTGVTVNQVLGLSRKERRKMRAMIHQEASRPADAENSARIDGKLAYLSMLNPRQAEALRTRRKGRTR

SEQ ID NO: 6577 - protein, 436 aa, unidentified
  source 1..436: note = Related to JAEUJQ010000080.1; note = Myxococcaceae bacterium
MSLFDRLWGFFKGLTSKPVERDVTRLPSHDAKDGRAADLTKEVVRTSGELKPHHRRLITRDQRLLPDPSRKAHWGPLGYTARKKVFDASVAGRLFAGTLRTRNRELRTLATDPAQLERYGLPRWEDEATLAAALGLSVNQLRHLSTHRLRERVPHYVAFAIAKRSGGERVIHAPKKRLKAVLRAVHAQLVSKLPVHPAAHGFVKGRSVKTNAEGHVGRAVVVKLDLEDFFPTVTYQRVRGLLVSLGYGYPVAATLAALMTESERQPVELDGEVVHVPVGPRVCVQGAPTSPGLCNAVVRRMDARLSGLAKKLGFTYSRYADDLAFSGDDPKQVDVLIHRATRVIATEGFRVNGKKTRVMRRGAAQRIAGVTVNATLGLSRKERRLLRAAAHREKTSTVDAKEQAVLTGQLAWVQMLNPSQAEALRRRRARAIGPPA

SEQ ID NO: 6578 - protein, 431 aa, Archangium gephyra
  source 1..431: note = Related to QFQP01000022.1
MNWLRRFFAWLFGPKQVTRDVARLPDHSGGRAPDVLKEVVQTGGPVKPNYRRLAVRDARLLPDRSRKGGWTGLAWRAPTSVMTGKESRRLFSNSLRTRNRNLRTLATDEKQLARYGLPLWRTETELAAALNLSIEQLRHFSIHRVRDRVPHYVAFAIPKRSGGERVIHAPKKKLKAVLRNVNDQLVSRLPVHAAAHGFVKGRSVKTNAEPHVGRAVVVKLDLEDFFPTVTWARVRGLLISLGYGYPVAAALASLMTESERQPVTVDGQTFHVPVGDRVCVQGAPTSPGLCNAVTRKMDARLSGLSKKLGFTYSRYADDLTFSGDDAKQIETLLNRATRIIHTEGFVVNGKKTRVMRSGNSQKVAGVTVNETLGLSRKERRKIRAALHQATPEKRAQLEGTLAWVHMLNPEQAAKLKADAVRAPTSPGPTTT

SEQ ID NO: 6579 - protein, 434 aa, unidentified
  source 1..434: note = Related to MWCO01000010.1; note = Deltaproteobacteria bacterium ADurb.Bin207
MTWLIALMVLAGVFVLLRALARKKQNAIHTIEPGLTQDEPTSDSASGGSKSQLEPKTTQSLRKQTIDERLLPKAPSRGPHHPRSRLFDAASARRRFSHSMRCKNRDLSVLAEDPEQLARHGLPLWRNEAQLAEALGLSVGQLRHLSMHRIAERTPHYITFSIPKRSGGNRLIQAPKRKLKAAQKKVLSLLIHKLPVHEAAHGFRQGRSIRTGAEPHVHRRVVIRLDIKDFFPSLTFARIRGYLIAMGYGYEVATTLACLCSEPQRQPVEVGGEIVHVPVGPRVAPQGAPTSPGLLNAICHKLDCRMQGLARAHGFAYTRYADDLTFSGDYPDRVGKILSRARAIIRSEGFEVNPSKTLVMRRGKAQRVTGVTVNETLGLSRQQRRLVRAAIHQASFVSPMDGTSKARLLGKVAYIQMLNQSQAEPLRRQTEKLT

SEQ ID NO: 6580 - protein, 322 aa, Archangium gephyra
  source 1..322: note = Related to NZ_CP011509.1
MGFVDWLKGLFRPKPLMRDVSRLDREGGSLDAVQEEVRPESGPLKPGHLRTVRRDPRLLPKPKPKTPLRGKRKKWMAASESRRLFAGTLRTRNRHISDLLPDEAQLQRLGLPVWRDEGEVAVALGVSVKELRFFSIHREAERAPHYVSFSIPKRNGGRRLIMAPKRRLKALQRKLLPLLVDKLPVSGHAHGFRAGRSIRTGAEPHVGKAVVLKMDLADFFPSVTYVRVRGLLIALGYGYTVAATLAALMTEAERQPVEVNGVRLHVPVGPRACVQGAPTSPGLCNAVVRRLDLRLAGLARKHGFSFTRYADDLCFSGAHWRR

SEQ ID NO: 6581 - protein, 429 aa, unidentified
  source 1..429: note = Related to JAFLEF010000003.1; note = Verrucomicrobia bacterium
MSLWRWIKSWFGAAPTRDISRLDTTRSASSATGDVEERIDISGGPLKEHHRRRALRDPRLLPKIKSPARQLGLTKKKAVMSQTEAKRLFGGTLRTRNRQLRDLLPDEEQLKRLNLPLWRTEDDVAQALGISRRELWFFSIHRERERRPHYVTFSLPKRSGGQRLIQAPKRRLKSIQRRLVSLLVSHLPVSEHAHAFRPGRSIRTGAEPHVGHRLLLKLDLQEFFPSVTFARVRGLLISYGYSYPVATTLAVLMTEAERQPVEVDGEVFFVPVGPRHCVQGAPTSPGLCNALLLRLDRRLAGLARKRQLTYTRYADDLTFSGDLDRAQAESLRALATHLIASEGFTVNSKKTRIMASGARQSVTNVVVNQTLGLSRKERRRWRASAHQLSRRPESERAGLRAQLEGRIAFLHMLNPRQAEALARRLPALQ

SEQ ID NO: 6582 - protein, 424 aa, unidentified
  source 1..424: note = Related to WRPG01000015.1; note = Verrucomicrobia subdivision 3 bacterium
MGLLDFIRSLFGPPKRDISRLSGETVAGEDEVDERVDVSGGLLKEHHRRRALRDPRLLPKRKSVGRQLGLAKRKRVLSAAEAERLFSGTMRTRNRRLRDLLVDPEQLKRLGLPLWKTEEEVAAALGISLRELWFFAIHRERETQPHYVTFAIPKRSGGKRTIMAPKRRLKAIQRKLLGLLVEKLPVSEHAHAFRRGHSVRTGAEPHVGKRMVLKLDLKDFFPSVTMARVRGLLIACGYSYPVATTLAVLMTEAERQLVSVEAEVFHVPVGPRHCVQGAPTSPGLCNALVLRLDRRLAGLARKRGLAYTRYADDLTFSGEFDRAAAQQFRQVASRIISEEGFTVNTAKTRLMGRGARQSVTGVVVNSVLGLSRQRRRQLRAMAHRLKLAQRAGTAEGTELARFAGHMAYLAMLNPRQAARIPVVD

SEQ ID NO: 6583 - protein, 421 aa, unidentified
  source 1..421: note = Related to JAFEGM010000010.1; note = Verrucomicrobia bacterium
MSLLAWLKRLFGREVRRDVAQLERGEVDAVAETVDLTGPPLRPHGQRRAWRDRRLVPKRRSLGRALRLTKRQPLLSRTEADRLFSGSARTRDRQLRDLAPDEEQLRRYGLPVWRTEQELANALELTLGQLRHFAIHRERERQPHYFTFAIPKRSGGERHILAPKRRLKALQRRLLEQLFARLPVGEPAHGFRRGRSVRTAAEPHVGQRRLLQLDLQDFFPSLTFGRVRGLLIGYGYGFPVANALALLVTECVRQPVEIDGEIFHVPVGLRHAVQGAPTSPAIANALVLRLDRRLAGLARRFRCRYTRYADDLTFSGELDAAAAQQLRRLAGHIIRSEGFAVNAAKTRSAGPGARHEVTGVTVNEVLGLSREERRCLRAAAHRLHREPDNAELAARLHGQLAYLHMLNPAQAERLRQRLPTR

SEQ ID NO: 6584 - protein, 428 aa, unidentified
  source 1..428: note = Related to JACSRI010000083.1; note = Opitutaceae bacterium
MSLFDWIRQRLLGGARRRDVSRLESGDDALDSVTELVAVRGGPLKPGHRRLALRDPRLLPKPPRAPVRLGKRKKNPFLATAEASRLFSESLLTRNRGLRDLATDEAQLTRLGLPLWRTESEIATALGLTVGQLRHFSIHRERERTPHYVTFAIPKRGGGERLIMAPKRRLKAIQRTLLAQLVDKLPVTEHAHGFRRGRSIRTGAEPHVGRRVVMHLDLKDFFPSVTFARVRGYLVACGYGYPVATTLALLMTEAARQPVSIEGEIFHVPTGLRHCVQGAPTSPALCNAIAAKLDRRLAGLARKFGVAYTRYADDLTFSGDLDAKITGRLLHHVGAIIQAEGFTINSAKTRILHRGRRQSVTGVTVNKDAGLSRTERRVLRATAHRLTTLRREGAPDAAAERVLAGQLAYLAMLNPAQAAAVRNRQGPV

SEQ ID NO: 6585 - protein, 475 aa, Maioricimonas rarisocia
  source 1..475: note = Related to NZ_CP036275.1
MRVEFFILRIWTRIAAGLSRLPRWAKIPIWIVLAILMVLVLVIGGLLATVFGLIRGILFRIFPPPPSRDVSRLDMDGAELDAIRETIEDEGKPLRESHRRLIYRDPRLLPKPKPPADVWPRPKRKRVMQVEEASRLFSGTLRTKDRNIRDLLADEEQLERHRLPSWQTESDLADALGLTMGQLRHYSIHRESETARHYVQFAIPKRNGRQRIIMAPKTRLKGIQRQLNEQLVQRLPVSPHAHGFRKGRSVRTGAEPHVGRKVLLKMDLKDFFPSVTFGRVRGLLISLGYSYPIATTLAVLMTEAERQPVQLEDRLVHVPVGHRYCVQGAPTSPGLCNAICLRMDRRLAGLARKYGWSYTRYADDLTFSGDDESALCDIRRLARQICRDEGFEVHPEKTRVMRQGRKQTVTGVTVNEVAGLSRKERRRLRAAIHRLKHPSPDRPASMTESQVRGHLAWLHMLNPEQAERLREQWTS

SEQ ID NO: 6586 - protein, 421 aa, unidentified
  source 1..421: note = Related to JACKEU010000003.1; note = Alphaproteobacteria bacterium
MSWWSSLWERLTAWWRGEPTRSVARIGGDADVDQVVETVRLSGTLTEHGRRRVLRDPKLLPKPKTAGWSMGKRPRILTRDEAYRLFGGTLRTRNREIRDLLPDPDQLQRHGLPHLASEVELAALLDVSLTELRFFSIHRVAERQPHHVVFRIPKRGGGFRTITAPKRRLRTVQRRLLARLVDLLPVSDAAHGFRKGRSVATHAAPHVGRKVVVKLDLEDFFHTVTWQRVRGYLIAMGYGYPVATTIAVLVTEAERQPVDLGDRVVHVPVGPRRCVQGAPTSPALCNAIAHKLDRRLLGAARALGFTYTRYADDLTFSGDDATRVSALLGLVRKIVVGEGFRLNDAKTRVMRAGGRQRVTGVTVNQVLGVSRRERRRVRAMIHQHGGDPAWRDRIAGQLGWVGAVNPEQAGTLRARWKRGGG

SEQ ID NO: 6587 - protein, 418 aa, unidentified
  source 1..418: note = Related to DTTU01000358.1; note = Phycisphaerales bacterium
MALFRWIADKLFGPPKRDLSRLENNDVDLVDESVDLSGGPLKPGHHRKSLRDRRLLPKRKASGLSPLKRVKLFSKEQSDRLFSRTMRTSNRNVRDLTEDEDQLHRYGLPLWKSEHDLASALSLSVKELRHFSIHRFQDKVCHYVLFRIAKARGGHRLIMAPKTRLKKIQRELLRQVLEKLPPPPHAHGFVKGRSVKTGASQHVGKKVVVKMDLADFFPSVTFPRVRGLFIALGYSFPVATTLAVLCTECERQRVKQGDDLFHVPVGERHCVQGAPTSPALCNQIARKLDNRLHGLALKLGFTYTRYADDLTFSGDNPEKLKSLLGLTRKIIEDEGFRLHSKKTRILHSGGHQHVTGVTVNQALGLSKKERRRLRAELHQLSLNQQPDPQQIARLKGKLAYLEMLNPEQAARLRAKYPL

SEQ ID NO: 6588 - protein, 452 aa, unidentified
  source 1..452: note = Related to JAGOBA010000003.1; note = Alphaproteobacteria bacterium
MSGFVTFIAVILGVIVYTYLKRANARRKHKRVVEEFKKAPVRDVSTVAGEGDAGLKTETIQIGGPLKPNHKRLALRDDRVLPKPPLGPDYYSKWPRPPRPKYFSERDADRLFGPSLRTSARDVMDLATDEAQLNRYGLPLWRTEAEAAAALGIPHAQFRYFSQHRHREHISHYVAFAIPKRSGGERIIHAPKTKLKAVLRTLDKLLVSKLPVSDHAHGFVRGRSIATNAKPHVGKPMVAKFDIKDCFPTLTVNRVRGLLLALGYSYPVAAALAVLMTEPPRQLVEAEGNIYHTPIGPRVCVQGAPTSPGLCNAILLRLDRRLAGLAKKRGLAYTRYADDMTFSGPEAEIKKLLGIVPKIVSEEGFELNTEKTRLMRQSGRQVVAGVTVNKDMGLSRKARRKLRAAIHHNSQGKLDVTAAARLEGKLGYLHMLNVDQARRLREGRDGTAAQQR

SEQ ID NO: 6589 - protein, 447 aa, unidentified
  source 1..447: note = Related to JABFRX010000136.1; note = Alphaproteobacteria bacterium
MTGILRLLVFIGLFVAVYYGYKAYQRWRHKQTVKEFKKAPVRDVSTVAGEGVASLKTEKINIGGLLKPNHRRLALRDERLLPKPPLGPDYYSKWPRPPKPKYLSENDADRLFSPSLRTSVRDAMDLATDEAQLKRYGLPLWKNEADVANALRISQGQFRYFSQHRHREQTPHYVAFAIPKRNGEERIIHAPKTKLKAVLRALDKQLVSKLPVSEHAHGFVKGRSIATNARPHVGKPMVAKFDIKDCFPTITMGRVRGLLLALGYSYPVAAALAVVMTEARRQPVEAEGKLYHTPTGPRVCVQGAPTSPGLCNAILLRMDRRLAGLAKKRGLAYTRYADDLTFSGPQGEIKKLLGLVPKVAAEEGFAINHDKTRLMRQSGRQAITGVIVNKDMGLSRKVRRKLRAALHHQKLGKADPANTDRLKGKLAYLNMLNPAQAKRLKDVYAPL

SEQ ID NO: 6590 - protein, 452 aa, unidentified
  source 1..452: note = Related to JAFMSC010000026.1; note = Hyphomicrobiaceae bacterium
MPHLTYLQIGVLLLIVGLLLTRGARRWLVLRRWSKAPQRDVSALATTGEAQFKGEAITTAGPLRPGHRRLVLRDKRLLPKPPPDPAILRRWPRPPKPKYLTEQEADRLFSPSLRTSNRNVMDLATDEAQLQRYGLPVWNSEDDVASALSLSLGQLRHLSQHRHRETAPHYITFAIPKRSGGERLIFAPKRRLKAVLRTLDRLLVCKLPKSEHAHGFVRKRSVATNAAPHVGKAVLLHFDIKDCFPTIHFGRVRGLLIALGYSYPVAATLAVLMTEAPRQPVAAEGKLYHVPTGPRVCVQGAPTSPGLCNAILLRLDRRLSGLASKYGFGYTRYADDLAFSGDDATKVARLLKLVPAIVAAEGFAVNPVKTRVMRAGQRQAVTGVIVNKAMGLSRQERRKLRAALHQQGTAGADPGDELRLHGKLAYLFMLNKLQAAALGWRQGMRPTLTNPP

SEQ ID NO: 6591 - protein, 447 aa, unidentified
  source 1..447: note = Related to JAFECH010000062.1; note = Proteobacteria bacterium
MTHLAALVLAYFLVVGIRTAWRNRKRKQAEKKWAQAPQRDVSAVADVGQAEFKQEIIKTSGTLKPNHRRLILRDNRLLPKAPPDPKQRRWPPPPRTKYLTEHEADRLFGPSLRTRNRDVMDLAIDEAQLERYGLPVWKTEDEVAAALSLTPGKLRYFSQHRFRETASHYVTFAIPKRSGGERLIHAPKRQLKAVLRRLNTLLVSKLPVSKHAHGFLQGRSVATNAAPHVGKAVVLHFDIKDCFPSIHYGRVRGLLIALGYSYPVAAALAVLMTESPRQPVVAEGKTYQVPIGPRVCIQGAPTSPGLCNAILLRLDHRLAGLARKHGFAYTRYADDLTFSGNDTKKIAKLLKLVPQIIFEEGFAANTKKTRVMRAGRRQAVTGVVVNKDMGLSRQERRNLRAALHRQNTSPNTNPRERMRLEGKLAYLYMLNRDQASALGWKKPARSV

SEQ ID NO: 6592 - protein, 446 aa, unidentified
  source 1..446: note = Related to JAFMSG010000097.1; note = Bradyrhizobiaceae bacterium
MSSFLFAIAAIAAVIVWQRRKEIVRTLRWKHQPIRNVAALAVTDDASVAEEVITTAGPLKPQHRRLILRDKRLLPKPPLKFDRYVWPRPKQPRVFTKAEAGRLFSATLRTRDRNIRDLATDPEQLARYGLPIWESEADLAAALSISVGQLHHYSIHRERERASHYVCFAVRKRGGGERLIYAPKRRLKELQRRLHDLLVRMLPVSAHAHGFVPGRSIATNAAPHVAKAVVLKFDIKDCFPTIHFGRVRGLLLAYGYSYPLATTLAVLMTEAPRQPFEIGGALYYVPVGPRVCVQGAPTSPGLCNAVMLKLDRRLAGLAKANGFAYTRYADDLTFSGDKEEAVDRLLAWVPRIAEAEGFALNASKTRIMRRGGRQTVTGVIVNKSAGLSRQERRRVRAEIHRLSQSATAPENGATQRLRGKLAYLNMLNPLTTAPLLAAFARLSGRT

SEQ ID NO: 6593 - protein, 428 aa, unidentified
  source 1..428: note = Related to JAAZAJ010000036.1; note = Planctomycetes bacterium
MGLIDWLRALVGKPRQVRRNVSTIAATSGAAPAEQTEEIVQTEPQPMKPLHRRLTFRDARLLPKPKRKSGQFTWPRLKKKRYMQADEACRLFSTALRTRDRSIRDLATDKAQLSRYGLPVWHTEQDIAAALALTPKQLQHYSIHRCRETSPHYVAFAVPKRGGGHRIIHAPKRRLKAIQRKLNELLVEMLPISSYAHGFVKGRSIATNAKSHVGKAVVLKFDLKDCFPSIHFGRVRGLLIALGYGYPVAATLAVLMTEAPRQPVEVDGRLYHVPTGPRVCVQGAPTSPGLCNAVLVRMDRRLGGLARKYGFAYSRYADDLTFSGNDTAAVRPLLGIVPRIVQEEGFTINSGKTQIRRRGRRQRVTGVIVNECAGLSRRERRRLRAAIHNQQRHGAEGKSRRRLGGKLAYLKMLNPTQAGPLIAAFRSA

SEQ ID NO: 6594 - protein, 429 aa, unidentified
  source 1..429: note = Related to QQVE01000048.1; note = Planctomycetes bacterium
MPGGNPVGLLDWLASWFGGRRRYRDVSGLAEADADLTRERVDTGGGPLKPQHLRQAVRDARLLPKPQPTAGMWVPGQKKKVMSQREADRLFSATFRTCNRNLRDLTTDEEQLRRYGLPVWKSEADVARALQISEGQLRHYSIHRQRETSPHYVTFALNKRRGGHRLIHAPKRRLKQLQRTLDALLVKKLPVSTFAHGFRAGRSVASNARQHVGKAIVIKLDLQDCFPSIHFGRVRGLLVALGYSYPVSTTLAVVMTESPRQPVAAEGKIYHVPVGPRVCVQGAPTSPGLCNAVLMRLDRRLAGLAGKHGFTFTRYADDLTFSGDDPAKIKLLLTIAACIVREEGFRLNPQKTRVLRQGARQRVTGVVVNDQPGLSRTERRKLRAAIHRLDPADEAACRRIEGKLAYLQMLNPDQAAPLRSAFVAARGRG

SEQ ID NO: 6595 - protein, 424 aa, unidentified
  source 1..424: note = Related to JAGQOZ010000372.1; note = Planctomycetales bacterium
MGLWNWLKTWLRPHPITRNIANLDGDQAQSVTEVVDTSGGPLKPHHQRLAVRDVRFLPKPQRPSSLPSWSRPAKPVVFSKSDAERFFSASQRTKNRQLRDLASDTDQLQQYGLPEWNSEDEVAAALGLTVSQLRHYSIHRQRETSPHYVMFAVPKRQGGHRIIHAPKRRLKKIQRMLLAELVSKLPVSEFAHGFRRQRSVATNATHHVGKAVVIKLDLADCFPSLHFGRVRGLLIALGYSYVVATTLAIVMTEAIRQSVEAEGKIYYVPVGHRFCVQGAPTSPGLCNAILMRLDRRLAGLAAKHGFQYSRYADDLTFSGDHPAKAPYLVALAGKIIRDEGFRVNRKKTRVLRPSRRQQITGVVVNQHVGLSRTVRRRLRAAIHQLSANDVHARNQIIGKIAYLRMLNPDQAAPLQAALDAKLQN

SEQ ID NO: 6596 - protein, 426 aa, unidentified
  source 1..426: note = Related to WGNR01000010.1; note = unidentified bacterium
MSFLNWLTSLFKPKPPARNISGLAGTDAIEVEEHVDLSGGPLKPKQLRLATQDKRLLPKAKKAIDPRNWVPRKKPKIMPREEADRRFSESLRTSNRKISTLASDVEQLERYGLPIWNSEADIAAALEMSTSQLRHFSIHRQRETSPHYVTFAIRKRTGGHRLIHAPKTRLKRIQRQLNELLVSRLPVSDAAHGFRAQRSVATNAEPHVGKQVVIKLDLADCFPTIHYGRVRGMLISLGYSYEVAAVLSLLCTEAERQPVAADGKTYFVPIGPRVCVQGAPTSPGLCNAVLLRMDRRLAGLAKKFDFQYTRYADDLTLSGDDASKAKVLIRLAKEIVQDEGFRLNSKKTRVVRHGQRQRVAGVVVNDQKGLSRTERRKLRAAIHQLDPADEKSARHLRGKVAYLAMLSEQQAAPLRAALAVKLSGDA

SEQ ID NO: 6597 - protein, 433 aa, unidentified
  source 1..433: note = Related to JAFGFF010000467.1; note = Pirellulales bacterium
MSFLDWLKSLFRPKPATRIVAGLSAADTSADAAKVREVVDTSGGPLKPGHCRRALRDSRLLPKPKPKSQGYVWPRPPKPKYLDRSEADRLFSTTLRCRDRNLRDLLPDPEQLDRYGLPLWQTEADLAEALGISVGMLRHYSLHRIRETTPHYVTFAIPKRSGGERLIHAPKRRLKAIQRRLHELLVSRLPVSAAAHGFRSGRSVATNAHPHINKAVLIKLDLKDCFPSIHFGRVRGLLVALGYGYQVATVLAVLMTEPPRQPVEIDGKLVYVPVGPRSCVQGAPTSPGLCNAVLLRLDRRLAGLARKYGFAYTRYADDLTFSGDDTAKIKLMITLSSKIVREEGFSLNRQKTRVLRRSRRQTVAGVVVNSTVGLSRRDRRRLRAEIHQLSQAAKPPDSHRVQRLAGKLAYLHMLNADQAAPLLVQFARLGDGS

SEQ ID NO: 6598 - protein, 440 aa, unidentified
  source 1..440: note = Related to PSQY01000124.1; note = Proteobacteria bacterium
MPLPAVRPVTGTPPSHSTLPALERARPAQPQTLQPPPTPQLQRAPTPPPQASEPQEAGVEQSQHRRLAVRDERLAQKLVTTQHAVTARRPSKRSFHRDEAARMFSSTLRTQRRGIRDLVTDEQQLVRYGLPIWRTEAELALALQVGLKALRHYTVHRAQDRVLHYVTFAIPKRSGGERLITAPKTRLKALQRRLNALLVSKLPVSEYAHGFRTGHSVLTNAKPHVGKQVVLRLDIHEFFPSIHFGRVRGLFLALGYGYPVATALAVLMTEAPRQPVQIGEVCLYPPCGPRTCPQGAPTSPGLSNALLVRLDRRLAGLAKQRGFSYTRYADDLTFSGDDIAAAHALRLAAARVVREEGFELNVKKTRVARRASRQLVTGVIVNRVLGLSRQTRRRLRAAVHQYLQAHAAGAADPRTLARLDGRIAYLSMLNSEQARRLTMD

SEQ ID NO: 6599 - protein, 419 aa, unidentified
  source 1..419: note = Related to CP036279.1; note = Planctomycetes bacterium Pan216
MGFFSWIWRLLGFAPRRNVSRLDTGDEDVVQEVVDLSGDPFKEHHRRRALRDGRLLPKRRQHTFWGSRKRYLSKEEADRLFSDTMRTCDRKIRDLLPDEEQLARYGLPPWRTEEDLARALGLTLKQLTFYALHRERERFCHYVSYARPKRNGGERIIMAPKRRLKELQRKLVDDLVRHLPVSEHAHGFREGRSVKTNAEPHVRKTVVVKFDLKDFFPSVHVGRVRGYLISLGYGYPVATSMAVLMTEAERQPVEIDGERYFVPVTSRYCVQGAPTSPGICNAILLKLDRRLAGLARSLEFAYTRYADDLTFSGNDVGAVERLRKSVQRIVHDEGFRVNSEKTRVMKRGACQRVTGVVVNDGVGLSRKERRRLRAMAHQLRQSANGEESKAARLRGKIAYLRMLNPTQAGAIERHWSNRG

SEQ ID NO: 6600 - protein, 419 aa, unidentified
  source 1..419: note = Related to JACQGK010000369.1; note = Armatimonadetes bacterium
MSLWDWIKERLFGVPPSRDVSRLEPGSGQRDAVTEAVDTGGGPLKPGHRRRAIRDRRLFPKARTPIGRRPRVMKPHEARRLFSASLLTRNRSIRDLAPDEEQLKRYGLPLWRTEDDLARALELSLGQLRWLSIHRERESCPHYVTFAIPKATGGERLIMAPKRRLRRVQRRLHELLVSRLPVSPQAHGFRPRRSVKTGAEQHLGKPIVLHLDLADFFPTLAWHRVRGLLIAYGYSYPVATVLALLMTEAERQPVEVDGKLFHVPVSPRYCPPGAPTSPGLGNALLLRLDRRLIGLARKFGFAYTRYADDLTFSGEAERKIAYGLVCRVREVVEAEGFSLNDRKTRFMGSGRRQTVTGVVVNRVLGLSRNERRRLRAALHQHRGEPDPQLLGKLAYLWMLNPQQAMALWPADWPRPRRAR

SEQ ID NO: 6601 - protein, 416 aa, unidentified
  source 1..416: note = Related to QWHO01000540.1; note = bacterium CPR1
MSLWKWLSSKLTGKPPRRDVSRLESEDEDQVSEAVDVSGGPLKPDHRRRALRDRRLLPKAQPPVRFGKKKRLMSKAEAQRLFGASMRTRNRTLRDLLPDVEQLTRYGLPVWKTEEELATALGLTQRQLWFFALHREKERAAHYVTFAIPKRGGGERHIMAPKRRLKALQRKLLGLLVEKLPVHEAAHGFRKGRSIKSGAALHVGKKLVLKVDLKDFFPTVTFPRVRGLLIAYGYGYPVATALALLMTESVRQPVEVEGKLYHVPVGPRHSVQGAPTSPGLSNALVLRMDRRLTGLARKFGFVYTRYADDLAFSGDHDHKTGWGLLQRARRIIAEEGFAVHPDKTVLMGSGRRQSVTGVVVNRTLGRSRQQRRRLRAALHRRRQAEARLRGQLAFLWMLNPAQASALWPEEWKKPQS

SEQ ID NO: 6602 - protein, 406 aa, unidentified
  source 1..406: note = Related to JADMJV010000021.1; note = unidentified bacterium
MSWLDWLKQKLLGIPPQRDISRLEGSSEEVREQVDVSGGPLKPKHRRRALRDRRLLPKARAPLGKRPKQMSHSQAQRLFSASQRTRNRQQRDLLCDPEQLQRLGLPGWRNEDDLAHSLGLTLRQLWSYSYYCQAENAPHYVAFAVAKRSGGERIILAPKRRLKALQRKLLDLLAQHLPVSPAAHGFRKGRNTLSNAREHVGQKVVVRFDLQDFFPHCSWQRVRGLLVAYGYSFPVATCLALLMTESERQPVETPAGLVYVPVRQRYCVQGAPTSPALANALTLKLDRRLSGLARKLGFRYTRYADDLTFSSSGLARLGVLKRAVTAIVEAEGFRLNDSKTRVMRQGRRQTVTGVVVNQVAGLSRQQRRQLRAALHQAAGQPDAHLRGMLAYLHGLNSEQARRLQPP

SEQ ID NO: 6603 - protein, 437 aa, unidentified
  source 1..437: note = Related to nan
MRLLILIALGFLFWRLWKLWRQLRLRHQARHPVRDIARLVDDADSDARGDTVERIDMSGGPLKPGHRRRALRDRRLLPKPKRDWSDPKPPKVMSLDAATRLFAGTLRTRDRHARDLDTDAEQLERHGLPPWRSEAEVAAALGIEEKRLRHYAIHRQRERVVHYIAFAIAKRNGGERVILAPKKELKALQRKLNKLLVDKLPVSDAAHGFRPGRSIASNAAPHAGKAVVLKLDLENFFPSLHVGRVRGLLIALGYAYPVAAGLAALMTESERQPVVVDGETFHVPTSSRHAVQGAPTSPGLANALALRLDRRLTGLARAHGFVYTRYADDLAFSSDDVATARQLLKRAESVIRAEGFRVNRAKTRVMTQASAQRIAGVTVNAAPGWSRAQRRKLRAELHRARTSGATDPSLWQKLRGKLAFVRMLNRAQGERMARADS

SEQ ID NO: 6604 - protein, 435 aa, Steroidobacter agaridevorans
  source 1..435: note = Related to NZ_BLJN01000007.1
MRVLLLLFVIYVFWQIFVRFWPKRATRDLSRLENADDDAADEEVLETVAVDGGPLKEHHRRLALRDARLLPKAKPRAHTWPPKPKPKVMSMDEATRLFAGTLRTKNRKLRDLRSDDDQLRRYDLPRWASEEDIANALGISVARMRYYSIHREKERVSHYVSFAIPKRSGGERIIMAPKRELKKLQRDLDRLLVSKLPVSEYAHGFRKGRSIASNASAHVGRKVVVKLDLKDFFPSLHVGRVRGLLIALGYSYPVAATLATLMTEAVRQPVQVGDEIFHTPVGGRHAVQGAPTSPGLANALTIALDRRLAGAARELGFTYTRYADDLTFSGDDAGKARQLIRTCQRIVHAEGFALNDAKTRVMTQRGAQLVTSVTVNREKGLSRRRRRLLRAELHRAQREGGDATLWRKLRGKLAFVSMLNARQADALAKNVRFPG

SEQ ID NO: 6605 - protein, 436 aa, Lujinxingia sediminis
  source 1..436: note = Related to SADD01000012.1
MPRAFRRGGTIFRSPRRFSHTVEEAGPERRRSPRRWLTPCASSTRGASMSLWQRLRDWIQPAPPAAKPPEQVSICEEPAHPSPEFNRRFTTSLRSADPSQTRRRTRSGRLRQRGLPVWRCDDDVAQALGLSLSELYHFACHRLADPHLHYVRFTIPKRGGEERPILAPKPRLKAIQRDLLELALHQLPVHRAAHAFLPGRSIATHARPHLQREFLLTLDLHNFFGALHVGRVRGFLMAMGYGWEVASTLALLCTEAPRQAVLVHGERLYTPTASRSLPQGAPTSPMLANAIVCRLDRRLSGLARSLGLNYTRYADDLTFSGDDPTRIASVMRLTHQIIAEEGFELATAKTRIQRRGQRQQVTGVVVNQTPGAPRARRRRLRAAIHRYAQACSRGEDDPLRRRQLEGELAFIHMLNPAQARALAAGLPDGPPVANAR

SEQ ID NO: 6606 - protein, 387 aa, Lujinxingia vulgaris
  source 1..387: note = Related to NZ_VOSM01000004.1
MNLWQRLRDWMQPAPSPEHPGEISICKEREPPSPGFNRRFTTSMRSARHDELRRRTRSGRLRRLGLPVWRCDDDLARALGLTTSALYHFACHRLADPHFHYVSFTIPKRSGEERPILAPKPRLKAIQRDLLDQALSRLPVHRAAHAFVPGRSIATNARPHLRREFLLTLDLHNFFGALHVGRVRGFLMAMGYGWEVASTLALLCTEAPRQTVLVHGERLYTPTGSRTLPQGAPTSPVLANAIAYRLDRRLSGLARSLGLNYTRYADDLSFSGDDPTRIATLMRLSHQIIREEGFEVAPSKTRIQRRGRRQQVTGVVVNQTPGAPRARRRRLRAAIHHYARACARGDHNPRRRRQLEGELAFIHMINPAQARALAAGLPAAPPAANAR

SEQ ID NO: 6607 - protein, 389 aa, Lujinxingia litoralis
  source 1..389: note = Related to NZ_QHKO01000004.1
MSLWQRLRDWLHTDTQPDSTPTPAPDSAPPSSPPSATHNRRFTASLRTHTPAQSLRRTRSARLKRHGLPLWRNDQALAADLDLSTPELYHFACHRLADPHRHYISFNIPRRSGASRAILAPLPRLKALQRRLLALALHRLPVHDAAHAFVPGRSIATNARPHLGKAFVLSLDLKDFFGSLHLGRVRGYLLAMGYGWEVASTLALLCTEAPRQPVQVQGEVRWAPVGSRTLPQGAPTSPALANAIAYRLDRRLNGLARSLNLTYTRYADDLSFSGDDPQVLGSLLRLTHQIVVEEGFELASHKTRVQRQGQRQQVAGVIVNQVLGRSRQERRRLRAAIHRYARAQARGESHPAWRLELEGRLAFLHMLNPAQARALSSGLPDEPPGASAR

SEQ ID NO: 6608 - protein, 454 aa, unidentified
  source 1..454: note = Related to QWHC01000005.1; note = Chloroflexi bacterium CFX4
MSRRGGKLCRSLLHGSHSSDKRGNRSITEIVAACLLCGWLFAISLPLPHFRKERTAMTNAADVLQAWRLNWQPDEFEWRSLTWENRVDLNREEREQRKRERARRDRLSFGGRLWGVGQAHRSAELDSERLARYGLPAFANERALAEWLGISLKRLRWYSYDRKVSPIYHYTRYTLPKRGGGQRVILAPKRTLKAIQHKILFELLAKVPNTDAAHGFIKGRSIATNAAPHVGKACVLNLDLKDFFPSITYPRVRGLFVALGYGFTIASVLALLCTESERISVQRGDKTRYVAINARHLVQGAPTSPAIANLMARRLDARLHGLAAKQGAAYTRYADDLTFSAESAEVATRLLRAAKRIIADEGLTLHMGKIRFFRQSARQVVTGLVVNDKVSVPRDLRRRVRAILHRAVQTGLAAQNREGRQHFRAYLHGLIGHIALQHPEQAAQMLAKLREIRD

SEQ ID NO: 6609 - protein, 395 aa, unidentified
  source 1..395: note = Related to JABTTZ010000003.1; note = Anaerolineales bacterium
MTSDALRAWRLSYTDEELQWRSADWRSEQSEWRAEREQQRRERRRRDRRYFGVGLNSQNLSRRALNEKKLTAQNLPILKNEKALAEWLNVELSRLRWYTYNQTTSSVYHYVRYVLPKRSGGQRVILAPKTGLKAIQRKILAEILNKIVLTEPAHGFRKGRNIVTNASPHAGKPFVLNLDLKEFFPSITFRRVRGLFTGLGYGYTIASVLALLCTESDREMIQRPDRPYYAGLSPRALVQGAPTSPALANLAARRLDKRLAGLAVKRGVTYTRYADDLTFSGEDRDVLFKLMKTAGHIIAAEGFTVHPKKTRFYQRGQRQIVTGLVVNDKVNTPRQMRRQVRAILHNAAQTGLNAQNRMNHPNFRGYVLGLIAHIGQTAPDLAATFRGQLVALSDS

SEQ ID NO: 6610 - protein, 395 aa, unidentified
  source 1..395: note = Related to JADYYJ010000076.1; note = Anaerolineae bacterium
MSDQSVLRDWRLNWHDDEFKWRPDQSWARRGQWLEERELARRARRRRDRGFFGDELWGTPLFKALHTPAALERFGLPAFENEAALAIWLGIPLTRLRWYTFSRLGSPVWHYVRYVIPKRSGGERVILAPKRELKGLQRKVLREILEKLPLSEPSHGFRKTRSIVTNAVPHTGKKYVLNLDLKDFFPSITFRRVRGLFVSLGYSFAVGTTLALLCTESDRAVMQRPDQRYYVSLNPRHIIQGAPTSPYLANLIARDLDLRLNGLARKHQVDYTRYADDLTFSGDDLDAILRILSVAKVIIKEEGFVLNPKKTRLYRRSGRQSVTGLVVNEKVNTPREMRRLVRAILHNAQKGGLNSQNQAKRPNFRAYVQGLIGHIGQSDPNRAAALLRQLAAIPD

SEQ ID NO: 6611 - protein, 375 aa, unidentified
  source 1..375: note = Related to NBMH01000138.1; note = Anaerolineaceae bacterium 4572_78
MSTFSSFIKNIKKGFTGKNKKPEKEIQSPKIAVALSSDVSKVPQKLDDVSLPVLRGKYALAKWLGISASRLTWFTYETKYNSVWHYVRHIIPKRNGGERVILAPKRELKALQRRVLDGILNQVPTSPQAHGFVMQRSITTNARPHVNKAVVINLDLKNFFPSVTLPRVLGIFRTLGYNKEVALALARLCTECDREVGPHLDSKYKDKEFFVSVTPRHLVQGAPTSPALSNLVCWKLDKRLNGLAQTYQFTYTRYADDLTFSGDDIQYVELILKVANGIVRDEGFKVNKDKTHVFYPSSRQVVTGLVVNDKVATPRQLRRQMRAIIHNAQFTGLEAQNYEQHPNFRYHLLGVAEFIGSTHPDKAEQMKQIIHALPS

SEQ ID NO: 6612 - protein, 377 aa, unidentified
  source 1..377: note = Related to JACCSL010001044.1; note = Ardenticatenales bacterium
MIDWYQQWRGEVEQRRQERERRRLERPLQDRRYFGEETWGASAEHLKAETDEPCLQHLYLPLLRSEKELAAWLGIPLTRLRWFTRDQPADTVWHYVAHSVPKRSGGQRLILAPKRDLKALQRHVLHHLLNHVSVTEMAHGFVAGRSIISNAQPHVGKEIVLNFDLADFFPSITFPRVRGLFLSLGYSFSVASVLALLCTEHEREAFDHDGTRYFISVGPRHLVQGAPTSPTLANLAAARLDRRLAGLGRVQGFAYTRYADDLTFSGDEVAGAYWLLKSVPPIVREEGFVIHEGKTRLFRQSARQVVTGLVVNEQLGTPRELRRRVRAILHKAHQTGLEAQNHDGHADFRAYLQGLIGFIHEANPAQAAPLRAALAAL

SEQ ID NO: 6613 - protein, 460 aa, unidentified
  source 1..460: note = Related to JACDGC010000016.1; note = Ktedonobacterales bacterium
MANFFRRLFRRNALKSDIVADAPPVTPTIVPTPPEALVMPTAALPLQTPIQVEQVAQAAGAVAYVILPSASAEPTPTPVAVPDATPLPTVTVNGVAYAQDDLDERALRDRATFGDELWGIANGKEANTTDAEKLARLGLPLLLSEQDVADLLGIPLNRLRWFTFDRAADTTWHYVRRVVPKRSGGERVILAPKQELKALQRKVLSDIVGRAPVALAAHGFVPGKSTITNARQHVGKAVVLKLDLQDFFPSITFARVRGLLIALGYAYAVASTLALLCTEYDREEYTRDGTRYFISVGPRHLVQGAPTSPTLANLVSWQLDRRLTGLAGAFDFTYTRYADDLVFSGDNPDVVQKLRFLTERIIRDEHFTVNRKKTRVARQSARQIVTGLVVNEAVATPRDLRRTLRAILHHAEKEGLAQQNREGRKDYPAYLQGMIAYVNAASPRHAAVLRTQLGKLRGQA

SEQ ID NO: 6614 - protein, 420 aa, unidentified
  source 1..420: note = Related to PSQZ01000251.1; note = Chloroflexi bacterium
MEAATAADDIDEVLEGEGQDEDEDGADWFQVSKHGFEVSEDDDDDITLQGPAYSGHTGQRAPQHTADRAYFGEETWGVSARQRSAEIQPAQLARYQLPVLRSEVDLATWLGIPLSRLRWYTHDRPAERTWHYVRYAVPKRSGQGERVILAPRRELKALQRKVLKGIVAKVPVAATTHGFVAGRSTLSNASEHAGKGVVLKLDLKDFFPSVTFRRVRGLFTALGYSYAVASVLALLCTEYDRQPFERSGEQYYISVGPRHLVQGAPTSPGLANLVAWRLDRRLAGLASKRGFVYTRYADDLTFSGEDAEAAARLGAAAARIIADEQFTVNAGKTRLLRRGGRQTVTGLVVNASPATPRELRRRLRAILHNAARDGLDAQNREDRGHYAAYLGGLIAYVGSANPSHGDVLRRQFRRLVTPRE

SEQ ID NO: 6615 - protein, 511 aa, Archangium gephyra
  source 1..511: note = Related to CP011509.1
MQYEVRLAGYPDLVCLCRAGGGGSRSTGFAVSRSECTFMNLASLLLELKPLLADPEANFDRITELLDRHQGLAEYEVARFYVRRVWQAPVESRLRSMDARERLKGIRQLPLLFSSATAARLLRQRVKDPDTRVAQAARASVRRLGLADVSLPDRRVKPGRSAGSIGRWNPTGWNFGLFGNELYGFSRKAKRPPPRVGELPELRTRADVAELVGVEENALDALMRPGTESGSGYVEFEVPKRTGGVRRISAPRQKLKEVQRALLDKVLARMTPHPAAHGFIEGRSTVSNAEPHVGATAVVRVDIEDFFPTVHYRRVKGLFLAYGYGDEVAGVLAGLTTHRTKLPDGTVAWPGVLPQGAPTSPAIANLVCRRMDARLTALAKKFSAIYTRYADDLSFSFREPPERLGRFFWWLNAILQQEGFAENGKKRRVMRQGSRQRVTGLTVNQKVSIPREERRRFKAILANCRHHGVAAQARGRPDFERWLEGYAAYVRMVHPELGARWQREVKELLAR

SEQ ID NO: 6616 - protein, 475 aa, Archangium violaceum
  source 1..475: note = Related to NZ_CP069396.1
MNLASLLLELKPLLADPDANFDRITDLLERHQGLAEYEVARFYVSRSWKEPVESRLRSVDPRERSKGVRQLPLMFSGTVAARHLRSRVKDADSRVASAARAAVRKLGLADVAPPDSRVAPSRHHGRRSVGGWNPTGWYFGLFRYETQGWSGSMKRPPPTSGELPRLSTRADVAKLVGVDESELDALMRPGTEAGSGYVEFEVPKRSGGVRRISAPRQKLKEVQRALLDQVLARMTPHPAAHGFIEGRSTVSNAGPHVGSTVVLRVDLEDFFPTVHYRRVKGLFQVHGYGEEVAGVLAGLTTHRPKLPDGTVVWPGALPQGAPTSPAIANLVCRRMDARLTALATKFGATYTRYADDLSFSFRAPPERLGRFFWWINAILQQEGFTENGPKRRVMRQGSRQRVTGLTVNQKVSIPREERRRFKAILANCRRHGVASQARGRPDFERWLEGYAAYVRMVHPELGARWQREVKELLGR

SEQ ID NO: 6617 - protein, 473 aa, Hyalangium minutum
  source 1..473: note = Related to NZ_JMCB01000009.1
MGMDLVGLLLELKPLMADPEANFKRITALLEQHQNLAEYEVARFYVSRQWLAPVGRMLRSVDPRERHQGTQQIPLLFARATASAQLRRLVKDPDKQVAGAARAAVHKLGLADVAPPDRRFKPPRHPTPQSRGGWNPTGWNFGLPMRWGGRPKKQPPLKGKLPKLSTRKDVAELVGVQEEELAALMRPGTEAGSGYVEFEVPKRSGGVRRISAPRAKLKEVQRAILEKILEQMPTHDAAHGFVKGRSTVSNAEPHTGATVVVRVDLEDFFPTVHYRRVKGLFQAHGYGDEVARTLAGLSTHRPKLPDGTVVWPGALPQGAPTSPAIANLVCRRMDARLTALAKKAGATYTRYADDLSFSFEKPPEKLGRFLWWVNAILQQEGFLENAPKRRVMRKNSRQRVTGLTVNEQVSIPREERRRFKAILNNCRKHGVESQSRGRKDFSGWLRGYAAYVKMVHPELGERWQREVKELLGE

SEQ ID NO: 6618 - protein, 471 aa, Cystobacter gracilis
  source 1..471: note = Related to NZ_JAHXBG010000028.1
MDLVGLLLELKPLMADPEANFERITELLEQHQGLAEYEVARFYVSRHWLEPVGRMLRSVDPRERLQGTKQVPLIFSRGTASGQLRRLVKDPDERVSRAARAAVHKLGLADVAPPDRRFKPPRTPRPMALGGWNPTGWNFGIRTGRWASPKKAPPLKGKLPKLASRQDVAKLVGLEEKELDALMRPGTEAGSGYVEFEIAKRSGGVRRISAPRARLKQVQRTILEQILSHMPTHEAAHGFVKGRSTVSNAAPHTGATVVVRVDLEDFFPTVHYRRVKGLFQSHGYGDEVASTLAGLTTHRPKLADGTVVWPGALPQGAPTSPAIANLVCRRMDARLTALAKKYGATYTRYADDLSFSFQAPPEKMGRFMWWVNAILQQEGFAENNPKRRVMRRAHRQRVTGLTVNQQVSIPREDRRRFKAILANCRKHGVASQARGRKDFESWLRGYAAYVRMVHPELGARWQQEVKELLGG

SEQ ID NO: 6619 - protein, 480 aa, Polyangium spumosum
  source 1..480: note = Related to NZ_WJIE01000006.1
MSLVGLLLELRPLLADPDANFDRVSELLERHQGLAEYEVARFYAGRAFVGPVGRLLGSEDPRERLRGVRLVPLLFARANAAQHLRRMVKDADNAVAHAARAAVRTLGLADVSPPDRRAPAPRFPSPTARGGWNPTGWTFGLFRNHYVFRRGAAATTNAPLTAPPKADVPELKSRNDVAKLVGVKASALPSLMRPGTGKGSGYVEFEIPKRTGGLRKISAPRVRLKNVQRAILREVLEKLPTHPAAHGFVEERSTVTNATPHVGASVVVRVDIEDFFPTVHYRRVLGFFMRYYDEKVAAALAGLTTHRSKLPDGTVVWPGALPQGAPTSPALANLVCRRLDARLDALARKSGATYTRYADDLTFSFRDPPARLGRFLWWVNGILQQEGFAENVKKRRIMRKGGRQRVTGLVVAEKPAIPREDRRRFKAILANCRRHGVESQARGKPDFPAWLRGYAAYVRMVHPELGAKWQREVEEILLKK

SEQ ID NO: 6620 - protein, 474 aa, unidentified
  source 1..474: note = Related to JADJXL010000015.1; note = Polyangiaceae bacterium
MSLVGLLFELKPLLEDRERNFDRIVELLEKHRNLAEYEVARFYVSRNWLDPISKRLASIDPRERLRGVRLIPLLFARATAAQHLRRMVKDADMAVASAARAAVHSLGIADVAPPDRRAPPPRYPGPSALGGWNPSGWTFGLHRDHWAFRANRAKAKTPPKADVPPLKTPKDLAALLGVKVTALRSLSRPGTGPGSGYVEFEIPKRTGGVRRISAPRMPLKRVQRTILDQILAKLPAHPAAHGFVEERSTVSNASPHVGAAIVVRVDIENFFPTVHYRRVFGFFFQHYGEEVAKALSQLTTHRPKLPDGTVVWPGALPQGAPTSPAIANLVCRRLDARLAALAKKASANYTRYADDLTFSFRDPPDRLGRFLWWVNAILQQEGFTENVKKRRIMRKGNRMAVTGLVVNDKVGIPREDRRRFKAILNNCRHHGVESQARGKPDFAAWLRGYAAYARMVHPKLGEKWQREVEELLAK

SEQ ID NO: 6621 - protein, 468 aa, Polyangium sp.
  source 1..468: note = Related to NZ_CP079217.1
MSLVSLLFELRPLLADPEANFERIVLLLERNQDLAEYEVARFYASRTWLGPLGRMMESIDPRERLRAVRLVPLLFARAPAAGHLRRLVKDADSRVVNAARAAVRKLGIADVAPPDSRFTAPRWPRATAVGGWNPTGWSFGLYRSGSEKSPPPATDLPALRSRADVARLVGVDEARLVALMRPGSGPGSGYVEFEIPKRSGGKRLISAPRAELKAVQRAILDKVLSKIPAHPAAHGFVEGRSTVSNAAPHVGTQRVVRVDIESFFPTVHYRRVKGLFEAYGYDEVVAATLAGLTTHRAKLPDGAVVWPGALPQGAPTSPAIANIVCRRLDGRLSALARKVGATYTRYADDLSFSFREPPARVGRFLWWVNAILQQEGFLENLPKRRVMRKGGKLRVTGLSVDEKVSIPREERRRFKAILANCRHHGVASQARGRPDFPRWLAGYAAYVRMVHPELGEKWQREVAELLAR

SEQ ID NO: 6622 - protein, 472 aa, Citreicoccus inhibens
  source 1..472: note = Related to NZ_JAHNZT010000024.1
MNLVGLLLELKPLMMDPEASFDRIVELLEHNQGLAEYEVARFYVARAWKDAIESRVRSPDARERLRAARLIPLLLDRTSAARLLRRLVKDPDTRVSASARAAVRKLGLADVSPPDSREEPPSHPHPWAIGGWNPTGWSYGLFPETSKAVRKRPPPVTEALPPLRTREDVAKLLGLGTADLDALMRPGAESGSSYVEFEVPKRSGGVRRLSAPRPKLKAAQRALLEQVLARMPSHPAAHGFVPGRSTVTNAQPHVGATVVVRVDLEDFFPSVHFRRVKGLFEAHGYGEEVATALAGLTTYRAKLPDGTVAWPGVLPQGAPTSPAIANLVCRRMDARLAALAAKVGATYTRYADDLSFSFRQPPERLGRFFWWVNAILQQEGFAENGPKRRVMRQGGRQRVTGLTVNERVSIPRDERRRFKAILANCRKHGVDSQARGRPDFRRWLEGYAAYVRMVHPELGETWQREVKELLAT

SEQ ID NO: 6623 - protein, 472 aa, Myxococcus eversor
  source 1..472: note = Related to NZ_JAAIXY010000002.1
MDLVSLLLELKPLMEDPEAHFSRITELLERHQGLAEYEVARFYVSRHWSEVVTKRLGSVDPRERIQAVRLIPLLFPRVTAAGHLRRRVKDADSRVASAARAAVRKLGLADVSLPDSREEPPRRPSPHALGGWNPTGWHFGLYPRRREDLVKRKPSVTAKLPKLQSRDDVAKLVGVDVAELDALMRPGSGAGSGYVEFETPKRSGGMRRICAPRAKLKAAQRNLLEGLLTHLPTHPAVHGFVPGRSTVTNAEVHVGAHVVVRVDLEDFFPTVHYRRVKGFFEAHGYNDEVSSTLAGLTTWRPKLPDGTVVWPGVLPQGAPTSPAIANLVCRRMDARLHALAKKAGASYTRYADDLSFSFVKPPERLGRFLWWVNAILQQEGFSENAAKRRVMRQGGRQRVTGLTVNQRVSIPREERRRFKAILANCRKHGVESQARGRPNFPAWLEGYAAYVRMVHPELGTRWQREVKELLNP

SEQ ID NO: 6624 - protein, 472 aa, Myxococcus stipitatus
  source 1..472: note = Related to NC_020126.1
MDLVSLLLELKPLMEDPEANFQRITELLERHQGLAEYEVARFYVSRHWSETVSRRLGSVDPRERLEAVRLIPLLFPRVSAAGQLRRRVKDPDSRVGSCARAAVKKMGLADVSLPDSRIAPPRRPSPRAQGGWNPTGWNFGLFPGLRATPVKRKPADTPVLPELRTREDVAKLVGVEPSELEALMRPGSGPGAGYVEFETPKRSGGVRRICAPRARLKAAQRALLEGLLARMPTHEAVHGFVSGRSPVTNARAHVGNQVVVRVDVEDFFPSVHYRRVKGLFESHGYNEEVASTLAGLTTWRPRLPDGTVVWPGVLPQGAPTSPAIANLVCRRLDARLHALAKKAGGQYTRYADDLSFSFAKPPERMGRFLWWVNAILQQEGFAENSAKRRVMRQGGRQRVTGLTVNQQVAIPRDDRRRFKAILANCRKHGVESQARGRADFPAWLEGYAAYVRMVHPELGERWQREVKELLGR

SEQ ID NO: 6625 - protein, 348 aa, Pyxidicoccus fallax
  source 1..348: note = Related to JABBJJ010000521.1
SHPHAMGGWNPTGWNFGLSPGMGGRVKRKPPSTGPLPVLHTREDVAKLVGVDAAELDALMRPGSESGSGYVEFEAPKRSGGVRRLCAPRAKLKAVQRAILDGILAHLPTHPAVHGFVAGRSTVTNAEPHVGSTVVVRVDVEDFFPTVHYRRVKGLFEAHGYGDEVSSVLAGLTTWRARLKDGTVAWPGVLPQGAPTSPAIANLVCRRMDARLTALAKRAGAKYTRYADDLTFSFREPPERLGRFLWWVNSILQQEGFAENAAKRRVMRQGGRQRVTGLTVNQQVSIPREERRRFKAILANCRQHGVESQARGRADFAEWLQGYAAYVRMVHPELGERWQREVKELLAR

SEQ ID NO: 6626 - protein, 471 aa, Pyxidicoccus trucidator
  source 1..471: note = Related to NZ_JAAIXZ010000001.1
MDLVGLLLELKPLLASPEENFDRIVALLERHQGLAEYEVARFYVSRSWLEPVARRLKSVDPRERLQAVRLIPLLFARASAAGQLRRRVKDPDSRVSSHARASVRRLGLADVSLPDTRADPPRFPSATAVGGWNPTGWSFGLYPSMRAPVKRKPAATTALPVLKTRAEVAKLVGVPVSELDALMRPGSEAGSGYVEFDVPKRSGGVRRLCAPRAKLKAVQRAILDNVLAHLPTHPAVHGFVPGRSTVTNAKPHVGSTVVVRVDLEDFFPTVHYRRVKGLFEAHGYGDEVSSTLAGLTTWRPRLPDGTVAWPGVLPQGAPTSPAIANLVCRRMDARLTALAKKADATYTRYADDLSFSFQKPPERLGRFLWWVNAILQQEGFSENAAKRHVMRQGGRQRVTGLTVNEQVSIPREERRRFKAILANCRQHGVESQARGRPDFANWLQGYAAYVRMVHPELGERWQREVKELLAR

SEQ ID NO: 6627 - protein, 471 aa, Myxococcus stipitatus
  source 1..471: note = Related to JAKCFI010000010.1
MDLAGLLLELQPLMAEPETHFERIVGLLEQHQGLAEYEVARFYVSRHWMDSASKRLGSADPRERLRAVRLIPLLFPRAIAAGQLRRRVKDADSRVAAAARAAVRKLGLADISPPDSRIEPPRHPGPRSLGGWNPTGWNFGLFPADGERVKRKPEVATRLPELRDRADVARLVGLDERELAALMRPGSEPGSSYVEFDVPKRSGGVRRLCAPRARLKAAQRALLDNLLTHLPTHPAAHGFVPERSTVTNAQPHTGANVVVRVDVEDFFPSVHYRRVKGLFEAYGYGAQVASTLAGLTTWRAKLPDGTVAWPGVLPQGAPTSPAIANLVCRRLDARLDALAKKAGARYTRYADDLTFSFPQPPERLGRFLWWVNAILQQEGFSENAPKRRVMRGGGRQRVTGLTVNQRVAIPREERRRFKAILANCRKHGVESQARGRPDFPAWLEGYAAYVRMVHPELGARWQREVKELLGR

SEQ ID NO: 6628 - protein, 467 aa, unidentified
  source 1..467: note = Related to JAACJQ010000343.1; note = Archangiaceae bacterium
MALAELLLDLKELLQKPDENADAIVKLLEQHADLAEFEVARAVAGRAVEVGVERRLKNVDPKERLAAVRSLSGLFPRAPAARLLRKMVKDPSRSVSAAARAGVRRLKLADVALPDSRWTPDRESPLVPGGWNPSGWWAGLFGRSSKPPPKVSLPKLSSRADVAKLVGVTEEELTAFMRPGSASGSGYVEFDVPKRSGGTRRIAAPRAKLRTAQRALLDQVLSKIPLHGAAHGFAIDRSVVTNAQLHVGASIVVKVDLEEFFPSVHYRRVRGLFEAYGYNTEVASTLAGLTTWRAKLPDGRVAWPGCLPQGAPTSPAIANIVCRRLDARLTALCARFGATYTRYADDLAFSFQKQPERLGRFLWWVNSICQQEGFSENDGKRRVMRSGGRRMVTGLVVNQKVSIPREDRRRFKAILHNVKKHGLESQARGREDFKSWLEGYASWVRMVHPELGAKWQREVKALTRGQG

SEQ ID NO: 6629 - protein, 473 aa, unidentified
  source 1..473: note = Related to JAEUKG010000407.1; note = Myxococcales bacterium
MGLGELLVDLSRLLADPAKNAASIYAMLEANAGLAEFEVARFYVADAMTADVAERLKSVDPRERVAAVDLVRLVCPRTSAAKLLRSVIKDPDPTVRKRARATVRRMMITDVALKDPRFKPSPWARGPFAPGAYNPSGWSFGVYGRKQTGSADRGALGAKGLPLLEGADDVARLVGLADGKALRRFMRPGSASGSGYVEFDVPKATGGARRIAAPRAPLRRAQRVILDQILAKVPAHDAAHGFVRGRSTVTNAEPHVGRAIVMKLDLVDFFPSVHYRRVVGLFEQLGYPTEAASALAGLCTWRPKLGDGAVAWPGVLPQGAPTSPAITNLVCRRLDARLSALAKKMGGVYTRYADDLTFSFPAEPERIGRFLWWVDQIALQEGFVENTKKRRVLRRSAQQRVTGVVVNEHPAIPRKDRRRIKAVLANVKKNGLAAEARGNPDFEAWLHGWVAYATMVQPALGARFAAALAGVAP

SEQ ID NO: 6630 - protein, 483 aa, unidentified
  source 1..483: note = Related to JACCYD010000544.1; note = Deltaproteobacteria bacterium
MHTLVDLLIELKTLATATGDANQLARINELFSNPRAPAEFQVGRHFVARLLVPQAEAAMASFDPADRLSAIETCRTVFPRSIAARLLRRVIKDPDPKVRSSAKRAASALRLDDVAPPDIRYRVERDSPLGRHNPTGWAFGIFPTDDHPQRKTKQATRQTALDAHQLPKLANVAAVAQLVGIDPDALVRMMRPGTEAGSGYVEFEIPKAKGGTRRIAAPRTPLRKVQRKILDDILAKLPLHDACHGFVVDRSTVTNATPHARAALVIKIDLKDFFPTVHYRRVKGLFQHLGYNEEVSATLAGLTTYRPKLPNGHVVWPGVLPQGAPTSPALANLVSRRLDQRLSKLAEKYGASYTRYADDLTFSFKTQPELRIGRFLWWVDGICQQEGFSERADKRRILRAKHQQRVTGLVVNQKVNVPREDRRRFRAILHNCAKHGLESQAGSLPPGADFKAYLAGYAAYVHMVDPKLGKQYLAQVAALIGKD

SEQ ID NO: 6631 - protein, 484 aa, unidentified
  source 1..484: note = Related to JACCTC010000082.1; note = Deltaproteobacteria bacterium
MQTLVELLLELKTLAAEPDGPGKLERINAMFANPRAPAELQVGRHYVSRLLVPGVAAQLASLDPAHRHIAITTARLVFPRATAARFLRRLVKDPDLTVRVAARRAVSKLGLHDVAPPDVRYQITSDSAIGGHNPTGWAFGIFPTDDGPRRKPKPATRATALAQHGLPALATRADVAALVGVDPQGLAKLMRPGVGPGSGYVEFEIAKAKGGTRRIAAPRGPLRKVQRVLLDRILAKVPLHDACHGFVPGRSTVTNAGPHQRAAIVVKLDLKDFFPTLHYRRVKGLFQHLGYNDDVAGTLAGLTTYRPKLESGLVVWPGMLPQGAPTSPALANLACRRLDHRLERLAAKYGARYTRYADDLTFSFATMPEVRIGRFLWWVDGICQQEGFTERDDKRRILRAKHQQRVTGLVVNERVNIPREDRRRFRAILHNCAKHGVASQTREHEDFPAYLAGYAAYVHMVDPVLGRRYLDEVARLLAQEPRRG

SEQ ID NO: 6632 - protein, 481 aa, unidentified
  source 1..481: note = Related to JACCSS010001187.1; note = Deltaproteobacteria bacterium
MIGTLVELLVELKTLVASSDKNKLDKVNKLFSNPKAPAEYQVGRHFVASKLEKDVEVQISDLDPRQRKAAVQTVMLAFPRSSAAKLLRRVAKDPDMTVRSAARHTIKTLALNDVAPPDIRYAPDMGVIGHGNPTGWAFGIFAHDWRSDRKPKKPSKVTALDAHKLPKLKSVADVAALVGIELDDLPALMRPGVGPGSGYVEFEIPKAKGGTRRIAAPRAPLRKVQRAILDQIVGKVPVHEACHGFVKTRSTVTNAAPHQGSAIVVKLDLKDFFPTVHYRRVRGLFEFLGYNAEVANVLAGLTTYRPKLDDGTILWPGVLPQGAPTSPAIANLACRRLDHRLDRLAAKYDATYTRYADDLTFSFKTSDLKLGRFLWWVDGICQQEGFNERPDKRRVLRSKHQQRVTGIVVNAGVHVPRVDKRQFRAMLHNCKKHGLESQARGKEDFEAYLRGYAAYVNMVDPPLGKKFIAQVEAVLGGTPGG

SEQ ID NO: 6633 - protein, 482 aa, unidentified
  source 1..482: note = Related to JAHBVW010000051.1; note = Deltaproteobacteria bacterium
MQTLVELLIELKSLADAPHDDGKLDRINKLFANPRAPAEYQVGRHYVSKLLAPSVEANLDSIDPAQRLAGIGTATAVFSRNVAARFLRRVVKDPDGRVRAAAAKAVKHLGLTDVAPPDVRYKIDPDSELGGHNPTGWAFGIHPNDKSRQRKPKKPSRVNALKELDLPRLAGVADVAKLVGVAEGELASLMRPGCGPGSGYVEFEIPKAKGGARRIAAPRTPLRKVQRAILDKVLAKIPLHEACHGFVPGRSTVTNARPHQGAAIVIKLDLKDFFPTVHYRRVRGLFESLGYNEKVASTLAGLTTYRPKIGDKTVVWPGVLPQGAPTSPALANLACRRLDKRLEMLAAKYEATYTRYADDLTFSFKKVPDFRIGRFLWWVDGICQQEGFTERAEKRRILRSKHQQRVTGLVVNKKVKVPRADRRRFRAILHNCAKHGLESQARGHADFPAYLAGYAAYVNMVDPALGRRLLDEVARLLGESRG

SEQ ID NO: 6634 - protein, 510 aa, unidentified
  source 1..510: note = Related to JADJJK010000006.1; note = Myxococcales bacterium
MTQAATSVLSPIELILTLRTLLADRASNATLIGELLERHQDMAEYQIARFYVARHLIPQVEALLSELDPRQRLAGIELVRFGFPRTLAGKLLRRVVKDPDIAVRKRARSTVKRLGLDDVAPPDTRYDARRSSLGRGNPAGWAFGLFRNHARSDWGRRPRPATRVAALGAQGLPPLASSSDLCKLLGVEASALVRFMRPGTQTGSAYVEFEIPKAKGGTRRIAAPRGPLRRVQRVLLDQILSKVPQHEAAHGFIAGRSTVSNARPHQGAALVVKTDLKDFFPSVHYRRVVGIFTMLGYGEPMARALAALTTYRPQLPADEPPPSDAAPSPSDAARPPEPARGRVLWPGVLPQGAPTSPALANLACRRLDVRLTRLAARYGATYTRYADDLTFSFPQPPQFAIGRFLWWVDGICQQEGFLEHPAKRKLLRKKTQQRVTGLVTNQEVHVPRADRRRFRALLHNCKKHGVASQAKGRDDFAAYLAGYAAYVQMVQPELGKAWAAEVARLLGESA

SEQ ID NO: 6635 - protein, 479 aa, unidentified
  source 1..479: note = Related to JADKKI010000021.1; note = Myxococcales bacterium
MNPVELILELRGLLADAQANGAKIRELIESHQDMAEYQIARFYAARHLVPQVEALISEIDPKQRLAGVELIRFGFPRTLAGKLLRRVVKDPDIEVRKRARSTVKHLGLEEIALPDTRYDGARSIRGKFNTTGWAFGLFAEHARRAWNRVPKKATQIAALGAQGLPVLASIADVQALLGVDAAGLARLMRPGTESGSAYVEFEIPKAKGGTRRIAAPRGPLRRAQRALLDQILAKVPQHPAAHGFVAGRSTVTNARPHVGAALVVKTDLKDFFPTVHYRRVIGLFELLGYNEAVAGVLAALTTYRPKLPDGRVVWPGVLPQGAPTSPALANLACRRLDARLTKLAAKYGAVYTRYADDLTFSFSESPKIAIGRFLWWVDGICQQEGFVEHPGKRKLLRAKTQQRITGLVINRAVHVPRADRRRFRALLHNCAKHGVASQAKGRENFAAYLAGYAAYVQMVQPELGKAWAAQVAKLLGEAP

SEQ ID NO: 6636 - protein, 489 aa, unidentified
  source 1..489: note = Related to JAEUJZ010000173.1; note = Myxococcales bacterium
MSLAALLVQLKPLLAAPQENLAAITELLRRHRDLAEYEVARFWVSRFLGPQLEKELRSPDPRVRRRGAEAVRYICTRKTAGHLLRPLIKEADTSVAVRARASMRVLKLDDVALPDSRYPAPKRGRGQLGGWNVTGWCFGLYPHMHRWWRRRGKPEEPTKKTLLEKHKLPKLTSESELRAWLGIQRKKDLLRLLRPGCGTGAPYVEFTIPKASGGSRTISAPRLPLKKLQRRILDEILAKLPVHAASHGFVRGRSVVSNAKPHLGAALVLKMDLRDFFPTIHFRRVVGLFQGIGYAADVAQILAGLCTHRGKLADGYVLWPGVLPQGAPTSPAIANLLCRRLDARLSGLAKQAGGVYTRYADDLTFSFSAVPDKGIGRFAWWVDQICQQEGFVENSAKRRVLQRHNQQRITGIVVNSALHIPRSARHTFRALLHNVRLDGLAAHARGRKDFRAYLLGFASYVRMVQPTLGRALLSDVRAVLKADRSAQKS

SEQ ID NO: 6637 - protein, 488 aa, Haliangium sp.
  source 1..488: note = Related to MTCS02000024.1
MSLSALLLQLKPLLAAPRENLAAISDLLRRHRDLAEYEVARFWVSRAMGPQLEQELRSPDPRTRRKAAEAVRYACTRRSAGRLLRPLVKEADTGVAVRARTAMHALRLDDVALPDTRYPKPKHAGGFGGYNVTGWCFGLFPHMHRWWRKKANPNQAAKQTLLEKHGLPVLASEAELLSWLGLKRRKDLLRLLRPGCGTGAPYVEFSIPKASGGTRTISAPRASLKKIQRRILDEILAKLPTHAASHGFVRGRSVLSNAKPHVGASLVLKMDLRDFFPTIHFRRVCGLFCRIGYSSEVASLLAGLCTHRGKLADGYVVWPGVLPQGAPTSPAIANLLCRRLDARLTGLARGLGGNYTRYADDLTFSFKAVPERGIGRFSWWVDQVCQQEGFVENTGKRRVLRPQNQQRITGIVVNSGLNIPRAARHTFRALLHNVKHDGLAAQARGRKDLRAYLLGFASYVRMVQPKVGKPLLAEVRAVLKAAGQADKK

SEQ ID NO: 6638 - protein, 481 aa, unidentified
  source 1..481: note = Related to JAEUKH010000021.1; note = Myxococcales bacterium
MNLVNLLVTLRDALVDFEANRQKILTLLKTHQGLSEFEVARYFVAAEAAPRVHKYLASRDPRERRIGVECARFLLPPNDAAAVLRRALVDPDTSTRDRADRLLAQLERQEAPLRARRSTPEAELVDAWGPTGWRFGRLLRNPPARKKAKLAPVPRAVSAVLKSEETFLKAIEVDSVSALQPLYRAGDGPGAPYVRFEIAKRGGGVRAILAPRKALKGVQRALYEKVLSKLATHDAAHGFVPGRSVVTNARPHQGAVTILKVDLADYFPTLHYRRVQGYFARVLKANAKVATLIAGLTTHRDRLADGYVTRPGVMPQGAPTSPALANLVSRRLDERLDGLAKKVGLRYTRYADDLTFSWHEAPPTRQALARVLWWVSQIAREEGFALNERKTRVLRPHQQQLVTGVVVNAGLHVPRALKRTLRAMLHEARVKGVEVAARGRADFYNTLLGHAAWVNAVEPALGARLLAEVKALAAREGAAHV

SEQ ID NO: 6639 - protein, 488 aa, unidentified
  source 1..488: note = Related to JACRDB010000065.1; note = Deltaproteobacteria bacterium
MDLASLLVELKPLIADPDAHWGRIAELMEEHSGLAESEVARHWLAERLAPTLVARSRSRDPRDRLRAVEAARWALPARDLAGVLWRLAKDPFPKVRHRAVSLTRSEGLTDVALPDRLGRGAKPKARMDPFTKKISVVALRDGEAQRGWFLLDPDKVRSLRRGRKSPAKPDLPKLKNPADVATLLGCASDKDLVKLLRVGEGPGSPYVRFTIPKATGGERVITAPRPALKRVQRALLDKILAKLPAHPSAHGFVAERSVVTNATPHKGSALVVKMDIEDFFPTLHYRRVEGFFRQYYLGPVAKLLAGLTTHRTRLEDGYVVFPGELPQGAPTSPALANLLCRRMDARLTGLAAKVGARYTRYADDLTFSWPVDPEVPLGRFFWWVDQVLQQEGFAENAGKRRVLRPHQRQLVTGVVVNHTLHLPREVRRRFRAILHNCQKHGVESQARGREDFRDYLRGFASWAAMVDPAEGRRFQEEVRALLGAAVTP

SEQ ID NO: 6640 - protein, 489 aa, unidentified
  source 1..489: note = Related to JAEUKA010000036.1; note = Myxococcales bacterium
MSLSNLLLELIPLCESLDDNWEQVVSLLDAHQDLAEYEVARFYVSRFTSRTIQQLVRSDDPRQRVKSAHMVRLTCTQRQAGQFLRLLIKDPCARVRSAAHRAMRGLRLDDVALPDSRIKKPHPYRGQLLGGWNPSGWSYGLFGNMWSIRQYRKQSRKPKTTLADLGVPKLETRKDVLSWLKLGSIRDLRKLLRAGSGPGSPYVSFTIPKASGEPRTITAPRLTLRRVQRQILDELLSKLPTHTAAHGFVKKRSVVTNAKPHEGAQLVVKLDLKDFFPTISYHRIRGLLCRYGFSPEVADTLAGLTTHRAVLSDGYVVWPGVLPQGAPTSPVLANLICRRLDSRLSGLAKRMGARYTRYADDLTFSFAKGLDHKNDLGRFLWWVNQVCQQEGFAENVGKRKILRPSAQQRITGVVVNSGLSVPRAMRRTFRAILHNCRMHGLDSQARGRRDFRAYLLGYASYIQMVQPSLGKRVLAEVRALLTASDRPST

SEQ ID NO: 6641 - protein, 487 aa, unidentified
  source 1..487: note = Related to JAEUKB010000029.1; note = Myxococcales bacterium
MSLSSLLLELIPLCESLDDNWEKVLALLDAHKDLAEYEVARFYVSRLASRQLDQLVQSPDPRRRTQAAHFVRLCSTQRQAGRYLRVLVKDPNGRVRSAAHRSMRALRIDDVALPDGRFRPSPHRQALGGWNPTGWSYGLFGNMYFVRQQKGKQRKPKPTLSDLGVLKLQTRKDVLQWLQIPSLTDLRKLLRAGSGPGSPYVSFTIPKSSGEPRTITAPRMTLRKLQRKILDDLLSKLPTHAAAHGFVKKRSVLTNAKPHQGAKLLIKLDIKDFFPTISYYRVRGLLRGYGLSFEVCDTLAGLMTHRPVLSDGYVVWPGVLPQGAPTSPTLANLICMRLDARLSGLAKKVGARYTRYADDMTFSFASGMDNHSDVGRFLWWVNQICQQEGFAEHVSKRKVLRPSSQQRVTGIVVNSGLSVPRQLRRTFRAILHNCRTHGVASQARGRRNFRAYLLGYASYLRMVSPELGTRALTEVRALLGSDESSSS

SEQ ID NO: 6642 - protein, 492 aa, unidentified
  source 1..492: note = Related to JADZFZ010000500.1; note = Deltaproteobacteria bacterium
MDVATLVSALMPLLDDPVGNSARILKLLRDHRTLADYEVARFLVAKRTEPFVCELLQSQDPKSRRTAVRWVGLTFARAPAARVLRDATKDRAKMVRQAAFRATRELRLDDVALPDTTDHAAWVHEAPQQRRMNPFTGEEMVVRGSPPRAARQRGYDVSGWRFGLYPTVNRRRDPKPAFSALRSREDVERVLGVSRAQLSRMIRPGHGSGRPYVAFEIPKATGGVRTLHAPRPALKRVQRLILERLLAPLEVHAAAHGFVRGRSTITNAIPHVGARIVVKMDLIDFFPTIHFGRLVGLFQHYGASVDAARTLAAVVTYRPTLPDGRVSWPSVLPQGAPTSPVLSNLVCRRLDSRLTALAASVAAHYTRYADDLTFSFREEPTKGLGHFLWWVNQIIGQEGFRENLGKRRILRPTGQLRVTGLVTNSGLSVPRDARRRFRAILHDCRQRGVTAEATGHEEPRAYLLGFSAYVQMVQPATGAKLRAEVLALLARR

SEQ ID NO: 6643 - protein, 490 aa, unidentified
  source 1..490: note = Related to JABFRG010000829.1; note = Polyangiaceae bacterium
MDIATLVATLIPLLGDPEGNGDEIVRLLDRGRALADYEVVRFLVAKRTESFVRRLLEDPDPRVRRTGVRWVELTFARSPAAKSLRDATKDRAKVVRQAAFRATRALRLDDVALPDLRVPFRSLPGESRTAINPFTQKPMVLEASASRQRHRGFNPTGWRFGLYPVPRRPRRPSPELSALKSRRDVEVLLGVTGEELAPLLRPGAGRGCPYVAFEVPKASGGTRILHAPRAALKRLQRILLKQLLAPLELHPAAHGFVPGRSTVTNAAPHVGARILVKMDLVDFFPTVHFGRLVGLFEHYGCAREAAEVLATIVTFRPVLPGGRVAWPSVLPQGAPTSPVLSNLVCRRMDARLAALATKVGAVYTRYADDLTFSLREAPSQGLGHFLWWVNQIIGQEGFVENLRKRRVLRPAGQMRVTGIVTNTQLSIPREARRRFRAVLHDCERRGVSPETTGHEEPRAYLLGFAAYVAMVQPELGAKLRTKVRALLARP

SEQ ID NO: 6644 - protein, 490 aa, unidentified
  source 1..490: note = Related to JACKEA010000006.1; note = Polyangiaceae bacterium
MDVATLISKLYPLLDDPVANSSTILSLLRRGGGLAEYEVARSLVSKRTEPMVRQMLADPDPVVRRRAVRWVQLTFAYSPAVRIVRNAAKDRSRMVRSAAFRAARALRVTDVALPARRLAKVPATTQREGINPFTRERMVIAARSPSVREIRGYAPAGWHFGLFRARPPSRRPAPPLAALKGRQDVLELLGVSEQEVTRLLRPGSGPGTSYVAFEIPKASGGVRTLHAPKHVLKRLQRKIATELLDPIEPHAAAHGFVRGRSTVTNAQPHVNARLLVKMDIADFFPTVHYGRVVGLLEHHGAGKEAAKLLAAITTYRPKLPDGRVSWPSVLPQGAPTSPVLSNLVCRRLDARLTALAARLGATYTRYADDLTFSFQGDPEQGLGRFFWWVNQILHQEGFIENIGKRRVHRPSGQMRVTGLVTNQGLSVPREERRRFRAILHACEQRGVSSETTGHSEPRAYLLGFAAYVEMVQPEVGKKLRAQVKRLLAKS

SEQ ID NO: 6645 - protein, 486 aa, unidentified
  source 1..486: note = Related to JAEUKI010000052.1; note = Myxococcales bacterium
MDLAKLLFTIKPLLADPRANLAKIVELLEKHNDLAEYDVARFYVSKSVRPAIEEKLSSPDPRERTAATKSIPRLMGKSEGAALLRRVYKDASPTVRAAARSGVSMLGIEDVALPDSRFPAPRNNWQRQGGWNETGWAFGLADSRARKPNRRVPEDIASIRKVFKELQTSDDVAKKLGMKKAKELKALMRPGQQAGSGYVEFTVPKATGGLRTICAPRAPLKRVQRTILRELLAKVPTHDAAHGFINGRSVVSNARPHEGAKIVVKIDLKDFFPTVHFYRVAGTLRYLGMGEAAASTLAAIVTHRNKLPDGTVVMPGALPQGAPTSPAITNIVCRRLDARLDALSKKVGAKYTRYADDLTFSFRDEPEKGLGRFLWWVDQVIQQEGFVQNAPKRRILRGSNQQRITGVVVNDGLSVPRDARRRFRAMLENIRRTSVDEQARGKADFKAYLKGFASYVKMVQPEVGKKLLAEVHAVLAEDVRKRDAAK

SEQ ID NO: 6646 - protein, 480 aa, unidentified
  source 1..480: note = Related to JAGQIK010000067.1; note = Myxococcales bacterium
MNLPALLLELRPLVADIDKNWDRIVELLSTHKRLAEYEVARFFVARHVESRVTELLRSRDPQQRARGVKMLELAYPSTRAGKHLRHLVRDADVEVARDATEAVSNLDIDDVALPDFRLKPPRDPRHGWGGWNQSSWRFGFPLADWVRRKKRVGPKKLKLPKIADKAALFELLGIADEKHYKRLIRPGAQSGAPYVEFTVPKRSGGERIISAPRAELKRVQRTILDKILAKIPVHDAAHGFVPGRSTVTNAQPHVGASLVVKIDLTEFFPSIHFRRVYGLMGYYGYEHEVATALAALMTHRIKLDDGKRMVETGLVPQGAPTSPALANIVCRRLDARLSGLAQRAGARYTRYADDLTFSFADAPPDKGLGRFLWWVDAVCQQEGFVENAGKRRVLRPSHQQRVTGVVVNSQLSVPRSERRRFRAMLHNCRHKGIASQAKQHGRDEAEFRDYLTGFASYVKMVQPELGNKLAGEVADLLKGA

SEQ ID NO: 6647 - protein, 478 aa, Enhygromyxa salina
  source 1..478: note = Related to PVNK01000310.1
MLLPNLILELRGLLDDPEAKLERIVERLRAHDDLAEYEVARHYVAKRLEPVIRAWLASPDPRVRVEAIAAVRQTFSKPAAAKVLRHLVKDATLSVRGAARRAVAELGLDDVALRNTTMREPRRSSWPGGWNPSGWQFGTGRNRGRPKLAPAPVRAGLPALADVDALAVWLGYEGAGELRRFMRPGSETGSPYVDFEIAKARGGQRTISAPRAPLRAIQRKIYAELLAKVPVHDAAHGFVVGRSTLTNAAPHVGAGLLIKTDIREFFPSIHYWRVRGLFFSLGYGEEVAWALAALCTRRPVIDPEGERRVAWPGLLPQGAPTSPALANLVCRRLDARLSGFAAKIGARYTRYADDLSFSIHDPGRAQGLEVGRVLWWIDQILQQEGFAEHPGKRQVLRPHRRQLVTGIVVNDHPTVPRDARRRFRAILHNVARRGLASEARGRDDFADYLRGFAAYVEMVQPELGARWVAEVDALLQSA

SEQ ID NO: 6648 - protein, 473 aa, Pseudenhygromyxa sp.
  source 1..473: note = Related to JABJWV010000001.1
MLLADLILELRELLVDPRANFEVIIDRLAAHDDLAEYEVARQYVVPAIEGLIRERLDDPDPQVRVQAIVAVRQCFSRSAAAKLLRHLVKDANLSVRGAAREAVSSLGFDEVALPNADFNPRHQRWNLGGWYFGTGDWRRPGLAPQAVRAALPSLPDVAALASWLNIDDPAELRRFMRPGSDTGSPYIDFEIPKAKGGVRVISAPRAPLRAIQRKIYAELLAAIANHDAAHGFIAGRSTVSNAAPHVGARLVLKTDIREFFPTVHYWRVRGLFRWLGLGSVAGELAALCTRRPVVERNGQRMVVWPGVLPQGAPTSPAIANLVCRRLDARLQGLAERLDARYTRYADDLTFSFHGSDGGGEPGVAVGRVFWWIDQILQQEGFAEHAGKRQVLRPGGRQLVTGIVVNERQSVPRPVRRRFRAILHNCKRDGLASQAHGRDDFADYLRGFAAYVQMVQPQLGQRWVAEVEALLAGR

SEQ ID NO: 6649 - protein, 481 aa, Enhygromyxa salina
  source 1..481: note = Related to NZ_PVNL01000057.1
MLLANLIFELRPLLDDPEANLRQIVARLRAHDDFAEYEVARHYVAGKLEGVIRSWLANPDPRVRAEAIEAVRQVFSRPAAAKLLRHLVKDATISVRGAARRAVDELGLDDVALRNTSLAVPRSPRGRGGFNPTGWEFGTGAHRGRPRLEPAATRAGLPTIPDLAALTSWLRIDADGLRRLMRPGGHTGAPYVDFEIPKARGGRRTISAPRAPLRAVQRQILAEILSKVPTHDAAHGFVPGRSTVTHATPHVGARLLLATDIRDFFPTIHYWRVRGLFFTLGYGEAVAGALAALCTRRDVINPEAEAPTRRVVWPGWMPQGAPTSPAISNLVCRRLDARLSGLAAKLGARYTRYADDLSFSFHDPELVERLEIGRAFWWIDQILQQEGFAEHLGKRQILRPHRRQLVTGLVVNDHLTVPRDARRRFRAILHNCKQRGVASEANGRDDFPDYLRGFAAYVHMVQPKLGARWVAEVDALLVDHA

SEQ ID NO: 6650 - protein, 496 aa, Plesiocystis pacifica
  source 1..496: note = Related to NZ_ABCS01000168.1
MLLANLILELRPLLADPQANLPQITAKLREQEDFAEYEVARHYVAKKLEPTIRAWLDDPDPRVRLEAIAAVRRTFSKPAAAKVLRHLVKDAHLRVRGVAREVVFELGLDDVALRDTTFRVPRNPAGGGGWNPSGWHFGTGSHRGHPRLAPEAVRAGLPDLPDLPALLRWLSLDDEAALRRLMRPGSAAGAAYVDFEVPKKSGGTRLISAPRAPLRAVQRKLLADILAPVPCHDAAHGFVPGRSTVTHAAQHVGAKLLLQTDIRDFFPSIHFWRVRGLFFTLGYRGDVARALAALCTRRPVIAATRTDERRVVWPGVLPQGAPTSPALSNLACRRLDARLSGLAARLGARYSRYADDLSLSFHDDEALAKLDVGRAFWWIDQILQQEGFAEHPKKRRILRPHRRQQVTGIVVNEHLAIPRDERRRFRAMLHNCRAHGLDSQAKVWAQARGHDPEHEGLRADFLAYLRGYAAYGAMVQPKLGARWLAELDAMVQPDTP

SEQ ID NO: 6651 - protein, 454 aa, Myxococcus sp.
  source 1..454: note = Related to JACSRE010000167.1
MNPVEAILELERLKATKPVDLAAVARVLEGVEGLAEEDIVGTVAFELISPRAVFTLLKSPEPSERLAGVELVARLGRLHAGSFLRHVVKDPDPRVASCARRHLTRLRLPEVGLPLPLPSFARAFARPSWTVAGWRFGAAPRFSDARYPVRADLSSAARAEAHLRVPLASLPSLRRYAEFTVPKRRGGVRSLAAPHLALKQVQRRLLDAVLSRLAVHRASTAFSSGSSVVTNAAAHVGRAMVIKLDLQDFFPSIHEERVRGLWGALGADRQVAHALARLTTYRPRLASGSLSTVAVLPQGAPTSPAIANLIARRLDARLAGLSKKWKASYTRYADDLTFSFAEEPRQVGRFLWWANAICQQEGFVENASKRRVMRATGRQQVTGLVVNQRVTLPRHVRRSFKAIIHNCERHGVASQARGRPDFEQWLLGFAAWAAVAQPDVGVDWLRRVKQVLGR

SEQ ID NO: 6652 - protein, 516 aa, Gemmata obscuriglobus
  source 1..516: note = Related to CP025958.1
MSASQSAPAWLLLPLPANADADAILIATIEQYATSLPQEFKKLHDALDEVRALASYEPAVNRSNTLVWEKLETLLTAPEGTARIALIRYAREHMPERACARVLRRLAKDADMNVRRTVAKAIRKAKIQEVAIPAKKDGDWDPSGWLLPDEVSKVTRHKTGKRAQERSGVPALTKLAELRKLLGIKSTNQLGFFLLASDHKGGPYTTHKIPKRDGSDRQICAPKKQLKWVQKQILKHILSKVPPHPAAHGFVSGRSTVSNATPHVGAELVVKFDLKDFFPTVHYFRVMGLFASLGYPVGNCMFGTDDGANQIAPVLARLCCYTPDPKQWGSAALPQGAPTSPAISNLVCRRLDARLQGLAETNHGTYTRYADDLTFSFPKAEGMNLGRFRWWVDQVCQQEGFVVNQEKFRVIRDSQRQVVTGIVVNDAVRAPRELRREIRAILHNCETKDLESQAKRHPRFRGNVPAFSQYLRGIAAYLNMVQPEHGAALLRRVNELLGGPIEGDTPSQDQGKAGDA

SEQ ID NO: 6653 - protein, 515 aa, Gemmata sp.
  source 1..515: note = Related to NZ_JAGKQQ010000001.1
MSAPRSAPAWLLLPLPANADTDAGLIATVEQYCATLPEAFKKLHDALDHVRALASYEPAVNRANVLIWEHLEALLSATEKKARLELIRYARDHFPERACSRVLRRFAKDPDMEVRRVVARAVRKAKIEEVAIPAQKDGDWNPTGWLLPSEGLKITRHKPGTRTQERSGVPILGKLKDVRKLLNIKSPNQLGFFLLASDHKNGPYTTHTIPKRDGSERKICAPKKQLKWVQKQILKHILSKVPPHPAAHGFVNGRSTVSNATPHVGAELIVKFDLKDFFPTIHYFRVMGLFASFGYQVDNCMFGTKDDAKQIAPVLARLCCYTPDPTQWGTATLPQGAPTSPAISNLVCRRLDARLMGLAKANKGTFTRYADDLTFSFPKAEGMNLGRFRWWVDQVCQREGFVVNQEKFRVIRDSQRQVVTGIVVNDALRVPRELRRELRAILHNCTTHDIESQAKRHPKFNGNVPAFTQYLRGIAAYLNMVQPEHGGALLRRVNELLGGPIEGADETPDVKAGDE

SEQ ID NO: 6654 - protein, 516 aa, Frigoriglobus tundricola
  source 1..516: note = Related to NZ_CP053452.2
MSASPSPPAWLLLPLPANAAHDAALLASVEEHCTKLPRDFAKLQKALERVRYLASYEPAVNRANALVWEQFEALLSAPEGRDRIALVGYARNHMPVRALARVLRRLAKDPDMTVRGQIAYLIKRSKIREVALPAKKDGDWNPTGWMLPAERGRPSRITRHKTGKSVQARTGVPLLAKLAQLRALLNIKSPKQLGYFLLASDYKNGPYTTHVIPKRDGSDRKICAPKKQLKWVQKQILKHILSKVPPHPAAHGFVNGRSTVSNATPHVGAELVVKFDLKDFFPTVHFFRVMGLFASIGYPVGNCMFGTDDDSNQIAPVLARLCCYTPNPKLWGSATLPQGAPTSPAVSNLVCRRLDARLAGLAEANKGTYTRYADDLTFSFKSAEGMKLGRFRWWVDQVCQQEGFTVNQQKFRVIRSSQRQVVTGIVVNAGLRVPRELRRELRAIVHNCEKQGVESQAARHPNFGGNVGAFTQYLRGIAAYLNMVQPDHGAALLRRVNELLGPAADADDAEAKGGGA

SEQ ID NO: 6655 - protein, 515 aa, unidentified
  source 1..515: note = Related to JAIOPV010000289.1; note = Planctomycetes bacterium
MSATTRTGPEWLFRPLPANADHDDAVIKKVEQHCSKLPNEFLKLQKTLDDVRAFSSYEPCVNRANELVWEQFEALVTNPDGKCRRLLIGYATAHMPERAAARVLRRLAKDPDMEVRNHVSRALRKSKIREVALPHKKGGDWDTSGWLLQSEETKVTRHKPGKRTLEKNELPVLTNLAQLRKLLNIKSTNQLGYFLLASDNKDGPYTTHTIPKRDGSDRKICAPKKQLKWVQRQILKHILSKVPPHPAAHGFVNGRSTVSNAGPHVGAELVVKFDLKEFFPTVHYFRVIGLFASMGYPVGNCMFGTEDKSNQIAPVLARLCCYTPDPKKWGSAVLPQGAPTSPAISNLMCRRLDARLGGLAEANKGTYTRYADDLTFSFPKAEGLNLGRFRWWVDQVCQQEGFTINQQKFRVIRDSQRQVVTGIVVNDKLQVPRELRRELRAILHNCEKTSVEEQAKRHPRFTENVGAFSQYLRGIAAYLNMVQPEHGAALLKRVNDLIGKPEGETPPKEGEQSKN

SEQ ID NO: 6656 - protein, 509 aa, unidentified
  source 1..509: note = Related to LR594584.1; note = Gemmataceae bacterium
MSATHTGPEWLYRPLPANADFDPAALAKVEEHAAALPAAFAKLQTALDAVRALASYEPCANRANELVWERFEALVADPDGHHRAALLRYAVAHLPERAAARVLRRLAKDPDVSVRTRVARALRASKIREVALPHREANNWDTSGWVLRTEDTKVTRHKTGTRALEKAGLPVVTKLADLRKLLNIKSTNQLGYFLLATDAKDGPYTTYTIPKRDGTDRTICAPKKQLKWVQRQILDHILSKVPPHPAAHGFVPDRSTVTNAGPHVGAELVVKFDLKEFFPTVHYFRVIGLFASMGYPVGDCMFGTADTSNQVAPVLARLCCYTPDPKKWGTAVLPQGAPTSPAISNLMCRRLDARLAGLAEANTGVYTRYADDLTFSFKSADGLNLGRFRWWVDQVCHQEGFTVNQAKFRVIRDSQRQVVTGIVVNEKLQVPRELRRELRAILHNVEKTSVAEQAKRHPRFEGNAGAFAQYLRGVAAYLNMVQPEHGAALLKRVNELLGTGDADGDPTPS

SEQ ID NO: 6657 - protein, 521 aa, unidentified
  source 1..521: note = Related to JAIEMG010000136.1; note = Gemmataceae bacterium
MASVVAEIIRERWFQLQIRANAMNVIERAPAWLLRPLPVHAVADDKLNDRIDKLAAKLPESLPRLQAVLDGVQMYREYEPAVNRASAHVWNVLDQLFAADADSVRVSLLVFAEAHMVEPARARIYRRLVKDPSTKVRNRARRLVQRCDLHEVALPLQKDGDWDPTGWLRGVVDRRLSRHAQGKRVQERHDVPVIGTLAQLRKLLGIRSSRQLGYFLLASDADGGPYVRFTIPKRDGREREICAPKKQLRWVQRQILDKVLAQVPVHDAAHGFIVGRSIVTNASQHKGAEIILKFDLTDFFPTIHYYRVLGFFASLGYSVGNGRFGTNDSSKQVAPTLARLVCYTPDPQQWGDARLPQGAPTSPAISNLVCRRLDARLAGLAKRNEAVYTRYADDLTFSFRKATGDLGRFRWWVDQICHQEGFLVNQKKFHVIRASQRQLVTGIVVNDELHVPRDERRRFRAILHNCKTHGLDSQARGHAQFAEYLRGFASYIHMVQPDEGAELLQAVEELLGPETGEDGVP

SEQ ID NO: 6658 - protein, 495 aa, unidentified
  source 1..495: note = Related to LSTD01000300.1; note = Planctomycetaceae bacterium SCGC AG-212-F19
MADVLDVPEWLLRPLPANASADAKLHAEIGRLASNLPASLAEIAKALEAIKNYSEYDAAANWASAHVWQAVAKFSAADLPGVRVGLLKFAAAHMVAKAQAQICRRLAKDPAVAVRRRARKLVENAGFHEVALPDTADGPWDATGWLRGSATGVLSRHKQGTKIQAERGLPKLSTVGELRNLIGIKSERQLGWFLLATDAEDGPYVKFTIPKRDQTEREICAPKPQLRWVQRQILDKILAKVATHDAAHGFIPGRSIVTNAAPHTSAALILKFDLKDFFPTIHYYRVMGLFTSLGYTVGRAKFSAKDDAREVAPTLARLCCYTPDPHQWGSALVPQGAPTSPAISNIVCRRLDARLRGLAERNKGVYTRYADDLTFSFLKDEVELGRFRWWVDQICHQEGFFVNQAKFRVIRCSQRQVVTGIVVNDALRIPREERRRFRAIVHNCKKHGIEAQARGHKKFLDYLRGYASYINMVHPEEGAELLEEVEALAGPETGE

SEQ ID NO: 6659 - protein, 493 aa, unidentified
  source 1..493: note = Related to JAEUIF010000053.1; note = Planctomycetia bacterium
MDPLPAAPAWLLRPLPAHAVEDEKLHARIDKLCQRLPAGLAELGVALKAVEMYREYDAAANHASIHVWRLLDQFYSSPASVRSQLLNFARQHMVPQAQHRILRRLAKDPSLALRRSVRRLIERGAVREVALPLEADGDWDAQGWLRGNSLPLTRHRQGRQAQTDHGVPRLAKLADLRKLLDIRSAKQLGWFLLATDADNGPYTTFKIPKRSGSERLICAPKPQLRWVQRRILDKILAPVAPHNAAHGFIPERSTVTNAAVHTGAAVVLKFDLTDFFPTIHYFRVVGLFASLGYHVGDGRFSSDDDSKNVAPTLARLCCYTPDPQDWSAAKLPQGAPTSPAISNLCCRRLDARLQGLAERNGGKYTRYADDLTFSFEKPELALGRFRWWVDQICHQEGFFINQAKFRVIRASQRQVVTGIVVNDELRVPREERRRFRAVLHNCRQHGVKSQAKGHKRFKEYLRGFASYVHMVQPEEGAELLRQVDELLGAEGQS

SEQ ID NO: 6660 - protein, 475 aa, unidentified
  source 1..475: note = Related to JAGQQD010000096.1; note = Planctomycetaceae bacterium
MADSPVLSIPTWLLRPLPINSKRDSKLESQIEKLAKNLPGSLAQLTTELSKVKMFREYDSAANLASRHVWVSRYHFLNSSLDEDRKALLEFAQLHMTPTAKARIIRRLSKDPQMGVRRAVHRIIQKAPPYEVALPEARDGNWDASGWTRGVQPGRLMRVRRGQKKTQKEWGLPGLSTVKQLRTLLGIKSEKQLGYLLLATDEGGGPYTRFSIQKRNGSDREICAPKPQLLWVQRKILHEILDKVPLHESAHGFVRGRSTVTNATPHRGAAFVLKFDLENFFPTVHYYRVMGLFANLGYSMGNGRFEARDKSRQIAPVLARLCVFVEDPNAWGTGFMPQGAPTSPAISNLVCRGMDARLAGLAEQVGGVYTRYADDLTFSFPETSPVNVGRFRWWVDQICHQEGFFLNQSKFRVIRRSQRQTVTGIVVNDELRVPRRERRRFRAILHNCKAQGVESQARGNPAFRDYLRGFASYLN

SEQ ID NO: 6661 - protein, 506 aa, Limnoglobus roseus
  source 1..506: note = Related to NZ_CP042425.1
MTDTPTWLLHALPANAVVDEKLNATLSALAAALADNRDKPLVTAGLLTEIQGHLAHAQPFAAYEAAVNGIAGQVWQLFEAVHQRQNRPAKLAFLNLVVRHLTPGALAQLCRRWAKDADPAIRRAVGRVIETGAIHEVALPATKDGAWSPAGWRKGTVEVDLSRHKVGTAVQEANSVPPLANLRQLRELLGIRSAKQLGYFLLASDKDDGPYTRFTVPKRGGGERVICAPKPQLKWVQRRIHERILSGVPLADAAHGFVPGRSIVSNAAAHVGAAVVVKFDLKDFFPTIHSYRMIGLFARMGYSVGTAKIATADESASVAPVLARLCSYTPDPRAWGKAHAPQGAPTSPAVSNLICRHLDARLGGLARKLGGVYTRYADDLTFSFAATGIDLGRFRWWVDQVCQQEGFVMNADKFRVIRRSQRQLVTGLVVNDGVRPTREQRRAFRAVLHNCRRNGVVTEARGDPRFSQYLRGFASYLHMVRSTEGADLVRQVAELLDPPGGGEDKP

SEQ ID NO: 6662 - protein, 521 aa, unidentified
  source 1..521: note = Related to PCBK01000175.1; note = Deltaproteobacteria bacterium
MREDTQSTSSVVLHEAELKNKLPIGATFDSALLEQISTLADQLPDSMSELYKVLSDIDMLVEFDAARVFVVRLVLARLRVLTHAEEKQRLALLDMARDYMTTDECVPVCRRFAKDPSAHVRGRVKTLIRTKKPKDVALPLEEGERWDASGWSKGINADPEQETSPLFKHERGSRIQRKHGVPEIETVKDLRTLLKIKSEKQLGYLLLSNELEDGSGPYTLFEIPKKDKSPRLICAPRQPLKGIQRRILDRILSGVPPHETAHGFVPGRSIVTNAAVHQSKEIVIKFDLENFFPSMHYYRVMGLFAQLGYDVGEGFFQSDDESEAIAPVLARLTTYTSNPKEWGRGYLPQGAPTSPYIANLICRGLDARLSGLARSLDGDYTRYADDMTFSFAELPRTKIGRFRWWVDQICQQEGFAVNQKKFRVVRRSQRQMVTGIVVNDTLRVPRKERRRFRAILHNCERYGLESQARGRKDFPAYLQGYASYINMVHPDEGRKFIEQVEHILQLDREGKLPIEKDPENG

SEQ ID NO: 6663 - protein, 489 aa, unidentified
  source 1..489: note = Related to JAGQPF010000642.1; note = Planctomycetales bacterium
MAATKSSIPAWAYRPLPLNAQPATELIQQLDKLEQGLPGSSWEILRLVGEQDGSATYEAVANRAMEIIWTHLDECIANDPHTVRQFAASHLPIRVRNRVLRRLAIHPSFSTRRSVRYQINESAVREVALPSAPDGEWNAEGWLLNSNSSTLMRPRKLKAPDPRLPKLKNVKAVMKELGIVSNRQLGWMLLATDEDGGPYHTFEIGKRNGKARKICAPCWQLRRVQQRILHNILDHLPPHPAAHGFVKGRSVVTNAAPHLGKPLLLKFDLLDFFPTIHYHRVIGLFASMGYGMTSPFFDTENRSRNVAPVLARLCTYTEDPRVFRDGTLPQGAPTSPAISNLICRRLDARLDGLARKHGAAYTRYADDLTFSFDQDEISVGRFRWWVDQICHQEGFLVHQAKFRAIRSSQRQSVTGVVVNERMRVPRDLRRRFRAILHNCRKRGVAAEARGDAGFPSYLLGMASYMYMVNPDEGGPVLDEVRKLLAEQGN

SEQ ID NO: 6664 - protein, 495 aa, unidentified
  source 1..495: note = Related to PBBL01000083.1; note = Myxococcales bacterium
MASHRDRYDDRPPLPVGAETNPEDLARVAELAARLPGSVSALSDFLQARDSYNDFDPTRLAANDAILARLGAFHLAAEGTHRQLLNYAQAYMAPSEVMAVCRMVLRGGSTRLRERCVDLLRGAQPDGLTLPARQGGAWDWTGLLRGVERGRLFAKQPSQRLLERNGLPQLTTVGELRAMLKLSSPELLGYLLLSTSGSGGPYATFTRPKRSGGERLICAPNPTLKQAQRAVLENILARVPVHDAAHGFVEGRSTVTNARAHLGRELLIKFDLRNFFPSITYYRVMGLFAHLGYYLEGGVFSSRDSSRAVAPTLARLTTYTPPGATWRASYTPQGAPTSPIISNLICRRLDARLYGLAARIGATYTRYADDLTFSMNALPESGLGRFRWWVDQICVQEGFFINHSKFRVIRKHQRQQVTGIVVNEALRVPREERRRFRAILHNCRTQGVESQARGRAGFREWLLGYASYMNMVNPTRGGQALAEVQALLAAEGPST

SEQ ID NO: 6665 - protein, 473 aa, unidentified
  source 1..473: note = Related to MNYG01000250.1; note = Deltaproteobacteria bacterium CG2_30_63_29
MHDEVLLGRVRSLVAALPGSLSELGACLAEVESFAEFDSAAVLAAQAFDARLDDLLRRPPKGLFEFMRSNLPVDQQLQVCRRLVKHPNLPTRRRAVTLLKRLRPDDVALPLSAKGEWNWRGWTRGTEPGRLFKHRRGVKRQAEVGVPQLKDLEALRRRLAIDSLKQLGWFMTATAGEGAPYCSFEIPKRSGGLRRIDAPRGQLRALQRTVLHEILSKVAVHEAAHGFVPGRSTLTNAAPHLGRKLVLKFDLRNFFPTISYWRVVGLLASLGYDVGTGLNVVEDSSRAVAPVLARLLTFRDDAKLFGAGYAPQGAPTSPAISNLVCRGLDGRLSGLAARIGGTYTRYADDLTFSMDAEPAGGLGRFRWWVDGICQQEGFLLNREKFRVLRASRRQQITGIVVNDSLRVPREVRRKVRAMVHNCQKNGVEAESKGDPGFVDRLRGLAAYIHMVHPEEGRPLLDAIKLFGEGGEDD

SEQ ID NO: 6666 - protein, 424 aa, unidentified
  source 1..424: note = Related to JADZDZ010000133.1; note = Candidatus Sumerlaeota bacterium
MLDKLLPYLQIFIPLSVILLFIAQFLEKRKNETRQAAPPRRIGERSASSRRPTRSFPPAPVNAGVNTTNPRCPNKRHAYIRAPRRPQSDPSAAARFGIPALMNRGDVAKWLGMSWKHLVWLCNLFHNWDRKGVGHYHAWKVPKRAGGERVITAPKPYLRAVQRKILADILSRIPIEPQAHGFARNRSTVTNASVHIQRPIVVKLDLVDFFPTITYRRVRGVFGTLGYSEEVSGVLARLCTIAPTDMLPLANDLRRSLLLRRRHLPQGAPTSPALSNLVCRRMDRRLAGLCAKFNAVYTRYADDLTFSGDEKFAAALGDFFDIACRIIALEGFRINWAKRRIMRKGARQLVTGVVVNRRTTLPRGERRHLRALLHHWRTKGDFTAPPHVENKVAWLGGKLAYFSMIDPAKGAPMLAQFKALARGR

SEQ ID NO: 6667 - protein, 435 aa, unidentified
  source 1..435: note = Related to VGYW01000017.1; note = Planctomycetes bacterium
MFQWSFRPLKYSAQESDVKPSPPPASRIPDSRFQITDCRLRSGESSAVNAFWIIGALIAAWLVLRWLTGRGTARPAGDPFVTKRNPKTGEPVPPGSGKGRERLRATATHRPQLLAENGLPNIARRDDLARALGITRGTLDWLAFPDDREQPPHYSAFAVPKRSGGYRVLYAPKPKLKAAQHWIRKEILSKTFAEDPAHGFVAGRSIHTNAQPHAGKDIVVTLDLDNFFPSVTYRRVRGIFQSLGYGEEVAIPLAMLCTVKPAEKVREFVGGQRHRMLPQGAPTSPALANLACRHLDLRLAGLAKKFGCTYTRYADDLTFSGDDTFRRSLKRFLKLLHQIIAKEGFKLKKGKTHFARRGARQEVTGLVVNDGPRVPRAYRRRLRAILHNARRGGLEAQNREKHPHFRQALRGRIEFVRSTHPDLAEKLIAELNAIG

SEQ ID NO: 6668 - protein, 388 aa, unidentified
  source 1..388: note = Related to VGYV01000061.1; note = Planctomycetes bacterium
MSVFWIVVALIAAWIVLRALTGRRTARVVGDPFVRMRNPKTGEPIPPGSGKGRMRLRATAAHRPELLAENGLPNLASREELAAALGIPRGTLDWLALPERKKEPPHYTAFAVPKRSGGYRVLYAPKAKLKAAQHWIRREILAKTFAEDPAHGFIAGRSIHTNAAPHTGKDIVVTLDLDNFFPSVTYRRVRGIFQSLGYGEEVAIPLAMLCTVKPAAKVREFVGGQRHRMLPQGAPTSPALANLACRHLDLRLAGLAAKFGCTYTRYADDLTFSGDAAFERSLKRFLPLLQKIVKAEGFKLKKDKTHLARRGARQKVTGLVVNDGPRVPRAYRRRLRAILHNARKTGLDAQNRDKHPHFAHALRGRIEFVRSTHPQLAAKLLAELRSLG

SEQ ID NO: 6669 - protein, 369 aa, unidentified
  source 1..369: note = Related to nan
MTERRAAMGFFDWLTRRLLGRGKPAAPPEERLGRKRLRATAAHRPDLLAQNGLPSLASRDDLAAALGISRGVLDWLAFPERKEEPPHYVAFAVPKRSGGYRVLYAPKAKLKAAQQWIRREILAKTFAEDPAHGFVAGRSIHTNAQPHAGKDIVITLDLQDFFPSITYRRVRGIFQSLGYGEEVAIPLAMLCTVKPAEKVREFIGGQRHRMLPQGAPTSPALANLACRHLDVRLAGLAAKFGCAYTRYADDLAFSGDATFERTLKRFLPLLHQIVKAEGFKLKKGKTHLARRGARQEVTGLVVNDGPRVPRAYRRQLRAILHNARKNGLEAQNREKHPHFAHALRGRIEFVRSTHPQLAARLLAELKALA

SEQ ID NO: 6670 - protein, 369 aa, unidentified
  source 1..369: note = Related to nan
MGFFDWLTRRLLGAGRPTPNRPEWAEVSEEAGRSKRLRATAAHRPQLLAQNGLPPLATRDDLARALGISRGALDWLAFPDKAKEPPHYSAFAVPKRSGGYRVLYAPKGRLKKAQQWVYREILAKVKPSAAAHGFAKGRSIHTNAAPHAGKDIVITLDLQHFFPTITYRRVRGIFQSLGYGEEVAIALAMLCTVRPAEKLRGLLGGQRHRMLPQGAPTSPALANLACRHLDARLAGLARKFGCTYTRYADDLTFSGDAAFERTLKRFLPLLHQVVKKEGFELQKGKTHFARRGARQEVTGLVVNDGPRVPRAYRRRLRAILHNARKTGLEAQNRDKHPHFAHALRGRIEFIRSTHPQLAVKLLAELKALR

SEQ ID NO: 6671 - protein, 370 aa, unidentified
  source 1..370: note = Related to JABMQU010001270.1; note = unidentified bacterium
MGFLDWLAGLFGGGPTESGGRSWGVFEPPPPRERRKKLRATAHHDPDRLAAQDLPSLRDCAELAGFLGISPNTLRWLTHVDEGDEPEHYVAFAVPKRSGDYRVLYAPKAKLKQAQRRVYDAILSRVPLPDAAHGFVPKRSILTNAEPHAEQYVVMNVDLQDFFPSITYRRVRGIFQALGYGEEAAIPLALLCTVKPAGKLLEYMGHVRHRQLPQGAPTSPALANLACRRLDARLGGLARAFGATYTRYADDLTFSGDDAFSDALGRFVRHARTIIADEGFRVNARKVHIARKGRRQQVTGLVVNDAPSVPRRYRRELRAILHNARTTGLDAQNRHNHPDFARHLRGRIAFVRTTHPGLADQLQRTLDSLL

SEQ ID NO: 6672 - protein, 355 aa, unidentified
  source 1..355: note = Related to JADFXM010000017.1; note = Candidatus Riflebacteria bacterium
MQTILWLLILLAFLKVVSNIKQRIRIFLNGDFNRLHKLGLPQIEDFSQLANFLKISETELNWLIDKSSANPQTGISRHYVLKEISKKNGKKRLLHIPKAKLKEVQWIILDKILNLLSYHPAAHAFCFRKSIVTNAENHLGKAIVIRADLKDFFHTIRTHRVRAIFRRLGYSYKVAYSLALLCTSRLPNSQKRALPQGAPTSPAISNLIAFSLDRRLTGLALKLGFTYTRYADDLIFSGNRKIVKALLKNLKKIVSSERFILNKEKLLIARAERRQKVTGITVNQKLSIPRNERKKMRAILHNSLKTGLEKQNLIQHPNFKEHLRGKLSFFKMVNPDQARPLIESFNKTVKKELAS

SEQ ID NO: 6673 - protein, 327 aa, unidentified
  source 1..327: note = Related to JACPCR010000136.1; note = Planctomycetes bacterium
MAAWLAITPAKLRWLAWPRSHAPHGVRKRYFGPPDPVQHYYEAVRIKPDGRKRYLGCPKRELKEVQRKILRGILEKLPPPPRAHAYCRGRSSLTNAREHVGHAVVVHLDLSHFFNSINVRRVVGLFAALGYPRPVAVTLGLLCTYQVHPEVGWEFFNRYRRVVHRGLPQGAPTSPALSNLICQRLDRRLSGLARRFHARYTRYADDLTFSGNRDFAKGLENFLKMARRIIAEERFVLSERKLRIARKGSRQCVTGIVVNDQPGVGRTQRRRLRAILHHCGRGRPEEQNRGKEENFRGYLQGWVSYVGMVNPAQGQKLQSALERVRWP

SEQ ID NO: 6674 - protein, 400 aa, unidentified
  source 1..400: note = Related to SOJX01000071.1; note = Planctomycetes bacterium
MVKYRSPPFFYEGNVGFLKWLKNVLFGGGEEERFKSFEKEIYIERVSYRGAGKKEVSRPRRNVRASEKIPPGGDRKLLNELGIPILAGNPDIARRLGVSTGELCWLAFPKRFDTVDHYREFHIPKLNGGERRILAPKKKLKAAQRWILKNILTAERVRGLVHENVHGFRRGKSVATNARPHVGAEVVVHLDLTDFFETITLPRVRGIFRKLGYSHVAATTLAILCTVYIGRVDETKTGSRKQVLPQGAPTSPAITNLVCNKLDRRLAGLARRYGVKYTRYADDITFSGGKSFCNALRRFLPTVRRIIREERFTINEKKVHVARKGARQSVTGIVVNQQMNIPRSERRRYRAILHQLRKIPPGTEKPKKLNAHLSGVAAYLSMINPEAGRKMHEEVKSVFN

SEQ ID NO: 6675 - protein, 347 aa, unidentified
  source 1..347: note = Related to JACRIJ010000080.1; note = Planctomycetes bacterium
MGLISDFFKNLFGSPVENKGGENEPTQKSAGNDSGPSELTRLEMNRLPLIAGRAELLQELQISDKELDWFVKHPEWHYTVVSIPKKSGGARTIYAPKKRMKRIQRWILSEILSKARVEGSAHGFAKGRSITTNAFPHTGTEIIVNIDLENFFDSVKLWRVYCAFRNFGYSGELSSIFARLCCVKGALRQGLPTSPALTNVVCAMLDRRLNGLAVKFGCTYTRYADDMTFSGDLKFKASLSRFIPILKKIIRGEKFKINRSKMRITRKGSQQKVTGLVVNEKVNIPREKMRLWRAIIHNCRIKGLESQNRDKHKHFAAHLKGLVSFAAQVAPAKSERMREELSQVTKP

SEQ ID NO: 6676 - protein, 348 aa, unidentified
  source 1..348: note = Related to WSZJ01000110.1; note = Planctomycetes bacterium
MGFFDFLKDLFNPVKGGTGGPKPAGNSPARALAPRKTYASPGGPRPLAPGLPQLPTPASLAALLRIAPEKLAWLAKEKGRHYATWKIPKAKGHRTIEAPKKQLRAAQRAIHREILSKVAPNAAAHGFCTGRSPRTNAEPHVFRKLVVKLDLRDFFWQVKRNRVAGQFRALGFPPDVAAILWRICCHRGRLPQGAPTSPALTNIVCRRLDARLSGLAKKYKARYTRYADDLTFSFDAPNLAVQEPLRAIRTILSEEGFSLAREKTRFLRRMSRQTVTGITVNSKLSPSREEVRSLRALLHEARTKGPKVANRNQEEAFGARVRGRIEAVRAIDKSKGEKLLADYRRVAW

SEQ ID NO: 6677 - protein, 340 aa, unidentified
  source 1..340: note = Related to JADLHC010000024.1; note = Planctomycetia bacterium
MGLFDFLKDLFNPVKGPPPGKGGPPVSRPGSGGRPVRPLAAGLPPARDTGELAAILRTTPEKVAWLVRETGRHYATWQVPKAHGRRTIEAPKKQLRGVQRAIHREILSRVSPAEAAHGFRKGRSPRTNASPHVAKEMVIKLDLRDFFWQVTRNRVAGLFRSLGYPEDVALVLWRLCCHKGRLPQGAPTSPAITNLVCRRLDARLAAAIRSMNGDYTRYADDLTFSFREARLPMPRLARFLRRIISDEGFRVAPEKTRFLRRSSRQAVTGLTVNAKLSPPRREVRALRALLHEARLRGPEAANRDHLKGFSAVVRGRIEAVRAIDRAKGEKLLAEYRRVSW

SEQ ID NO: 6678 - protein, 342 aa, unidentified
  source 1..342: note = Related to JACPRD010000106.1; note = Planctomycetes bacterium
MGLFDFLRDLFRPVKRPAPDPPPPAGAKAKGPPNRGASPPPAGLPPIESLAVLAGRLGIPQKDLAWLMKPRAKHYHTHEIPKADGRVRKIESPKSRLKKAQRWILREILDRVPAAPAAHGFVKGRSPATNAAPHAFKAIVAKLDLRDFFWQVTLRRARGIFEALGYSGDVAKALARLSCRDGRLPQGAPTSPALTNLACRRLDRRLEALARAFGASYTRYADDITISHRTGCAPLDRLLAWTKTILREEGFHLAPEKTRIVRRGSRQTVTGLTVNARVSPPRGTVRALRALLHEAKTKGAAAANRDGLPHFAAHVRGRVEAVRAVDRAKGEKLLAAWRSVNW

SEQ ID NO: 6679 - protein, 412 aa, unidentified
  source 1..412: note = Related to JAFGQW010000342.1; note = Planctomycetes bacterium
MSLKRWFGRWLATAEHRLERQRAEKRRAGPPPWRYPDPFTGELITPPDDGDRDRLAAAGLPVLSTLEDLSRATGLSWQRLLWLAAPSSAYAGGSPHYTFFTVPKARGEPRIILAPKPALKSVQRWILRNILNRIPLADPVHGFRRGHGTRTNARVHCGKDVVATFDLEDFFHTVTYRRVRGLFRSLGYSTELSVLLGLLTTFRPAAFPYDYMRHVPTLVWLKSMSTARRSWRGHPTTPPFLPQGAPTSPALSNLVARHLDRRLAGLARRLGAAYTRYADDLTFSGHAEFRHGLARFLPLVKRIVREEGFYLATGKQRIRRKGGRQVVTGVVVNRRTNVPRETYRHLRVLLHKAAVHGPESVRLEPAAPTDPGVLRPHLEGWVAWVSHLNPARGARLRRTFEAIAWPAPSGEA

SEQ ID NO: 6680 - protein, 322 aa, unidentified
  source 1..322: note = Related to JACPRC010000174.1; note = Planctomycetes bacterium
MLGITLRDLAWLASAAPLSPPHYVLAVRKKRNGGKRLILMPKKRIKAVQREIHRRILSRHAPSPWAHGFATGRSIRTNAAPHVGKEVVAKFDLREFFHSITFPRVRGLLRQLGYAPDVARTIALLCTFHPGRIRERMRPGGVSYADLAAAFRAPGRYGFRRILPQGAPTSPALANLAARGLDRRLAALAKRFRADYTRYADDLTFSGGAEFHRDLPRFIPLLRSIVRDEGYFLAREKTRVIRRGNCQRVTGLVVNEKPNVPRGTYRELKAILHNCVTKGPESQNRAKVRDFRAHLAGRIAFVKSVHLRHGMRLEETFSRIRW

SEQ ID NO: 6681 - protein, 402 aa, unidentified
  source 1..402: note = Related to JAFDLY010000161.1; note = Deltaproteobacteria bacterium
MDDGYQFKNKRVFLENLRRINQRAGVEPEIIDLIEVRFWGNRIEINDKELQGFLHKNPHLDQRVLNFLASYFLEMKRRGLRCIFTPSHLAHLLEISLKRLHWLADDKRSHYTCFSVKKRGGGVREVFAPKPNLKAVQRQILDDLLHRVRLNSHAEGFRKRRSILTNAKRHVGKKVVIKMDVKDFFPSITFERVLGMFVSLGYPRQVAVLLTRLVTHNGKLPIGAPTSPAISNIVSRRLDRRFSRLGEKAGFDYSRYADDITISSNNKGVNRMIPFFKEILREEGFEANEAKMRILRSGGRQKITGIVVNKKPNLDKHEIRKLRAVIYNCSHKDLRQEAKRWAENEKGLTNPSSYGLREFRSSLKGKVNFVRMVNPETGKRLIEALDYKGSSFFQTPPKAEVI

SEQ ID NO: 6682 - protein, 406 aa, unidentified
  source 1..406: note = Related to QMMZ01000129.1; note = Deltaproteobacteria bacterium
MEQKMDHRYLCNNKEKFIKNLRLFNQRVEVEPEIVDLIEAYARLRLDQGKEIRYYGNRISSKNKELQEFLDKNRHLDHRILNFLASYFLEMQKRSFRCVFTSSHLAHFLKISTKRLNWLANDRIKHYTCFNIKKRDGNKREIFAPMPYLKGVQRKILDDLLQRVGLNSHAEGFRKRRSILTNARRHIGKKVVIKMDVKDFFPSITFKRILGMFISLGYPRQVSLLLTRLVTHNGRLPIGAPTSPAIANIVSTRLDKRFSRLGDKMGFDYSRYADDITVSSDNRGINKMIPFFKEIIREEGFEINETKMRVLRNAGRQKITGIVVNEKPNIDKKEIKKLRAVIYNCHHKDIKHEVKKWAKKEKSLNNPSDYTLSEFKSSLLGKINFVKMVNPKIGNRLLKQLGQLSI

SEQ ID NO: 6683 - protein, 404 aa, unidentified
  source 1..404: note = Related to JAFDLJ010000099.1; note = Deltaproteobacteria bacterium
MYDRRLCENKDVFINNLRATNERAEVEPDIVDLVEAYARLRLDQDNELRFYDNKIWINDKELEQFLDKNRYVDHRVLNFLASYFLEMKKRGLKCILNSSHLAHILRVPRKKVNWLANDRADHYVCFHTKKRDGSKREIFAPKPYIKKVQRQILDELLHRVRLNFRAEGFRKKRSVVTNARRHISKEVVIKMDVRDFFPSINFKRVLGMFVSLGYPRQTSLLLTRLVTHNGRLPIGAPTSPAISNIICRRMDKRFSKLGRKMEFEYSRYADDITISSNNKKITGMIPFFKEIMGEEGFVVNEAKMRILRSGSRQKITGVVVNKKSNIAREEIKKLRAVIYNCGHKDIKQEMIKWARNEKKLANPYGYTLSQFKLSLLGRIGFVKMVNPGIGNKLLQQFDTLSLNA

SEQ ID NO: 6684 - protein, 415 aa, unidentified
  source 1..415: note = Related to JACNHB010001573.1; note = Deltaproteobacteria bacterium
RQKMAGGLHCKDKESFIKHLRIINQRAGVEPDIIDLIEAYAGLRLNQDEEVRFFDNAVNIKHIKDKEIKEFFDKNRRLDHRILNFLASYFIEMKKRGLKCILNSSHLVHLLELSINEINWLANDGKNHYRHFTRKKRDGGTRDIFTPRARLKEVQRHILDDFLHRVRLNSHAQGFRRKRSIITNAARHIDKNIVIKMDAKEFFPSITFQRVSGMFASLGYPRQVSVLLTKLVTHRGRLPIGAPTSPAISNIVCRRMDKRFARLGEKMGFDYSRYADDLTISSNNKKLTKMIPFFKEIMRDEGFEVKEAKMRILRNSGRQKVTGIVVNKKRNIERKEIKKLRAVIHNCKHKDIRQEAITWAKREKKLDDPYAYTLREFKSSLLGKINFVKSVNPEMGGKLFQQVTALQFPEPRKMG

SEQ ID NO: 6685 - protein, 404 aa, unidentified
  source 1..404: note = Related to JAFGES010000121.1; note = Desulfobacterales bacterium
MIDKTLAGKKQECIKNIRFINQRAEVEPEILDLIEAYAGLRLEEDNEVLFYGNKITGKNRELNEFIDKNRHLDPRALNFLASYFLEMKKRGLKCIFSSSHLSHFLKISTKKLNWLASDKEDHYISFSEKKRGGGIRQIFAPKSTLKGIQRQILDFLLQSVPLNSHAEGFRKKRSIVTNAKRHIGKKVVIKIDAKNFFPSITFERVLGMFVSLGYPRKVSLMLAKLTTHQGRLPTGAPTSPAISNLISRRLDKRLAGLGEKMGFDYSRYADDMTISSNNKNASRMIPFFKEIIREEGFESNEAKLRILRSGGRQKITGIVVNQKVNVDRKQIKKLRATIYNCRHKDIKQEMIKWAKKEKNLKNPYGYTLKEFRASLLGKINFVKSVNAKAGKKLLKQLDELSLKT

SEQ ID NO: 6686 - protein, 402 aa, Desulfobacula sp.
  source 1..402: note = Related to JAIOSW010000149.1
MDKKKSCGNKKQYLKNLRLINQRANVDPEIIDLIEAYARLRLDYDKEICFYSNKTSSDKLELNKMLAKNRHLDPRCLFFLKAYFIAMKNKGLTCLINSAHLAHLLNVSIDHLIWLSNDKSNQYTRFHIKKSSGAKREILAPKPKLKIVQRQILDNILQKIQLNSHAEGFRKKRSILTNAKRHIGKKVVIKMDVKNFFPSITFKRVLGLFIALGYPHQVSMTLTKLMTHDGKLPTGAPTSPAISNILSTKLDKRFANLGEKTDFDYSRYADDISISSNNRNITRMIPFFKKIVQEEGFEINEAKMRILRNGGRQKIAGIVVNQKLNIEKREIKKIRAVLFNCRNKDINQEIKKWAQKEKGLKASLFYTIDEFKSSMLGKINFIKMVNPQTGQNLLDQLNDLNA

SEQ ID NO: 6687 - protein, 407 aa, unidentified
  source 1..407: note = Related to VMSU01000220.1; note = Desulfobulbaceae bacterium
MALCTKQETYLNNLKTINTQAGVEPDLVDIIVAYARLRLERNLAITFYQEGIEKKTTKYPSLRTIIDKNQEADPRALNFLAAYYLEMDRRNLLCIFNRQHLAVTLGVSISNLEKQASTASSKYSHFFAPKKSGGQREILAPHPELKALQRKILDSLLDKVPLNAHAEGFRRKRSIVTNAQRHPDKKIVIKIDIKDFFPSTTANRVFGMFAALGYPKNIAAILTDLTTYQGRLATGAPTSPAISNILCRRLDKRFARLGQANDFSYSRYADDLTISSNHPKVTTMIPFFRQIVSEEGYTVNEKKLRIMRSGSRQQVTGIVVNQKLNIPRHEIRKLRAVIHNCKQKSLKVEIHKWAKLEKNHPNPTLYTEDDFEKSLSAKIHFVKMVNPSAGTKLLVDFKSLGLRTVVA

SEQ ID NO: 6688 - protein, 404 aa, unidentified
  source 1..404: note = Related to JADGBM010000020.1; note = Desulfobulbaceae bacterium
MALCREKEQYLKNLRLVNLRADVDPELVDLLVAYAGMRLENNRDVNFFQDDVKERAGKHPYLLRFLQKNKETDPRALNFLVSYFLELKTRGIPCVFNRQHLADTLGISLVAMDELAQNSPKYYTRFSAAKKNGAQREILAPKAELKTVQRKILDFLLIKVPLNNHAEGFRKNRSIVTNAQRHTDKKVLIKMDIKDFFPSTKAKRVFGMFFSLGYPEGVASTLTNLTTFKGRLATGAPTSPAISNVLCRRLDKRFARLGEKCDFSYSRYADDLTVSSNNTNLAGLLPLFKEIVLEEGYELNENKLRIMRSGSRQKVTGVVVNIKPNIDKNEIRKLRAVVYNCRHKDINKEIYKWAQMEKSHPEPSQYTLDTFKRSVSAKINFVKMVNHKAGEKLLADFKALSWPG

SEQ ID NO: 6689 - protein, 438 aa, unidentified
  source 1..438: note = Related to nan
MPNLASHVPVLSQVRDNSIKCPGIIFFPKNNLKIMTECTEHSIFLRNLVEVNQRAGVDSEVLDLIESYARLRLGRNREVDFYNCSRPVSEKDQDLRAFLEKNKNLDERTRNFLVAYYQELKDRHLCCIFSSDHLAHLLQTSLPRLHALTRDSRNYHVFTIKKSSGADRIIQAPHKQLKTVQRKILSTILHPVPLNKYAEGFRKKRSILTNATHHVNKKVIVKLDIKDFFPSIDSNRVFGMYLHLGYPRRVAQLLTDLSTVQKKLPTGAPTSPTIANIISRRLDKRFVRLGMKTDFTYSRYADDITISSDTDNILKMIPFFKEIIHDEGFTVNEGKIRILRSGSRQSVTGVVVNEKPNIKRREIKKLRAVLHNSKRGSLHKQAAIWAMREKGLKNYRSYSVVDFYQSLLAKIHFVRMINEKAGNTLLADFYRIPWPVIT

SEQ ID NO: 6690 - protein, 319 aa, unidentified
  source 1..319: note = Related to MVDA01000360.1; note = Desulfobacteraceae bacterium 4484_190.1
MEMKNAGLTCLFTCSHLSHILDVPLKRLRFLARDNGSYYKFSIPKANGTKRVIMAPKPDLKVVQRKINHLILQKVRLNNRAEGFRKKRSIVTNSLHHLQKKVVVKMDIRDFFPSIDFERVFGVFCSLGYPRGVSLLLTDLSTCQRVLPTGAPTSPAISNIICRKLDKRLVLLCEKSGFEYSRYADDITVSGNSEQVVKMIPLYRRIIVDEGFKVNEEKLRITRSGRRQKVTGIIVNRKMNIDRREIRKLRAVLNNCRHGSIEEQADMWASREKKCTAPFNYPVEKFKKSLHARISFVKMVNPQMGHRLLDEFHSVFSAG

SEQ ID NO: 6691 - protein, 404 aa, unidentified
  source 1..404: note = Related to PQAM01000010.1; note = candidate division NC10 bacterium
MARWDEDKEAFIRNLIQVNLRAGVEPELVDLLAAYARIRLQQGDKVTFYSEDADLPGSRRKAVRALLEANRHLDPRALSFLSTYAEAMVQRGLIPILTRTHLAKLLEVSENELSDLATCTDRYYDVFSIPKANGQRRKIQAPRPPLKEIQQRIAALLERVKLHPDAHGFRGERSILTNARLHLDRQVVINLDVKDFFPSITFERVLGCLGSLGYPHGVALLLTQLTTYHDVIPTGAPTSPILSNLICRRLDLRLSRLGDQLNFRYSRYADDMTISSEDGGIVRRLPFFKEIIREEGFEVHEEKIRVMRKGSRQQVTGVIVNEKPNLPRQELKKLRAVIHNCLTADLETQRIRWALTEKGLQDPDGFAMEAFRRSLCGRVSLARMVNPRAGVQLLDMLKRVEWRI

SEQ ID NO: 6692 - protein, 391 aa, unidentified
  source 1..391: note = Related to JAAYUU010000189.1; note = Deltaproteobacteria bacterium
MECSHEEFVSNLVEINQRAGTAPELIDLLGAYTRLCLKRSKEIEFYSDSLTLSTNKAAIRKFISQNRHIDPRSLSFLVSYAEMMLDRNLPFIFNIAHLARFLDLDKENLLRLIQNKESYYHSFYIPKSHGGKRHICAPKAELKAIQKGILTEILEKVFVHPCANGFRRGRSIVSNAQNHVGQEIIIKMDIKDFFPSITFARVKGVYLDLGYPEGTAEALTELSTYKGRLPMGAPTSPYLSNIVSSRMDRRFAGLAQKMDFHYSRYADDLAFSSNDPTFNRWIPFFRHIIEDEGFEVNEKKVAIARKGGRQKLTGVVVNRKINTQRDEYKRLRAVIHNCLNGDIQEQMKRWGVSELDRFKNSLRGRISFVRMVNREKGNKLLSGFERISWPA

SEQ ID NO: 6693 - protein, 391 aa, unidentified
  source 1..391: note = Related to JACQXB010000006.1; note = Nitrospirae bacterium
MKCSDEQFISNLIELNEKAKVAPDLIDIITAYARLCQRYGKEVKFYDKNPAISTNKPTIKDFIDKNPHLDKRSLSFLVSYAEMMRKRGLPFIFNITHLANFLEVEDVRLKQLIKYKEKSYHNFYIPKSNGGKRLISAPTDHLKTIQRKILKDILERVSLHPSANGFRIGRSVTTNAEKHTGQEVVIKIDIKDFFPSITNQRIKGIYVNLGYPDGVAETLTGLSTYKGRLPMGAPTSPYLANIVATRLDRRFANLSKKIDFVYSRYADDLAFSSKDKTFARSIPFFKKIIQDEGFEVNEEKVVIARKGGQQKVTGVVVNRKVNIEQKEYKRLRAVVHNCVNGDLREEMKKWGASSLNEFKSTFLGHINFVKMLNNEKGYRLLDGFRQISWPV

SEQ ID NO: 6694 - protein, 376 aa, unidentified
  source 1..376: note = Related to MEOY01001140.1; note = Bacteroidetes bacterium RIFCSPHIGHO2_02_FULL_44_7
MANCPDERFISNLIELNKRADVDPEIIDLVAAYARLCLKDGKELNFYKEYLALSTNKPTIQRFIEKNASLDKRSLSFLVSYAEMMRKKRLPFLFNRAHLAIFLGTKEGEIEAIIQNKESYYHTFFIPKRNGDERRITAPKDRLKEIQKTILRKILEKVSVHFAARGFKRRSSIISNAHGHIGQEILVKMDIKDFFPSITYERVKGIFINLGYPEGVAEALTELTTYKGRLPMGASTSPYLSNIIAIRMDKRFTGLAKKMDFTYSRYADDLAFSSKDGNLKRHIPFFKEIIKDEGFEVNEQKVVIARKGGQQKVTGVVVNRKVNVEKREYKRLRAVIHNCKKGNLKTEMAKWGASNPGEYELPRSKLTGYQKNVNCC

SEQ ID NO: 6695 - protein, 880 aa, unidentified
  source 1..880: note = Related to JABMMJ010000725.1; note = unidentified bacterium
MKKEKQATRTLSNPIQNDVLKNRLQSIFRSFRKADRTDIKSVEDALDRLQFLAFPEFYQACLFLLCIECERCVEANVPPSVIRAERIVQAVEAKAAAGMQGRLAYWINQKLTTSYPLGLVQRLTAYSHKINESRNTQCITLVDAGRHEEALAVAESIEDTEQQSKALCAIAADFARLSQKETADPLFKRALDLIEIFYAYTFEDADESGYGGDYDEYLQVKGKCTRYMVGKMAEIGWFKRAEELSNNIEDEWLRSEAFCNIAKDLAASGHLSESFEAAARSGPHQSIALGCIAETIAKSGNFFQALNVFSKANDLAAEQQGLWKSKCLLSVAAGLVIIGTKNKARKVAEQASEVIIDSIKFYEDDVNQPADMRIRFVMDLMEVGGFETGIKVQIEPIHETLDLLAQYKSWFRVLDRIFSSGSIDALLFKCYLNGFASSAVFGNNRALMMRLIREACHMVSSDEKPEVFLALSNELALLGINDMRDDAIVRAIVAGSDHLRMQREEYIKNPTPSLPDNQPHAEEPLIPEEWPQENTRISNILGISVEMLRLVRLKVIRAQGYDAFRIPKRRKGFRVIHSPHSDLAHIQRRIKECILDPAPGLPSCVTAFRPGVSIRDNAMVHCDKAVVVKFDLEDFFPSISFTRVMGIFHSLGFPTNEARMLANLTTVHLDVSSSGPVVKSVSRSAEAFYQTKHLVDLLHEYPVNIRLLAYRWNYGKISRALALRMLRKRRRRGLPQGASTSPQLANLAAVRLDLRLRALGESMGFAYTRYADDLTFSSNERLAKVDALTSLVDEIVVDCGFRLNGRKTKIMRAPATRRVTGLIVNTTTPKVPRSMLRKVRAMLHQQAGGKLSEADIHRLRGYLSFVRMIDKEQADLLLDC

SEQ ID NO: 6696 - protein, 384 aa, unidentified
  source 1..384: note = Related to JADLCW010000072.1; note = Thermomicrobiales bacterium
MPANRALGLPAIEHRRGNTPKRGIAPTTQQESRWRSGSSIRIRWTGDARVRSGDGFVEPLDFRSLDSADDVARMTGLDIEEIRAIAWRTEAPRGGWYRRTLIPKRQGGFRLISTPIPRLAAAQRRILAAIGPHFPVHPAATAFRLGMSVRVNAACHTGRPIVVRIDLADFFSAVRFGQIHRAFECAGCTHEAARILASLTSDVAATVRPRGHRTLVVAGRGGLPQGACTSPVLANAICWDLDEDARTLGRRLGFTYTRYADDLVFSAGNSRAPVDTLIRETRRIIQAYGFHVNEAKTRVMRAGGRQVVTGLVVNGSEPRVPRPDLRRFRAFLHHCETEGLDVMSERIGKDALNYARGYLAWVHMVSPEQAARFRARHPWLGGHG

SEQ ID NO: 6697 - protein, 310 aa, Roseobacter litoralis
  source 1..310: note = Related to NZ_LGTP01000055.1
MNAAEDSLDLQDISSFLGFAPQHIFYLVEDPDKFYTTIRIPKNSDPLTYRTLDIPYSELKGVQRVINRKILQKLPLNDCAFSYVSGKSIYAAAHEFCGGKAVLKMDIADFFPSITGQRVLGLFKSLGFNQSISYILSQLCLRNNCIAQGAPTSPAVSNLIMRRFDRQMEKLAASWEMSYLRYSDDVFLYKNKNFNHPKLAFYVTRIIEQNGFAVNQSKTRFHPRGQPRITLGLLTHGDKPSIPGPARRQYRAAFHRASRDFEWAYHNEARLKGILEWYKSVHGKDDAYNHYSSIHKNINTLKIHTSYRSQ

SEQ ID NO: 6698 - protein, 310 aa, Loktanella salsilacus
  source 1..310: note = Related to NZ_FOTF01000017.1
MNAAEDSLNLRDISSFLGFAPQHIFYLVENPDKFYTTIRIPKNSKPHSFRTLDIPYTELKGVQRAMNRKILQKQPLSECAYSYVSGKSIFSAAREFCGGKAILKMDIQDFFPSITGPRVVGLYKSLGFTDSVAYILSQLSLRNNSIAQGAPTSPAISNLIMRRFDRHMENLATSWEMDYLRYSDDIFFYKDRNFNHPKLEELATQIIEHSGFTVNVAKTRYHPRGVPRITLGLLTHGDRPRIPGPARKQYRAAFYRASRDFEWAYANKSRLKGILEWYKSIHGKDDVFNQYSAIYRNINTLKIHTSYRSQ

SEQ ID NO: 6699 - protein, 324 aa, Pseudosulfitobacter pseudonitzschiae
  source 1..324: note = Related to CP054599.1
MRFIAWHREREEVGMGAADDCQDLASIADYLGFAPQHIFYLVEDPDRCYVSIEIPKNSDPTKLRKLDIPISELKGVQRAINKKILSEFPVDECVHSYVPARSILTAAREFCPGRAVLKMDIEDFFPSITFVRVLGLFKALDFSDSASFILARLTTFADRLAQGAPTSPALSNLIMRGIDFRLKRLAATWEVKYLRYSDDIFFHKEKNFNHPKLTAYLSKVIEDGGFTANNKKTKYHPKGLPRTTLGLLTHGEKPKIPGSQRRIYRSMFFKASRNIHWAHENREKLRGIIEWYKCVYGRDDTYTQYRAILDNEARLRIHDTYQSK

SEQ ID NO: 6700 - protein, 310 aa, Litoreibacter ascidiaceicola
  source 1..310: note = Related to NZ_FQUV01000014.1
MDAAALCLDLETLSGFLGFAPQHIYYLVESPESYYTTISIPKKSDPMKVRQIDIPFSELKGVQRAINKKILSELPMSDNVHSYVQGRSILTATKLLCPGRAILKVDIADFFPTITYRRVFGLFRRLGYNDAAAFILSRLCTKDDKLSQGAPTSPAISNAIMAGLDKRMERLAETWELKYLRYSDDMFFHKERNFNHTRLADVASSVVESSGFIINSSKTKYHPKGLPRITLGLLTHGPEPRIPGPQRKKYRAAFFRASRNINWAYERQAQLKGMLEWYKCVQGRSDEYIQYQAIFENIERLKIHDSYRSR

SEQ ID NO: 6701 - protein, 306 aa, unidentified
  source 1..306: note = Related to JAHBZD010000048.1; note = Xanthobacteraceae bacterium
MIAAQIQTLEDLSGALGFAPQHLFWLAGNSDALYKEFDIPKRTGGVRRISTPIAELKGVQRTILQRVLQLHAVSDANFAYVKGKSAVAAARRLAGEKSLFKLDIREFFPTITARRVFGLYRSFGFPNPTAYLLTSLTTYRGSLCQGTPTSPYIANLICRGMDTQLSGLASSWGLEYIRYSDDLFFYRNRIFNWSKFEGVVTRIVVQNGFHLNANKSRFYRAGKDRLTLGLETGQRQIRLPRATRRLHRAAFHKASMSPRWAADNLPQLNGMLSWHRAVHGKDDTASAYGRVLQIATSIKHHDPYST

SEQ ID NO: 6702 - protein, 308 aa, Magnetospirillum gryphiswaldense
  source 1..308: note = Related to NC_023065.1
MTTAALSLELRELSSELGFAPQHVFYLVKCADELYFDIEIPKRTPGEFRKISVPRTELKGVQRAILRKILSSHEPSEFAHSYIKGKSVISAAKKLLGEKAVLKVDLKNFFPAISARRVFGLFRALGFSNKKAFILTKLTTYKGTLCQGAPTSPAISNLVCRSLDKNINALAISWKLNYLRYCDDIYLYHRINFNSDKLLTRLRRTVNDHGFSLNEDKTRYYAAGNPRITLGLSTHGRVLRLPRAMRREHRAAFHKASTSPTWAEANLSKLRGMAEWHKAVYGSDATYKHYREIIKNVPLMKVHEPFAI

SEQ ID NO: 6703 - protein, 302 aa, unidentified
  source 1..302: note = Related to JAIELX010000020.1; note = Candidatus Obscuribacterales bacterium
MISSVDDFASRIGLSEFCLKRLILRSESFYSSFSLPGRSGRRHNISSPATELKTVQRWILKNVLSRFELHEACVEGRSRSTPNADSFVLKASLKSFFATLNRARVEGLFRSLLFPESVAVSLARLTTFLNALPQGAPTSVYIANLICRRLDRRVNGLCGVRNWSYRRDCGDIVICGQGRVTDKVLEQLTQIAREEGFDIEIHKRTSCNGATDGDSKTGPVTGRVSSQGADLSFRRLRRTKSQRRIVGRPARKQSRARSSFASRLPELCGLDRSFTGSARQKRVRAELRLLFNSAVGNSSNTR

SEQ ID NO: 6704 - protein, 323 aa, unidentified
  source 1..323: note = Related to JADJWK010000004.1; note = Candidatus Melainabacteria bacterium
MSIRFGIAERLVLLLVIKMIETSRSIKMDNLLETLEISELELKRYALRAEKNYHELHRLKKSGKTRRVVAPSAELKGLQRKISRRILRHHDLQDSCTGYRPGHSIVTNARPHTGKRFVLNIDLKDFFPSISFNRVVGLYQNLGMDRNAARLLARATTYKGALPQGAPTSPDIANLVCRTLDKRLEGFCKIRQWSYTRYCDDITISGDTCTDGAMDTLRTIIESEGFRINEDKTRMRMSHQRQTVTGVVDNERPNLEISERRKLRTICHQLRWNPESFEGLGKKLMGSLSFANMIGGLLRKSEFQSAWRLLKKKHHEARHASTT

SEQ ID NO: 6705 - protein, 366 aa, unidentified
  source 1..366: note = Related to JACKCM010000002.1; note = Candidatus Obscuribacterales bacterium
MFRQPDVVGNFQLTIKLLGLGSNSVMHESSNAGNERLERILPSGVKESFPVFYFCEFVHRREAGVLPVPYMYDIQTVAQLANALDSSEFELLRFIYRAEEFYTRFRKKKSTGDMRTVAAPRKPLKAVQKAIVKKFLADIPLPDECTGFRPGMSILSNAQPHCKKRFVFNTDLEDFFGSISSERVLGLYLRLGFSFPVACVLTELTTYIGCLPQGAPSSPYLANLIAYSMDADLADFCAANEWSYTRYCDDITISGNGNFSLADMRTISDIVEVEGFRMNIKKTRFHKHNSKQMVSGLVVNEKPSLPRAKRRKIRAIFHQAEVEPERYGNRVKELENHLSILSMLDPQSKEVEKYRTVLNRLISQAK

SEQ ID NO: 6706 - protein, 305 aa, unidentified
  source 1..305: note = Related to JAIERK010000069.1; note = Candidatus Obscuribacterales bacterium
MTTIRRMDIFELVEQLETSELHLRHLATRSERFYREFVVAKKSGGGRKIVAPSDDLKDMQKKIAVLLLNKVDLHEACTGYRNGKSIIDNAQPHVGQHFVLNMDLKDFFPSISSNRVTGLFYNLGWERPVAMLLARITTYKGSLPQGAPSSPAIANLLCRRLDTRLSNFSRVRGWQYTRYCDDLTISGQGTPDSDTDTIYSIIESEGFTVNLDKTRTRFKHQRQVVTGIVVNQEVRIPREQRRLLRAICHQMSMEPESFRGVSNQVLGQLSFAQMVEGQNAPETYRESAQCLLDAKKLARQAGATY

SEQ ID NO: 6707 - protein, 318 aa, unidentified
  source 1..318: note = Related to DNIL01000199.1; note = Armatimonadetes bacterium
MLIASSCRQREPLTACDGHPTLRGGARMLQTTDDLAALLGVETATLVKLADPARTRWRHHTVPKRSGGTRHLFEPPHALQVVQRAIGRKILDRYTPHDAAKAFRRGASVVDHAHQHVGQAFVYSTDLRDFFPQINIRRVRGMFLSLPGLDCSPSVAELLARLLCWRGCLPQGAPTSPAIANLIAYRLDLRLTNYCQRRGWTYGRYADDITISGRGRFTARDQRWVEGCLAAEGFPVNPAKTDLRRQHERQTVCGLLVNDRVRLPRQTRKQKRATAHALTQSTDPETRTAQAHGNLGWLKMVGNEQALVTQFQVAVDKS

SEQ ID NO: 6708 - protein, 300 aa, unidentified
  source 1..300: note = Related to JAIEQI010000031.1; note = Candidatus Obscuribacterales bacterium
MPSLSKTLPTIATLLDLAEFLSVSEFELKSFCLRPKKFYNTFERPKRSGKGCRKICAPSEKLKSVQKIIKEKILDCVDAHESSTGYKRGVSIVENAQVHVGKRALLNLDIENFFSSISMPRVIGLFASLGYTEDVAIMLGRLCCFEHALPQGAPTSPSLANLICHKLDRRLKGLAFKSHMQYTRYCDDITLSSDENISGKFVEVVKEIIKDEGFSVNEDKTRVLSQRSCQIVTGLTVNQKVNLPREKRRLIRASFHRASQQTALTDAEQKRLEGLASFMQMIEQHCQKQRRRVSPTDIKS

SEQ ID NO: 6709 - protein, 360 aa, unidentified
  source 1..360: note = Related to DPCG01000093.1; note = Lentisphaeria bacterium
MGILSWMFGIKSKKYNYSKVEKALGPWQPYAGSSVIHGTMLPKSFTIPPALKKKRDEPDLTTFSSALFPYWLRIDPSLAGFVLMKINSGEMYRQKEIPREGKAPRIISVPAPVLKFIQKRILARMLEQIEIHPAAHGFVKGRTIFSAAEPHVGKRIVLSIDLRDFFGTISFKRVAGMFKAYGIAKKQAFLLAGLCCCQKKLPQGAPTSPAISNIVCRRLDSRLAGLCKKYDFSYTRYADDLIFSGDERMLRFLKVFKEIVQKEGFAVADEKTFIRRSGSRQKVLGLNVNSKVSVPRKARRLIRAMVHRQAQEGSPDGEMVDFLLGHAAFMKPAHPEQSAKLKETLDKTWKAYLVSCIANK

SEQ ID NO: 6710 - protein, 348 aa, unidentified
  source 1..348: note = Related to MHBH01000069.1; note = Lentisphaerae bacterium GWF2_49_21
MGLLNWLFGKKSHKYNYGRVEKILGPWKTYSGTLCIPGTKLPKSFTVPPSLKKNKDDAEQTTLSAALFPYWLRIDPSLAGFVLSKIKSEEMYKQKEIPREGKAPRIISVPAPILKFIQKRILARMLEQIEIHPAAHGFVKGRTIFSAAEPHVGKRIVLSIDLRDFFGTISFKRVAGMFKAYGIAKKQAFLLAGLCCYQKKLPQGAPTSPAISNIVCKRLDSRLAGLCRKHNINYTRYADDLVFSGDGRMLRFLKVFKEIVQKEGFAVADEKTFIRRSGSRQKVLGLNVNTKVSVPRKARRIIRAMVHKQSQEKKPDDEMIAFLLGHAAFMKPVHPEQAAKLKNILENL

SEQ ID NO: 6711 - protein, 348 aa, unidentified
  source 1..348: note = Related to RFGW01000551.1; note = Bacteroidetes bacterium
MFKYLKNILGVKSRKKYNFFRINRILGDWQPYSGSKCIKDTKLPKYLDLPKDVEKWGDYSGQVPLSTVIFPYWLRLSSEIAGFLVKQVNSGKLYNDIEIPREGKDPRKISSPHPLLKFFQRRILTRLLEQMEVHPAAHGFIKNRSIFTALEKHTGKRVVISLDIRDFFDTITFKRVCGLFKGYGIKEDKALLLAGLCCRNGRLPQGAPTSPMISNLICKKMDSRLTGLAEKNGFSYTRYADDLIFSGGENILKFLPIIKQIIKEEGFTPAEEKTKIRRSGSRQQVLGLNVNSKVSVPKKVRRLIRAMVHRQALSEGRNHEMLSFLYGHIAFMSNKHPEQAEKLKRQLI

SEQ ID NO: 6712 - protein, 350 aa, unidentified
  source 1..350: note = Related to JABIYZ010000168.1; note = Lentisphaerae bacterium
MLNLLRKLFHLPPARRRFPSQAIEDVLGPWEPYAGDDVLPRSRLPARLELPPAVAEWGDVPGARRLDRVLFRCWLRLDPTLVGFLLSQIQQGELYTVHEIDRPGKAPRRIAEPDRVLKFVQRRILERVLEQMEIHPAAHGFVKGRSIFTNAEQHTQKAIVIALDARDFFPTITFKRVNGMFIKSGFAADTAGKLAGLCCFRGRLPQGAPTSPMISNLICRRLDGRLSGLLTKFGGTYTRYGDDMTFSGPEQILSLLPLCRRILAEEGFELAPEKVRICRRGSRQTVTGLVVNDKVSVPRRVRRYIRAMVHAQSRSDHPDEDMVRFLRGHLSFMRPAHPDQAERLLQQLNT

SEQ ID NO: 6713 - protein, 361 aa, unidentified
  source 1..361: note = Related to MWEK01000004.1; note = Planctomycetes bacterium ADurb.Bin069
MDFVAYLIMDLIRLLTNRKEKPYDRKRVDKTLGPWSAFKGPSAECIPGTRLPRKIVWHRPRLLFGRKREEIDFAIGVMTHWLRLEPKLMRFIAYFLRDTEKYKVREIPRPGREPRRIEEPMALLKFVQRRILRRILEQTDLPDCVHGFVRGRSIGTAAAPHAHKEVVVCCDIENFFPTITVRRVWGVFRSLIVNPRVSNLLAALTTYQGRLPQGAPTSPMIANLVLRRLDRRLAALTRSRGIEYTRYADDMIFSGGPDTPKILKAVRAFVAEEGFTLNEKKTRILRRGRRQEVCGLVVNERVGIPRLWRRRLRAEVHRLATGRDGAKAAPARLRGELAFLQCFHPEEAGKHARKLLALLKQ

SEQ ID NO: 6714 - protein, 358 aa, unidentified
  source 1..358: note = Related to JAAYDY010000039.1; note = Phycisphaerae bacterium
MGLLDFLRNLLSPQRGSDESPALNHSDTRPKTADASPSQAEAPATPAVRIRRRRPLLPRQLGSPPTFRRLMAALRLSHVRVRRVMHSKAPYHTFTIAKHNGSLRDIAAPCRSLRHIQRRILRRIVEPLDTHLAVHGFRRGRCSLTGARRHVGKEAVLAMDLQDFFPSITSQRVYGLFRKLGWPPNLASVLTRLSTWQGRLPQGAPTSPALANLIARRMDRRLAGLARHRGIYYTRYADDLTFSGPADAVRSAIPAIRMIVKEEGFRPAEHKTRLMRCGRRQVVTGLVVNRQVSVPRDYRRRVRAALHGIRTGRTTFATPADRATTLRELEGHVQYIRSIRPEHGDPLAADLYAAETGQ

SEQ ID NO: 6715 - protein, 347 aa, unidentified
  source 1..347: note = Related to JAFGPY010000175.1; note = Planctomycetes bacterium
MGFLDFLRDLFSPKSSPGEHPSSARPGERTRHKKGVRSAPLLPESLGARPTFHCLVGTLGLNHVRVRRVMHSPHAYHTFTIAKRGGKLREIAAPCRSLKHIQRRILHRIVEPLDRHAAVHGFRRRRCSLTGARRHVGKEAVLAMDLQDFFPSITSQRVYGLFRKLGWPQNLASALTRLTTWQGRLPQGAPTSPALANLIARRMDRRLAGLGRHRGIYYTRYADDLAFSGPAEVVRSAIPSIRTIIQEEGFRLAEHKTRLMRRGRRQVVTGLVVNEQVSVPRDYRRRVRAALHNLRTGRTTFAAVAERAAALRELEGHVQYIRSIRSEHAKHLEADLYAAADGIQRCL

SEQ ID NO: 6716 - protein, 370 aa, unidentified
  source 1..370: note = Related to JAADGH010000108.1; note = Planctomycetes bacterium
MGFLDWFLRKIIKPKVLDGWARARRRGQINALRKKRERARAICMLPQDGRLPTRKARNPMTGRTIEVEYDDGLKGIAKALGLKPSRVAKLSFSPKKLYTTFTRPKPAGGERTIHAPVRSLKYVQRRILDRILNWVDLPDCVHGFRRYRSLATGAAEHVGKEMVLRMDIEDFFPSIHFGRVLGLFRSLQFSTKHAFILARLTTADGVLPQGAPTSPAIANAVCRRLDRRLMGAAQKQGISYTRYADDMTFSGPAEEVKRLVPFVRKVVGEEGFTVADKKVRLMRRGRRQIVTGVVVNDKLSVPRYYRRWLRATIHHLRTRGATPDGLTAAQLRSSLLSHAHYIKMVNADQGNRLLADLREVLGQQGGKGNR

SEQ ID NO: 6717 - protein, 302 aa, unidentified
  source 1..302: note = Related to JAFGGJ010000038.1; note = Planctomycetes bacterium
MGILDWLARLLRGGGESPFAAGRKGPRLGLKLNRLWHLARNVEGHYSEFDLEMPGGRKRRIEAPDGKLRWVQRKILRNVLDRQEQGPCCHGFRKKHSIATNAAGHVGKEMVLAVDIEDFFPSITFPRVYGLFKSMGFDRGRSALLAKLTTRNGTLPQGAPTSPAIANLLCRRLDRRLGGLAAKARMTYTRYADDLTFSGSADAAKYLRLIVEIVKEEGFALNPAKTRMMRRNRRQEVTGLVVNDKVGLPREWKRNLRAALHHLRTGRPASDGPEKIHGKLAFLKMVHPEQYVRELAALKALS

SEQ ID NO: 6718 - protein, 494 aa, Fundidesulfovibrio sp.
  source 1..494: note = Related to NZ_JAKZKW010000001.1
MSDLEQLLVGLDAESASGRMHAIQRSTAYDKPTRSAFLLKALEHWDRKVREKSAKILLKIGGDLELAAVCSAVDSRKVPLLRLIPWLARRNHALTTRTIYNLTQHSHKVISEAASKYLIKMDTTEALFYRWSKQSRIPKKLAAQIEACACERVASVLSDIPVSVIHTLRGKFLRYPLLKKYYHDKYSDSRPQSSKETVSPKAPKVQSEYVQSWNKLGIDWRIAGWIVRNWSDLDDVGYFEFKIPKKNGTERIISAPVTPLKIAQRVVLDKILSTVPQHDACHGFRKNFSIITNATKHTGKDVVIRIDLKDFFPSIKPARIAGIFRSLGFSDFEIRFLTRVTTRGGGLPQGAPSSPCLANIVARRLDSRLNGLAASVGGTYTRYADDLIISGHKNVVSILPAVKSIIQEEDFGIASEKLRIARKGAQQKVTGLIVNQCVNAPRELRRKLRAVFHKQSKGEVPYWGNKPMSESQMRGYQAFLSSIEKSKTDQHEKL

SEQ ID NO: 6719 - protein, 451 aa, unidentified
  source 1..451: note = Related to JAGOOG010000002.1; note = Deltaproteobacteria bacterium
MTKKANNNASDMFGAVAEKRYSAVKRVSKLPVEEALPILKKGLKHWDRKLRNMCSREIVRKLGGKAASIVLPLYVKGLLSRSSSYEQLLRKEDATLTGYVLRRSRRKDSLGQVCKGLYSQTKHYKRIQEKQTKRDQELLADNDRAGQTWVAQKISPWDLLKERFSILKELKENTAQFVLGHWYRNNTFDDLYDTFEIPKRSGGKRKIEAPKPALKLAQKAILEKLTSDVRLHDSCHGFRRAHSIVSNAKPHVGKAVVVNLDIKDFFPTISAARVFGIYRSFGYKNEEASFLTALSSFNGRLPQGAPTSPMLANIACIRLDYRLSGLSNTIGADYSRYADDLTISGPESITKYIALIRKIVEEEGFALALPKLRIHRRGARQEVTGLTVNDRVSVPRVIRRRIRAALHHVNQGKEATWKGEPMSLESLTGHINFIKSVHPDLGQALFNSLPQ

SEQ ID NO: 6720 - protein, 340 aa, unidentified
  source 1..340: note = Related to JAGFXW010000209.1; note = Firmicutes bacterium
MDKRSSAADRKGNDFVEPNGDLVKSAGNGWLFDLSRELDISCRDLGWLHGTWGTWNQWYKTYTVPKKTEGFRVICAPQGLLLAVQRKINDVILKEVVLSSCCHGFVKERSIITNAAAHVQKEVLLSLDIKDFFSTITANRVFGVFKSLGRSPEEARFLTRLCTYNGCLPQGAPSSPAIANRACNHMDKRLAKLAEYHRAAYSRYADDLTFSGDKPVLRLLPLIKAIVAEEGFAIAEHKTRVAKQNQRQVVTGLTVNSEIKVRRPEKRRIRAILHHAACRRSTTSHQVPIGVQEIRGYYSFLKNVEPEYAAKLYLDLHEKYLMLDLAPETNPFWLSQRSSR

SEQ ID NO: 6721 - protein, 324 aa, unidentified
  source 1..324: note = Related to JACOTF010000024.1; note = Planctomycetes bacterium
MIEILEYILAPIGGLIVLVVIAISIFRFTRATNGHFWHWLRAMLGWGKDIREVAARLGMTEQELRNVSPSFREVFVPKKRGGQRRLLVPDADLKSLQRRILHRLLKKLRAHPAAHGFERGRSIVTNALPHKGQRVVIKIDLVDFFTGTKANRIEQYFRRIGWNADVAALLTRLCTAEGSLPQGAPTSPRLSNLVNFNMDSRIARVVQQRNGQYTRYADDITISFPEDYPSRIRGVIQRVKRIVKQFGYRIHVRKKLQILRSHQQQRVTGLVVNRKVQLPRKVRRWLRAVQHRLKTRGSSTLTAKQLAGWRGMQIMIEQQRQRTG

SEQ ID NO: 6722 - protein, 324 aa, unidentified
  source 1..324: note = Related to VGZI01000118.1; note = Planctomycetes bacterium
MIELFEYIAASAGALVILLTVAVTALRFNYAINGRYWHWLRALFGWGKDIRELAGRLGMTEQELRNTTPSFREVFIPKKRGGQRRLLVPDAGLKTLQRRILHRVLKKLRAHPAAHGFERGRSIVTNALPHRGQRVVIKIDVVNYFTSTTAKRIEDYFRRIGWNADVAALLTRICTAEGGLPQGAPTSPRLSNLVNYNMDSRIARAVQSRKGQYTRYADDITISFPENHPKQVRGIIQLVKRLLRQCGYRIHVRKKLRILRSHQQQRVTGLVVNRKVQLPRKIRRWLRAVEHRMKTKGSASITPVQLAGWRGVQAMIDRQREGSG

SEQ ID NO: 6723 - protein, 330 aa, unidentified
  source 1..330: note = Related to JACPPF010000124.1; note = Planctomycetes bacterium
MNTLFADANVVLLWGLALGGGFVVLVASLWVSYRVVRATNARPLEWLRVRLGRGKDLTTLAARLGVSVQELQGVELFYRESLIPKKRGGQRRLLIPDQPLKAMQRRVLRRLLRRLRAHPAAHGFEQGKSIVTNALPHVGQCVVIKMDLVDFFPSTTAQRLDAYFRRVGWNAQAAALLVRLVTHAGVLPQGAPTSPRLSNLVNFNLDARIARFVAKRKGAYTRYADDITISFPKDHPRKVRGTIQKVKRIVRDFGYRIHVRGKLQILRKHQQQRVTGLVVNARAQLPRKLRHWLRAVEHRLRTRGEASLSPQQLAGWRALQGMIAKQAKTD

SEQ ID NO: 6724 - protein, 361 aa, unidentified
  source 1..361: note = Related to PSRB01000276.1; note = Acidobacteria bacterium
MRPVRPVRPREPKAPWAFAPAKQGVAGPEYSGPVFLVNSLFTFPSRLFPRRRRLASLVKKWLRSVWRLFRVKKRTADELARRLDVSLAELLDWTPSYRETIISKKRGGTRRLLIPDAKLKALQRRILHKVLRRLRVHPAAKGFERGQSIVDNAGPHVGRSVVIKMDIVDFFPSCKAEEVTAYFRKIGWDEAAGVILTKLCTHEGRLPQGAPTSPRLSNLINWPLDARIARWVAYRKGAYTRYADDITISFPKDYPRKVRGVIQQVRRAARKLGFQIHEQGKLRILRHHQQQRVTGLVVNEKLNLPRRLRRLLRAVVHHLQTGKPASMTAEQLAGWQALANMVAKGAAKYPAPASPKSPGKP

SEQ ID NO: 6725 - protein, 351 aa, Algisphaera agarilytica
  source 1..351: note = Related to NZ_JACHGY010000001.1
MMQRHVFAHAEQGGPIPGNPAKGFLWLFAIIFAVLTVVVICVAIVLWLQRLALLPKPHETHRTDRRRTRLGRGKDLAELARRLDTSAQKLQTANRRYHRFTTAKKRGGTRVLHAPNPELKHLQRLIHRRLLRKLQVHWCATGFEPGVSIAHNAAFHAGQAVVIKLDLKDFFPNTTAERVEHYFRRIGWDAESAALLTELCTHEGGLPQGAPTSPRLSNLINHVMDAQILRYVEAHHGTYTRYADDITVSYPEDWPKYVRGTIQHVRRTAKRHGYTVHTRGKLRVVRRHQQQRVTGLVVNDRVNLPREKRRWLRAVEHRLKTQGRASLTAQELEGWKALSQMVDRHANPEAG

SEQ ID NO: 6726 - protein, 348 aa, unidentified
  source 1..348: note = Related to JAHQVV010000229.1; note = Phycisphaeraceae bacterium
MGTQSIELLAGIDPLAKVCFVSCGVPLITVVVILLVGSKRGWFKPYKETHKVERKRAAKGLGKDIEALGHRLQTPPDELRNFEPKYRLASISKKRGGRRRLDIPDHKTKTLQRTILRKLLRNLKTHSCAMGFDPGISIAHNAAVHTGQAVVIKLDIKDFFPATTKERVEQYFRRVGWDGECAALLTGLVTHNDGLPQGAPTSPRLSNLVNYVLDCQIQRYVLKHKGTYTRYADDITVSYPEDWPKYVRGTVQKVRRVCRRHGYTVHTRKKLRIVRRHQQQRVTGLVVNEKVQLPREKRRWLRAVEHRLSTTGEASLTEEQLAGWEALQQMIDQQARPGRGSMNEGDPE

SEQ ID NO: 6727 - protein, 338 aa, unidentified
  source 1..338: note = Related to PAIY01000242.1; note = Phycisphaeraceae bacterium
MGNFGRKRNADIFTWLVLCLLAIILIFAFPIFILIELINCFFPDRLAKKRYRHVFRHICGMGLKSDELARRLGMTVEQIQATPQDYTTRKIPKRSGDQRELNIPNEQLKSLQRCILKGLLSKLKTHPAAMGFEEGYSIAHNAMLHTQQAVVIKMDIKDFFPSITAATIEFYFREIGWNKRAAFLLSELCTHAYQLPQGAPTSPKLSNLVNYMMDYQIEQAVKHYHGTYTRYADDITISFPKDYPKHVRGIMQKVRCITKFHGYELNHKKTHILRQHQQQRVTGLVVNDKVNLPREKRRWLRAVEHRLQTQGKASLTQEQLDGYKALQQMIASQTQPKA

SEQ ID NO: 6728 - protein, 371 aa, unidentified
  source 1..371: note = Related to WGMU01000064.1; note = unidentified bacterium
MFRRSGRFVTASDSRVRVRQFRAEIPDTKQDVTGTGLPVPVFPSGGVMLAFNLLSQLVSFALVVACLFGVGVCLHIRYRRVTNSNLRHWLRARRGQGLGIDELARRLDVSEDELRSVDVGYREAFISKRSGGSRRLLIPNSELKRLQRTILRRLLGRLRTHDAVTGFERGLSIVENAAPHVGQAVVIKLDVTDFFPSTRADRIDAYFRRVGWDAECAALLTRVTTHEDGLPQGAPTSPRLSSLVNFGLDRAIERFVCDRRRGVYTRYADDLTISFPKDYPRRIRVVVQFIARRLRCDGYALNRSKIRILRQHQQQRVTGLVVNDCVNVPRHIRRKLRAVEHRLNTGRSATMTREQLAGWKALLQMVEQRRP

SEQ ID NO: 6729 - protein, 336 aa, Rhodopirellula sp.
  source 1..336: note = Related to JABMPE010000648.1
MIDAVFNGIEIAAKACLSITGVIFLAVGVLIAYFLWNLSTLKRARPANLKHWNRVRRGDGFGVEELARRLGVTSDELAAVSPNYTERFIEKRSGGTRRLLVPSPELKELQQKILRRLLARLSVHPAATGFEPGTSIVHNAAQHVDQAVVVCMDVSDFFPQTSEARVTAYFQRIGWNRETAELLTRLTTWEGGLPQGAPTSPRLSNLVNHVLDARIERFVECRKGNYTRYADDISVSFPKDYPKRVRGTVQVVGRHLKAFGYQLNAKKTRILRQHQQQKVTGLVVNDRVNVPRNIRRKLRAVEHRLNTGQRATMTREQFNGWKALLAMVEQQRDGSQ

SEQ ID NO: 6730 - protein, 372 aa, unidentified
  source 1..372: note = Related to JAIOPE010000166.1; note = Planctomycetes bacterium
MAELKKTEPKKTSKWSGCLAIALGLAVVGWCLYSIVRGVVGLFHMGPVTFGVVAGVIGLVIAWFVARSWWRKGGRNAVRRAFWIAPGVAELARRLDVTPERLRTFSPVYREVRIPKRSGGVRVLHVPDANTKSLQRKILHRLLARLKSHPAAYGFEAGRSIAHHAAQHTKRAIVLHFDVVDFFPSTRAERIERMFLRLGWNREAALVLTKLTTHKGGLPQGAPTSPRLSNLVNAGLDRALTKRVGELRGRYSRYADDISVSFPKDRRGSVERTKARVMHELCLRGYEMHVRKKLSVRRAHQRQVVTGLVVNEKVALPRHLRRKLRAARHHLATGRPATWTDEQLRGWAAFEKMVRDQGAPPPQDGDGTTPKA

SEQ ID NO: 6731 - protein, 345 aa, unidentified
  source 1..345: note = Related to JACDGX010000179.1; note = Planctomycetes bacterium
MTVGCWFALLVMLGSVVGAILVTPWSLAATPAAVALLLTFHGLRHRYGAYPWRRLRAHLGYGHGIDELARRLDRPAAELRSAAPVYRAVDIPKRRGGTRRLHVPDAATKALQRGILHRLLKRLRAHGAAHAYERGRSIATNAAQHVGRAVVLKMDVVDFFASTSAARVERYFRRIGWNREAAALLTRLTTHEGGLPQGAPTSPRLANLVNRHFDVLIDRTTRRFRGTYTRYADDLTISFPEDWPRKMRGMVQRVRKVAKAFGYRVHGKPKLGIFRAHQRQLVTGLVVNQRVALPRETRRWLRAVKHRARHGKATITSAQIAGWDAYAAMIGGATSPAPGPADRGG

SEQ ID NO: 6732 - protein, 348 aa, unidentified
  source 1..348: note = Related to JAGQPJ010000270.1; note = Planctomycetales bacterium
MRDTRGPVWKLLTAIGMVLALLVLIPLFVAALILALPFVVILSGYSRYRLATNGRPIRWLKLKLGWGLGVRELARRLEMPADELRRFQPVYRVARIPKRSGGQRTLFIPDAATRALQRRLLRRVLRRLKAHPAACGFEAGRSIVDNARPHVGQAVVIRLDVVDFFPSTTAARVERYFRAIGWNRAAAELLVRLTTHEGGLPQGAPTSPRLSNLVNYFLDVKLDRHAQRRRGAYTRYADDITISFPRDHGRRARGTVQYVRRLLKAHGYQLHRDKKLSIRRRHQRQQVTGLVVNETVQLPRATRRRLRAVLHHHETGRPATMTLEQLQGWAALQAMILRQRDGNPDEAS

SEQ ID NO: 6733 - protein, 351 aa, Thalassoglobus polymorphus
  source 1..351: note = Related to NZ_CP036267.1
MPAKATFQMATGCCLSAATAVVTFFWLLNSDSQISFAIMSVLLVAICATMLFGWWTAFLQLTSKHPWHWIRTKFGWGFEIEELANRLGYSVNELTEHQPQYVSAFIPKRSGGTRELRIPDKKTAEIQKRILQRLLSKLRSHPSACGFETGKSIVHNALPHVGKAVVIKLDVIDFFSSTTASRVEAYFCRIGWNRKSAKLLTKLTCDQDALPQGAATSPRLSNLVNYLLDEQLVRCATKYRGEYSRYADDITYSFRKDSPKRMRGIIQRTRHLLNRSGYQLNTEKQRILRQHQRQTVTGLNVNTKVSLSRKLRRELRAARHRLENGKESTWTAEQLQGWAALEHMIQEQTKS

SEQ ID NO: 6734 - protein, 351 aa, Thalassoglobus neptunius
  source 1..351: note = Related to NZ_SIHI01000018.1
MSARSTFQMTSGCGCTLMVLAGGILLANQASGAVVIFVLSVISVFVFAGWLTALFQMTSGNPQHAIRSWMGWGLTVSELARRLDLSEQQLINHFPKYIDRPIPKRSGGTRILRIPDATTADIQKRILQRLLPLLTSHRCATGFEAGLSIVDNALPHVGQAVVIKLDLVDFFPNTHRDRLELYFRRIGWGKEAASILVRLTCDEEGLPQGACTSPRLSNLVNFLMDEQLDRLAKSRKGVYTRYADDITFSFPKDYPQRVRGIILKTRWIVRRFGYQLNSKKQLILRQHQRQSVTGLNVNTKACLPRELRRRLRAARHRMKTTGSATWTEEQLQGWASLESMVESQTASESER

SEQ ID NO: 6735 - protein, 331 aa, unidentified
  source 1..331: note = Related to CP050848.1; note = Planctomycetales bacterium zrk34
MISQHFIAVSGSDIFQWAWKLMLLVFVIYIIRVLLDLRALKHAGNRKTARRVARGQGLDMAELARRLDIAERDLELFKPVYRSATIPKRRGGTRKLRIPDPPTRAMQRRILHRLLKRLQAHPAACGFEPGKSIVDNALPHVCQRVVIKLDVVDFFTNTTAPRVQRYFQWVGWNRPAAEWLAMATTDEGGLPQGAPTSPRLSNLVNFYMDVQLSKFAARRKGEYTRYADDITFSFPKDYPRRVRGVIQFARRILRSKGYELNGRKLRALRRHQQQRVTGLVVNDTANLPRRTRRWLRAVEHRRRTGGQPTLSDDQLAGWQALRHMINTQRTG

SEQ ID NO: 6736 - protein, 344 aa, Fuerstiella marisgermanici
  source 1..344: note = Related to NZ_CP017641.1
MVSVPFLIGLSVAAVVAVLIGLRLGRKRDSSFDSDWPNDSPGPLAQERTAQPSAQTKKSKKQPGYAARFDLAELARRLDVPEQQLLAAEPTYRIAKIAKPSGGTRRLEIPDDDTKALQRCILRRLLATLNAHPLACGFEEDTSIVDAALPHQNRAAVIRLDIRRFFESTSADRVQNWFIAIGWQPGAAEVLTRLTTNDGHLPQGAPTSPRLSNLINSPLDEGLLRLAKQYGGAYTRYADDITLSFNFDRGRKLRGIIQAARRIVKSYGYTLHGGKKRKVLRRHQRQQVLGLVVNEQVALPRSKRRWLRAVRHRIENGGEASLTAAQLKGWESFCSMVQEQRDEG

SEQ ID NO: 6737 - protein, 329 aa, Fuerstiella sp.
  source 1..329: note = Related to DUCQ01000262.1
MFSVPVLIGLAISAAAVVLFGLVAATRRRAAHGHDRGTPHPLPPERGRSSPLPQYDLSELSRRLGVSRAVLERFETGYRIAEIPKPRGGVRRLEIPNEETKKLQRTILRRLLTALDVHPFACGFEPGTSIVDAATPHEGRLVVVKMDIRRFFESTTAARILEYFQRIGWDAASAEVLQRLTTYNGHLPQGAPTSPKLSNLVNAPLDEALLRLARRHNGAYSRYADDITMSFDIRRGRVVRGLTQVVRRILKSYGYTMHGGAKLKILRQNQRQQVLGLVVNEKTALPRKTRRWLRAVRHHARVGRPVSLSKQQLDGWESFLKMVETQRDE

SEQ ID NO: 6738 - protein, 342 aa, unidentified
  source 1..342: note = Related to JAGQQL010000145.1; note = Planctomycetaceae bacterium
MLTIPVLIGIAVVGGLAILIGMIVGTRQQHRSDDDASAPPAGNRPATESPSGNVPQRDTSTASLTLTDLSARIGISVDDLQNHQPVYREVRISKPHGGVRCLEIPDDRTKELQRTLLHRLFAGIRAHNCACGFEAGTSIVNAAVPHVRKRVIVKLDVRRFFESTTAKRVSAWFRSIGWDDEATAVLTQLTTHNGHLPQGAPTSPRLSNLVNAPLDEGLLKLATHHGGDYTRYADDITMSFHIRSGRRIRGIIQATRRILRSYGYKLHGGRKQQILRRHQRQQVLGLVVNDQAALPRHTRRRLRAIRHRTSQGIAPTLTPAQLEGWEAFRTMVETQRQPSSDH

SEQ ID NO: 6739 - protein, 340 aa, unidentified
  source 1..340: note = Related to JAGQPY010000452.1; note = Planctomycetaceae bacterium
MFTVPVLIGIAVAGLIAILIGIILGSRKPSPEQTAERQDETVSSTDSASKSSTSPAAPPLKAVSGGLEIRDLEERTGLSADELRSLKPEYRVVEIAKHGGGKRRLEIPDERTKEIQATVLRRLFSAIRSHSAACGFERATSIVNAATPHVGRRVVIKLDIRRFFQSTTDDRVLAWFQSVGWSQEAAQLLTHLTTWDGHLPQGAPTSPRLSNLINAPLDEALLRLAEKHKGAYTRYADDITFSFNFRSGRRARGIIQAARRILRSFGYAMHGGRKLKVLRKNQRQSVLGLVVNDRIALPRHKRRWLRAVRHRRDQTGQCSLSDQQLQGWESLQQMIENQRD

SEQ ID NO: 6740 - protein, 313 aa, unidentified
  source 1..313: note = Related to JAGQQE010000041.1; note = Planctomycetaceae bacterium
MAWIIAAAVAMAIAVAFVLLKSTQDSKSTPPRRKPEPFTLADLLERLQLTEEDARQLESPQWRKAFIPKSSGGTRLLEIPDDVTLALQRRILHRLLSGLKSHPAAIGFENGKSIVDAARPHSGKQFVIRIDIERFFESTPVTRVEEYFRFIGWTDDAIRLLTTITTCEGHLPQGAATSPRLSNLVNIRMDHALQNVAERFHGHYTRYADDITFSFHFRSGRKARGIVQVIRRILRQSGYRMNSEKTRILRAHQQQQVMGLVVNEKVAIPRSRRRQLRAARHRVRQGKPATFSPEQLQGWTAFEKMVEDQASID

SEQ ID NO: 6741 - protein, 306 aa, Planctomyces sp.
  source 1..306: note = Related to JAEUIH010000049.1
MNSLMIVVAFIVSLVVVATGLLVRRIIRNLRNRFTLADLVNRLGMTAEEWSQLKPPTYRTAMIPKRNGGQRMLEIPDPDTMVLQRRILRRVLKRLRSHRAAIGFESGKSIVHAASPHIGQAVVVRVDIENFFQTTTERRVGEWFRAIGWNQEATEFLLMILTHNGHLPQGAPTSPRLSNLVNARLDAGLNRIAQSYGGAYTRYADDITFSFPVDQPRQIRALLQMVGRYLKQAGYQMKNSKTRILRAHARQSVLGLTVNQKVALPRSMRRRLRAIRHQQSQGKPTTMTAAELHGWTAFEQMIASQK

SEQ ID NO: 6742 - protein, 302 aa, unidentified
  source 1..302: note = Related to JAGQQI010000087.1; note = Planctomycetaceae bacterium
MAYVIAGIVVVIAAAGLAAAMRFRKPRRSYTLGNLIDFLELTPDDARVLKQPSYSSHRIPKRSGGYRLLEVPDEQTKMLQRRLLRRVLSKLSAHPAAVGFETAKSIVDAARPHTSKGVVIRIDITDFFQSTTTERVAAWFRGIGWDADSVDFLTKFVCHDGHLPQGAPTSPRLSNLINAGMDTVLQRIATERGGTYTRYADDITISFRRLSGRRARGVVQHVRRTLTAFGYRVNTRKTRILRNHQQQTVTGLVVNRTISIPRKQRRKLRAIRHRIANGQPATMTTDQLAGWDAFLAMVEQQR

SEQ ID NO: 6743 - protein, 396 aa, Alienimonas chondri
  source 1..396: note = Related to WTPX01000039.1
MNDGAAYGRMDRHEVEPAPIRPYSAWRDLIALLLTGCGCFSILFVLGLTAAMFGPPLAQRIAPWLTVPILFAIGINLAQWYFFKRLKRVDRYSLFRAKHRIRAARGKGMDIEELARRCGLTTHLLQNHEPKYREAEIPKRSGGVRRLHIPDPATMDLQRTLLRKVLAKLHADPAACGFEKGKGIVDHAAPHVGRAVVITCDLKDFFPSVTAKSVDYYFRRIGWNAEAAALLTRLTTHAGEGGEPGLPQGAPTSPRLSNLLMHGVDYALAKSAARRGFRYTRYADDLAFSSAEDDSQAVRELLQQIDRVVKRAGFRLNPRKTRILRQHQRQMICGLVVNDRLNLPRKVRRELRAALHRRRTGMHATYTDEQLAGWAGVLTMVARGPRAEPGVPRGVG

SEQ ID NO: 6744 - protein, 384 aa, Alienimonas californiensis
  source 1..384: note = Related to CP036265.1
MVSSDTPPPDSNASGLGCGGIVWSALAAVLLLTGLTAVAVLAVRAFGALVAALGASALIAIGLNFAQWYFLKRLKRVDRYSLFRLGHRWRAWRGKGFDIEELARRCGLTAHRLQNHQPSYHTATIPKPSGGERTLTIPDPATMDLQRTLLRRVLARLHADPAACGFERGKGIVDHAAPHVGRAVVATCDLKDFFPSVTAKSIDYYFRRVGWNAEAAALLTRLTTSEGGLPQGAPTSPRLSNLLMHGVDYALAKAAGRRGFRYTRYADDLAFSSAEDDGQAVRDLLRRVEAVVRRGGFELNSKKTRVLRRHQRQMICGLVVNDRLNLPRKIRRELRAALHRRRVGREATYTAQQLAGWAGVLTMVARGPRAFHGETPPDSAPSSA

SEQ ID NO: 6745 - protein, 574 aa, unidentified
  source 1..574: note = Related to PAPJ01000007.1; note = Planctomycetaceae bacterium
MNDGIILALDGGEALCFISLVIFMIVFFVAVIQFFNKLKILVPDGQRSISKAEYLERKRKEAITKYGKPSDKSRIYRLVPELEKLDPQWDPSYEIVRIPKRSGGVRELQIPDELTKKIQYALYHKLFSYYIVHPAACGFVKGKSIVDNARQHVGQEVIVKLDIREFFPNTKKMRINRYFVTTGWTPDAADLLTKLVCYEQGLPQGAPTSPVLSNIVNKSMDDRLFSLSQSFNANYTRYADDITFSMEKYNRELVHALLQRVGVILRIYGYNLNRKKKRIIRRHRRQEVTGLVVNSKVNLSRKRRRWLRSIQHRIKTGQKLTVTMAEYRGWISLLNMVDPESNLIHLHKQLVKTDAPVLTPMSDPNDNSPTAELQGSDVDRSSRDENKTRVSSEMLDDNASELRTVDEDNPTRPSGSQDETHTADTSSTRAPLNNDQHEEQSELPELQSSPDNSGVFHEDRLEDKVQALKVAKPYSTEAKSLISEFTKSSYTIQLQLESSKRTFSFRLPEGYQKGRTVTGSLSDGTEVELYFHDSLAETVENAEFPLKSEVTIEVIQWNATFKRVEAIVTGGLFH

SEQ ID NO: 6746 - protein, 365 aa, unidentified
  source 1..365: note = Related to JABHSU010000643.1; note = Planctomycetaceae bacterium
MQNSNMLVADGAGAAICFGILLLVLAFIACVRFLNGHAKNVIQDKVVNLDGFKRLSRVQKALLAQRKREAAPEAYGSVSGTSRIYKLVPELEGLGSEWTPSYQVARIPKRSGGFRELQIPDSQTKKIQLALYHKLFANYETHPSVCGFVKGRSIVDNARPHVGHEVVIKLDIKEFFPNTYRIRVNRYFSETGWDPAGADLLTKLVCYGMGLPQGAPTSPVISNIVNKAMDIRLFALAEKFNANYTRYADDITFSLKSYDRNVVHRLLQHTGVILRDYKYTLNKKKKRIIRYHRRQQVTGLVVNDKVSLPRRRRRWVRAIQHRLKTGKDTTVSFSEYQGWISLIKMVDPASPLLIVHQEIIQNRMA

SEQ ID NO: 6747 - protein, 577 aa, unidentified
  source 1..577: note = Related to PBCP01000062.1; note = Planctomycetaceae bacterium
MPASGTETNLIIWGLAATIAAGFILLARYRQHVSANDRKRGSNSAGSRKPSRYGRQNSYGKSAQGPLSDVDRLYRLIPGIQELVKSGGTQYTNSRIPKRSGGFRDLDVPNQATKKVQHALYHKLFSKYRIHESACGFVKGRSIVQNALPHLRHEVVVKLDIREFFPNTSRLRINRYFRSTGWTSKAADLLTSIVCYKQGLPQGAPTSPVISNIVNKTMDWRFAALADAFGAQYTRYADDITFSLKSYDRGKVHRLIQNAGMVCRSYGYKLNNKKKRIIRSHRRQEVTGLVVNEKINLPRSRRRWLRAIQHRLRNGLETTVTNSEYEGWMSLLKMVSPESPLLESHQQLILEGILHRKNQSTLTEEKKHADSQLESETAQSGADVVTTVEIRSEGSDDQAGNTSPTSLDTNSEPEADGSIQLAADKREPQGGSKTHDTIANGVESQAESDGVPDSKSDLFYEDRLIDFVQRLKNAKPYSAEAREIENDFAGAKYATVVELESYKRTFSFKLPAGYQKGRTVSGRISDGTAIQLYFADQLSDPIEAAAFPFKGEVSIEVIQWNSTFKRIEALATGGMFD

SEQ ID NO: 6748 - protein, 560 aa, Rhodopirellula sp.
  source 1..560: note = Related to NZVD01000016.1
MIVRGIDVGLCACLFSIAFTIVIVLGIKRLTSPKRNRMKKTGQSKRRRSPYRPAKANQTSSPKHPKSDVDRVFRLIPEFEKLDPEWRPSYSITHIPKRSGGTRQLQVPCQTTRQIQVALYRKLFARYETHPKACGFISGKSIVDNAKPHVGNDVIVKLDIKEFFPSTSRRRILNYFRTTGWTNKASILLTQLLCYEQGLPQGAPTSPVISNIVNKSMDRRLDSLANEFNASYTRYADDITFSMAVYHRDKVHALLQSTGAILRTYGYKLNNKKKRIIRGHRRQEVTGLVVNDVVNLPRSRRRWLRSVQHRISTGMHTSITPSQYQGWISLLQMVSPDSPIIARHKELLAAGMLKSNGKSGIKETGGHEESVLDETTDRISAANSNSPQTDIADSLNESESTSIVSSDGGSESESLSETPLKEVTQELELESQHAVGGSADELFHETRLTDKIYALKEVRPYSDQAKQLQEEFKGSQHTTSVILESLKRSFSFKLPEGYQKGRTLSGLLPDGTEIELYTTDISAELFDQVDLPIQGDAVIEVIQWNNTFKRVEAILLDGLM

SEQ ID NO: 6749 - protein, 552 aa, unidentified
  source 1..552: note = Related to PBHI01000033.1; note = Planctomycetaceae bacterium
MVDVLVNGFGIIFLIFIFVGICRVAELVKDSASHKKTGSRTSRGRGYRGRRFLKKSTEKSERSKPARIHKLLPGLSKLGEDWQPVYTVTHIPKRSGGTRELHVPXQTTKAIQSALYHKLFVNYKNHPAACGFIRGKSIVDNAMPXVGKEVIVKLDICDFFPSTSQYRVRKYFASTGWDDSAAGLLTRLVTYQGGLPQGAPTSPVVSNIINKTMDRKLAYVAETLKADYTRYADDITFSLTSYDRRDIHRLLQWTGAVLRTYGYKLNNKKKRIIRKHRRQQVTGLVVNDKVSVSRQTRRWLRAIQXRLAKGDAITISKSQYQGWISLVHMVSPGSPIIAKHRMLVESGVLNPEPKAVETSKKKLPENTEKINSEPTTSATMQRTRSEAVDPXEPHLSTSDVVETELXGDADIAAVDTTPNIDNSKXDSEEELFHTDRLVDYLXALKMAKSYSAEAKKLESEIQGXTHTAIVKLESSKRTFSFRLPEGFQKGRTVSGALPDGTEIELYFRXTLAEDXEAADLPXXGEVVIEVVQWNGTFKRLEXIVXGGLFHNX

SEQ ID NO: 6750 - protein, 573 aa, unidentified
  source 1..573: note = Related to DQCQ01000231.1; note = Planctomycetaceae bacterium
MVSSPNTVSGVDRLSEMLGMSVQELENFSPQYKHAVIKKRSGGNRLLQMPNDETKRVQRLLLDKLIGRYKTHASCCGFSKGLSIIDNARPHVGRETVIKLDIQDFFPNTTVDRIHEFFCKTGWTDDAADVLTKLVVFDEGLPQGAPTSPAVSNVVNCFMDLRLDALAKKYGMTYTRYADDLTFSSEIYSRRDVHKILRITGVILKSCGYSLNKKKKRIIRKHRRQSVTGIVVNERLNIARPTRRLLRSVHHRLESGGNSTLSENEFNGWISYLHMVNPKDPLVTSVFGESDSDKSKRRRSPKYVKQNASQSASSNSGQFNPIADISFRPINRGDVSTLSQLGLSPTSNAVTPSEYFSAQLFYNFGKNVNVVARRRNLKRKTVWKHLAHAVEHSLVACHDLISKEDLSQLLSQLKQHSPTAIPSVGDAYRMCMGQIDYGRIRVGLAECRRRKRKLQSDRGNEIITKLNNFSSTREEAVLKTVFGKRLNCSCAVESVSITANADLPPDYTEGRTVHATLPEDPSISLTLFTPAAQNDNVDSLSSAQNVFVRGAIQGMDDASGCIELLTEELQLRT

SEQ ID NO: 6751 - protein, 558 aa, unidentified
  source 1..558: note = Related to DTSG01000044.1; note = Planctomycetaceae bacterium
MSPLFVADNPRRIAGSLLIICHATAIIDSGGGEYMDEFLEALFSLQIVSLITVLLIILFFFRKKNSDATRGSYRTQRSRKTREQRRRKLTVRDLGMKLEMSKSELVRHNVQYETTTIPKRSGGKRILHVPDRASKHLQRTLLKQLIERLPIHDDVHGFRKGRSIVDNAAEHIGQEVIVKLDIVDFFPATNSERVESAFKGAGFDKSSAKLLTRLTCYEGGLPQGAPTSPALSNYVNKNMDVKLADAALRRSARYTRYADDITFSFPEYSREKIHELLISTGKILQYYGYRLNDRKKRIIRQHRQQLVTGLVVNERVNLPRKTRRWLRAVKHRMETGGEATLTAAEFRGWLSLLKMVDPAAPLLNFLDGLNSREEIIDKPLPKNGDLKKLVGRQSQNVKTVEIPVTTPGSDIADDALTDNAQQETLRDSEVVNARNANTGVENVSLVAMVEALNQTDNYTESRKTAELQLAGKEYLLEISATSVGRTFSFSLPVAYQNGQTLRATLRNEGLALELYCDEQVGSELASIQFPKNLKVLVRVVQWNAIFKRIEAVVLQASR

SEQ ID NO: 6752 - protein, 321 aa, unidentified
  source 1..321: note = Related to JABHUV010000311.1; note = Planctomycetaceae bacterium
MSRLQRANADRKRERPKLTLADLVARLGMSKADLVEHEVQYRATTIPKRSGGKRVLHVPDRLTKTLQRKLLYQIIGRLPLHDNVHGFRKGHSIVDNAANHTGQEVILKLDIVDFFPSTSSKRIAGAFEGAGFDKSTAVLLTGFTCWEGGLPQGAPTSPALSNYVNKNMDKKLAAAASGRGARYTRYADDITFSFQRYSRDNIHQLLISTGKILQYYGYRLNNKKKRIIRRHRQQLVTGLVVNDRVNLPRKTRRWLRSVKHRMETGGQATLSSAEFHGWLALLRMVDPDSALLEFVDVQNANKKNMARSRMKDSNSQSVVAG

SEQ ID NO: 6753 - protein, 517 aa, unidentified
  source 1..517: note = Related to JABHTD010000124.1; note = Planctomycetaceae bacterium
MLDSIGEVLFSPLVVTAIIVLVLILRCFKGRGGRRELSIGDLADRLKMSKTNLVQHDAQYRTATIPKRSGGKRILHVPDDATKQLQRKLLQQLIERLAIHDCVHGFRKGHSIVDNAAEHTGQAVIVKLDIIDFFPSTNSDRVKNAFRGAGFNKSAATLLTGLTCHEGGLPQGAPSSPALSNYVNKNMDEKLAEAANKRGAVYTRYADDITFSFVTYSRHNIHNLLIATGKILRHYGYRLNNKKKRIIRQHRQQLVTGLVVNERVNLPRKTRRWLRAVKHRMETGGEATLTNSEFRGWLSLLKMVDGDSPLLTFLDSPKPKAEESVTRTRHIGDNISDSDGHSSLSDSDSSVVHQGKSATEGESLPTNTPPETPPVVASGTILPTDGRRQFLRLARLGADGNLALLQLVEALNQTEKYSTNRNEAEKDLVGSEYLIDISVSSIGRTFSFSLPEDYQDGQTLKGTLRDGGLSLELYCDKLVGSELAGLSFPTRLKVLIRVVQWNSIFKRLEAIVLHTTL

SEQ ID NO: 6754 - protein, 328 aa, unidentified
  source 1..328: note = Related to RFKR01000219.1; note = Deltaproteobacteria bacterium
MVRRPGGLELAENQLEVTEPARGVRHLQGGRGTGRCSFLSTSTRFAVGLFDWFRKRKDEGLDTGELARRLGVSESDLDCSPRYNVRTIPKRNGGRRRIAEPSRELKQLQRVILRRLLSRLKAHPAAHGFEKGRSAVTHSANHCGKKLIVVLDIEDFFRNTTERRVRDYFRSIGWNEKASELLTRLTTFEGGLPQGAPTSPRLSNLVNYTMDLRLSRFCDMRSITYSRYADDLCFSTDDESWTGQLLRTVPEILSDFGYRVNRAKTRFLRAHQRQLVTGLVVNEKVNLPRSTRRWLRAVEHRMLLGGTPTISEQQFRGWLAYRQMVERR

SEQ ID NO: 6755 - protein, 307 aa, unidentified
  source 1..307: note = Related to JAGOCE010000260.1; note = Candidatus Ozemobacteraceae bacterium
MSILDWVSGLLGTGSSGTGDSRRNEGNDLRELARRLGVSVEELTSIRPAYREIRVKKRSGGTRLLLEPSPELKKIQRCILHKLLKRLSSHESVHGFESGRSIVTNAQQHANKDLVICVDLKDFFQKTQVRRIREYFTFIGWNTDAADMLMHLTAWNGGLPQGAPTSPRLANLVNHALDARLEGLAKHHGGTYTRYADDLTFSFPTRKELPKKETGTFLEMVSRIVKENGYSMHGKEKLRVMTYARCQSVTGLVVNQKVDLPRRTRKWLRAVEHHRVTGKPATLSDEQLNGWRSLRQMIIDQRRERSR

SEQ ID NO: 6756 - protein, 326 aa, unidentified
  source 1..326: note = Related to JAFGPC010000052.1; note = Sedimentisphaerales bacterium
MGFWDWLRQLLQGPGPQERKPDLTPPVDGKKLEELAKRLDFSVDQLHAVQVSYRQFSIPKRSGNGFRTISVPNPELKEMQRRILRRLLGRLQTHPAAMGFEPGQSIATNAAYHVGADVVVRMDIRDFFGATVTNRVRAYFYGIDWGKEATDVLVRLCTYERGLPQGAPTSPRLSNLVNFELDARLDGYAQKIGARYTRYADDITFSFNFAEIKQTLTGQNSKILEHIKDKSKSSYVIHQTIRMTKRILFEYGYQIHTKRKLNIRRKHQCQKVTGLVVNHKVALPRKTRRRLRAVEHHLANDRPATLTHEQLAGWKALQYMIETQTK

SEQ ID NO: 6757 - protein, 326 aa, unidentified
  source 1..326: note = Related to JACZKQ010000026.1; note = Phycisphaerae bacterium
MGFFDFLKRLFSSEPERRAPRLVAPEPGLGPDELARRLGLSVQQLESTPCDYHEFAIRKRSGGTRQITAPNRQLKTVQRKILKRLLGRLCCHPCATGFEKRHSIVTNAAVHVGADAVLRMDMIAFFRMTTAERIRGYFYGIGWGKEATDLLIRLCTHNGALPQGAPTSPRLSNLVNIEMDTRLACWARKIGAAYTRYADDVTFSFPDLDASAPGPAFDQNPKTLESIRRDEGDALITSTIRMTKKVLGEYGYELHNKRKLNIRRRHQQQRVCGLVVNEKVALPRRTRRWLRAVRHHHATGRRATLTAQQLAGWDALEHMIALQAEE

SEQ ID NO: 6758 - protein, 326 aa, unidentified
  source 1..326: note = Related to JAFGBA010000254.1; note = Sedimentisphaerales bacterium
MGLFDRIKSMLGGGAKASVNTDRWNLDELARRLDITPDELQNIKPIYNKFTIPKRSGGKRTILAPAPELKQLQRRILRRLLARLRTHPCAMGFEKGRSIVTNARPHVQADVVIRMDIRDFFGKTSAQRVNAFWRFIGWDKPCADILTRLCTHDGALPQGAPTSPRLSNLVNYGLDARLEKWGQPIGAIYTRYADDMVFSFSRVTISNMPAFKNWSRFYDSPTEALDDFLRKAVTSTIRVTKKILKDYGYKIHHHKKLSIRRKHQCQKVTGLVVNEKIALPRQTRRWLRAVEHYHTAGKPSTLTPQQLQGWRALRNMVEQQPATDFT

SEQ ID NO: 6759 - protein, 1908 aa, unidentified
  source 1..1908: note = Related to JACRUV010000373.1; note = Planctomycetes bacterium
MGILDLLFQIGDRPGHLDISELARRLDMSVKALRETPLEYKRFRIAKRSGGKRTIKAPNPNLKAVQRRILRRLLAKLTAHPAATGFERGESIATNAVRHTGCEAVLRLDIIDFFHNTTVQRIRRCFHRIGWNRNAANLLVRLCTLDGGLPQGAPTSPRLSNLVNYPIDIRLNAWAEKNNVNYSRYADDITFSFERETEDDIGTAIRLTRTVTKEYGYRIHRDRKLSIRRKHQRQMVTGLVVNQGVALPRKTRRWLRAVEHRLDTGQTASLSKEQLAGWRALERMIDLQAGRRAKTHRDSPTARPPKKRAPETDDMVRAQLQLAREQLLDLTMRNRLLNFQRTRRTTIRIIDELPGQLWELFVEKQKKLAFLAAEEHELFQAAGDDLPPTDEPGEEEPDEDAIPGDLAKLFHQPRPETALEDGQTELPARYTDLFLQTDLRDEDLQINLLRIDQQSHSALEERGVNLLFLAMGFLEWRPDDDEPKTRRAPLVLVPAGLERASARRRFKLRALDDDPILNPCLVQKLREMGIGLPAEPQSWVDFDTETFLRDVGKAVAEMPGWQVHEDVYLGFFSFTKYLMYLDLDPANWPEGRRLLENRILRTVCGDAESIEQMGSWPDVASEDRERDPAETYQVLNADSSQQKAILAAREGRSIVIEGPPGTGKSQTITNIIAECLAAEKRVLFVSEKMAALEVVKRRLDATGLGDFCLELHSTKANRRNLATELGRVLDKGRRTARDEMGDGERLRLLKRRISAVAAAVHDRHDPLGMSPYEAVGRFSLLADVPDCFCDIPGWQDWDRGQLEEMKGRLDRLGRQEQNVGPREDHPWRGVRRTHVSSQDRRDAERHCTRLAGMLADLPRFLKAVADDIQTPVPGSLDDASKALEAARLVADSPGPPRRLLLGSEWEGDRPDRKAFLGLATEFFEGQDWMATRYREGALNGVNWEGMHRRCLRYWASPLRWFRPQYWSDRGLLKGFRESSYRPDFAAQAADLKRLADLAKLKMEIDSRREDGIRYFDEAWQGSASAWGRLSAMADWLTRFRTLHRDGWLGDKAVTTASYAGDHAATAKKARALGEKLDAFHSGLDELNGLLDLSADEMFDVPVLQVDFDVIESRFKRMAAAGEELVVWTQYQEALQQCEDSPLKSFLESAMEDDRPMDSSVRPLAIEKQFLRLWIEDCFERREELRQFNCGDHEAAILDFAKLDVDWIRQSRQRLHGRLSSRRPDGRMQAAPSSQMGIVQSEVRRKRGGRPIRKLLADAADVIPRLKPCFMMSPLSVAQFLDPAGIDFDVVIFDEASQVEPADALGAIARGRQLILVGDPNQLPPTSFFHSGPAPRSSADAEDAVGLVDMESILDRCAVVLSNCRLRWHYRSRHESLIAFSNREFYDSRLVVFPSCHTGDAELGLKTIFHPQDRYGRGKGQTNREQAARVTDFVFEHARRRRDVSLGVGAFSRRQQQAILDEIEKRRIEDNSLEAFFDRNRPEPFFVKNLETIQGDERDVILLSVGYGRSRPAERLSMNFGPLNQAGGWRRLNVLITRARRQCVVFSSILGEDFDLSATQARGVHALKGYLDFARDGMLPPTVDEAEEDSSALERAIYNALVAAGHTVCRRVGCGADAIDLAIEDPLRPGRYLLGIECDGAKYRDTVTARDRDRLRQQVLEGYGWRIHRVWSAAWFLSPRKEMERLTAVIAAARAGTLQARFLPIASAATQEIDDEMDLIPADDSSPIPVKAYRRYRPRRRRSSERFYTDSLTELAALVTEVVEVEGPVHEDQVSRRMLDIYRFSRGGSRIDEKISSAVRVAVYGGKINRRGDFLWPADMETPPLRRRDDDDIRDIDLICHAEIRRALRLLLETQFGMSRNDLTTQAARLFGFQVSGSRIRDRIGQAIQGLLESGKVAESGAILNVSSQ

SEQ ID NO: 6760 - protein, 319 aa, unidentified
  source 1..319: note = Related to JABGPF010000087.1; note = Phycisphaerales bacterium
MGLFDWIKRLLGIAPKPKNMFVEVDFRGRPQRQSTPEKPLGDLMELSRRLAKPVTDMQLTPVRYDKFTIPKRSGGQRQIMAPCPKLKEMQSRILHRLLGGLRAHRSAMGFERDRSIVTNALPHVGAAVIVRMDIRDFFPSTDAARVHAYFRGIGWDTEVVDLLVKLTTLDGGLPQGAPTSPRLSNLLNYLMDARLDGLARSQGGVYTRYADDMTFSFPTDKGNHKTAIVSATKDIVGEYGYRLHLRRKLSIRRSHQQQLVTGLVVNEKPALPRKLRRKLRAIRHRLETQGQATLTEQQLAGWDALTQMIETQRTPKNKQ

SEQ ID NO: 6761 - protein, 309 aa, unidentified
  source 1..309: note = Related to JAIORC010000001.1; note = Phycisphaerae bacterium
MGLGDFFRRLFSVSNDEMFAQDLLPSQGSRDVSSKGKLGVNELARRLGISVEQLQAVPIAYSEFTIPKRSGGKRTILAPRDELKSLQRKILRRLLGRLRCHSAATGFQRGQSIVTNARPHIGAAVLLKMDIKEFFPSTTADRLKKYFKYIGWDKQACKLLLEWTTHKGALPQGAPTSPRLSNLVNFAMDARLAGLAKKFNAAYTRYADDMTFSFATDDRQSIYGAIASTKKIVGQCGYKLHQKRKLRLARKHQRQCVTGLVVNEKLALPRRTRRWLRAVEHRLATGGQASLSPAQLAGWKALQAMIESS

SEQ ID NO: 6762 - protein, 311 aa, unidentified
  source 1..311: note = Related to JAAYZK010000376.1; note = Planctomycetes bacterium
MGLWDALRSLLGFNARRPARPDPGLPATRAMAEPGRDTGQLAQRLGVPLGYLETIQPQYRTFTIPKWSGAPRTILAPQDDLKQLQRTILRRLLGRLASHRAVTGFERGHSIVTNARVHIGAAVVIRMDLKDFFPTTKAARVGEYFRLIGWNDEAAALLMRLCTHGGSLPQGAPTSPRLSNLVNYRMDARLAALAAKLGAAYTRYADDITFSLGQDCRWLAAAAIRGTKAIVADYGYTLHQKRKLIIRRRHQSQRVTGLVVNERVALPRSTRRRLRAIRHCLDTGRPATLTASQLAGWDALEHMIRTQSRSE

SEQ ID NO: 6763 - protein, 370 aa, unidentified
  source 1..370: note = Related to MGMJ01000134.1; note = Chloroflexi bacterium GWC2_73_18
MGFFKDLGKKLEEARRLAEELQQQAQEQAQKLGQQAGVPIPGAPAQPPGTGAPGQPAWGGQPAQEARGGAAPAPTMAPGEREPARRSPPPARFGPDELARRLGTTVDALRAVQPDYTAFSIPKRSGGQRRILAPDPVLKSLQRQVLRRVLGRLRAHPAAMGFERGRSIVTHARGHSGRAVVVHMDIQDFFPSTRAVTVREYFRQLGWDDAAVDLLAKLTVWEGSLPQGAPTSPRLANLVNRRLDARLAGKAARLGATYTRYADDITFSFPTADPKAVIDAIRLTRDTVAREGYALHLRRKLHVRKQHQRQLVTGLVVNRGVGLPRERRRWLRAVEHHLSTGKPATLTQAQLAGWYALAHMIETQRNAPPS

SEQ ID NO: 6764 - protein, 322 aa, unidentified
  source 1..322: note = Related to MWDR01000017.1; note = Planctomycetes bacterium ADurb.Bin126
MGLGDILRRIFLGKDASPASPRAHVNPYAHRPDSISDVPVRDQPSRDLHELSQRLGMDAGELAACPIEYSVFRIPKRSGGTREISAPSASLKTFQRIVLRRLLARLKVHPAAEGFERGRSIVTNARRHVGRSVVLHMDIQDFFGRTTERRVRDYFRGIGWDKQAAALLTRLCTHGGALPQGAPTSPRLSNLVNYVLDTRLHALAARMGAAYTRYADDLTFSFEADRPGAVGSVIRAAKGIIDEYGYRLHTRRKLHVRREHDRQVVTGLVVNRKVQLPRPTRRRLRAVRHHLATDRTATLTPAQLAGWDALQSMIRTQADAAS

SEQ ID NO: 6765 - protein, 331 aa, unidentified
  source 1..331: note = Related to JAJFUU010000041.1; note = Planctomycetaceae bacterium
MGLWQIIRGLLGSSEANPYRAAGAPDGPVGRGSAAAAPSPPKRSRRRPPKFFLADLALRLGRDSNALSQIAVEYETFSIAKRSGGRRTIHAPQPGLKALQRDILRKVLGGLKAHPAVNGFRRGRSIVTNALPHVGHSVLVRLDIRDFFPSTTARRVEEYFRFIGYDDSSAALLTRICTHQGALPQGAPTSPCLSNLLNYRLDARLSALAAKMGATYTRYADDMAFSFSEPADAARVNMLVSAAQLVLSGFGYRTHHRRKRSVRRRHMAQCVTGIVVNDKANLPRATRRRLRAVRHHLMTGKEASLTAAQLAGWDALQHMIKVQSVPPSVPQ

SEQ ID NO: 6766 - protein, 305 aa, unidentified
  source 1..305: note = Related to DNAS01000030.1; note = Phycisphaerales bacterium
MGLGEWIGRLFGGKSQDRGGSVAPGRLVLVELSARLGVSVAELQAARVEYAQFTVPKRRGGQRKISAPSDGLKTLQRRILYRLLGRLKSHPTVQGFERGRSIVTNAVPHVGRAVVLRMDIRDFFPTTTAKRVEMYFRRTGWDAESAALLTRLCTHEGGLPQGAPTSPRLSNLVNHPMDARLEALAATAGATYTRYADDLTFSLPQDTPGTTARLIGSTKAILRSYGYRLHQDKKLRIWRRHDRQMVTGLVVNERANLPRRLRRKLRAIEHHLLTGRPATLTADQLNGWKALQNMVDAQALPPAQE

SEQ ID NO: 6767 - protein, 322 aa, Phycisphaera sp.
  source 1..322: note = Related to WGMA01000015.1
MGLFGFIKGLLGGGAGDPRKDPTASFKRERPPTSERAAPPRRRGSRRPRDIAALAAWIGVGERELTRVSPSYQTFFIPKRNGDRRRIDAPSAELKTLQRRINRKLLRRLKTHRAATGFERGRSIATNAAAHTGNAVVVQMDIRDFFPSTTTQRVLDYFRAIGWEDDAARLLVDLTTHEGGLPQGAPTSPRLSNLVNHQLDARLDRLAARCHAAYTRYADDITFSFADGDPLVVRRVIRATKSILAEHGYRIHHRRKLHIRRRHERQVVTGLVVNDRANLPRHTRRWLRAVEHRLMTTGSATLTESQLAGWRALRQMIDRERG

SEQ ID NO: 6768 - protein, 316 aa, unidentified
  source 1..316: note = Related to BJHL01000001.1; note = Phycisphaerae bacterium
MLAWLFQLLLRSLIGTSPRRHFRLAESYREPSPNRYKPKWVKQRTLADLAKRLNVSIETLQSHKPTYAQLSIPKKSGGTRMLHVPDAATKRLQRALLRRVIGPAKSHDAAMGYERGRSMVDHAKRHADRAVVIGIDLQNFFPSTRAAWVRDYFIAAGWDKEAAKLLTHLTTHENALPQGAPTSPKLSNLVNHLMDARLTGLARHFGARYTRYADDIIFSLPTDDSLLVKSLVNLAMHVIANCDYRPHWKKKLFIRRSHQRQQIAGLVVNNGPPRLSRETKRWLRAVRHRLANGKQATLTPSQLAGWDAFEHMVENT

SEQ ID NO: 6769 - protein, 319 aa, unidentified
  source 1..319: note = Related to JAIEUA010000002.1; note = Phycisphaerales bacterium
MGLIQWIAGFLFGRPNEPISQAQIDAAFPKRRRVRRLSFEELSRRLDVNEATLKGFRPRYTRFQIPKRAGGSRRIDAPDAATKKLQRAIDKRVFGGVRLHAAAMAYVRGRSYVHHAALHADRAVVVSMDLENFFGSIRRWRVEALARWLGWDEEAAGRIADLCTLDGRLPQGAPTSPRLANILSIPMDRRLAGLARSRGAVYSRYADDLVFSFDADEQDVVHEVVHIANLIIWESWGFEMEVHHKRKLHIRRAGWNRQEVCGLVVNDGPPRLPRETRRALRAMRHRLENGGDADATPTQLAGWESLERMIQRQGSSTPR

SEQ ID NO: 6770 - protein, 351 aa, unidentified
  source 1..351: note = Related to JADLCM010000016.1; note = Phycisphaerales bacterium
MGLFRWLKKKLAPPDPFAAFESPAARSNAAGGVPGGVEDAAGAARRSPLRRSRAPHRDGRDAGIGAARFGLDELARRCAGPGIDPLTVEPGYRTFTITKRNGRPRRIDAPDESTARVQRAILRRVLGGIPSHGAAHGFERGRSVVTNASVHVDSAVIVKMDIRNFFGATRAERVLGFYRRFGWDEASAARLTELTTLRGGLPQGAPTSPRLANLVNYRLDASLHALADSVGARYTRYADDMTFSMDEDDASILNSIIGITRDALIDFGYEIHWRKTLHLRRTHQRQTVTGIVVNDGVSLARDTRHWLRAVEHHLRTGRAATLTPTQLAGWRAYEAMIDRGVNDDGTIADEG

SEQ ID NO: 6771 - protein, 317 aa, unidentified
  source 1..317: note = Related to JAAYCJ010000271.1; note = Phycisphaerae bacterium
MGLFSFLHGLFGGGRYGSEDLAQRLGLMVKWLDETKPHYQRFTIPKRAGGIRDIDAPNDELKKLQRLILHRVLAGLKAHPACNGFERHRSIVSNARVHARPDVVLRMDIRDFFGSTGAARVKRYCRAIGWDRRASNLLVKLCTWQGGLPQGAPTSPRLSNLVNYQMDARLAGLAQSIGARYTRYADDITFSFRADEANEARSSLARNPKTLDPAECRDDHRLPTAFAIRMTKAILADYGYKIHHKRKLHIRRKHQRQDVTGLVVNHKVNLPRRTRRWLRAVEHHLATGRPATLSAAQLAGWHALQHMVATQSQPGSP

SEQ ID NO: 6772 - protein, 389 aa, unidentified
  source 1..389: note = Related to nan
MPWGPDPASLFVDSTRARRHDVPAALAAPFAGRRTALRRPGPVAGLETQLPTWHVGQGGAGAGRKARARPRAPFTAADPMGLADLLRGLFGRSGPEPDRGAGIDELARRLGVSVEALQATPVAYRSFTIPKRSGRGERRIDAPEPALKALQRRILRRLLGRLKAHPAATGFERCHSIATNALCHTGQAVVLRMDIRDFFPSTREARVHRYFQKIGWNRDASGLLTRLCTYRGGLPQGAPTSPRLSNLVNVLLDTRLEALAKSIGAAYTRYADDLVFSFAKDERVSIHAAIQTTKTILEDEGYALHQDRKLQIMRRHERQRVTGLVVNDGVRLPRETRRRLRAVEHHLRTGRPATLTAAQLAGWEALRSMIDRQVDAARGGGGAGEGRGV

SEQ ID NO: 6773 - protein, 306 aa, unidentified
  source 1..306: note = Related to JAGNEZ010000007.1; note = Phycisphaerae bacterium
MGILNWLLGRRLRARRPAEYGPPRFGLADLVRRLGLSEAELRAVRASYREFEVPKRSGGTRRLAAPEPALKALQKRILRRALGRLKAHPAATGFERGHSIVTHALFHAGKAVVVRIDIQEFFASTAACRVEDYLRRIGWDAEATAALVKLCTHNGGLPQGAPTSPRLSNLVNRGLDARMQRLAAGLSACYSRYADDLTFSFDRDQSSADVRRLIGGAKAIITACGYRMHLKRKLHVRRCHQRQQVTGLVVNGQPSLPRETRRRLRAIEHHLRTGRPASLTPEQLAGWDSLRSMIETQRAQSPGGTG

SEQ ID NO: 6774 - protein, 324 aa, unidentified
  source 1..324: note = Related to WJLR01000725.1; note = Armatimonadia bacterium
MSGGPCAGHFGGAGARPRPQSLHKGGSTVGLWDRIRRLLGGGTPGHDLPSLAERLELTVDELRAVEPRYRTFDIPKRSGGHRTIDAPDDRLKELQRRVLHRVLHGLRAHPAVHGFEDGRSIVTNARLHVGKAVVITLDILDFFSNTTSRDIYRYLRFVGWSRSGAREIVRLTTYEGVLPQGAPTSPRLSNLVNYRMDARLAGMANSFGGDYTRYADDLTFSLTSDERVAVQGLIRTACEIIRDEDYEPHADKLTVRRRHQRQEVTGLVVNERIHLPRETRRWLRAVEHRLRTTGSCSLTEAELDGWLALTSMVHEQGEGVGVPD

SEQ ID NO: 6775 - protein, 300 aa, unidentified
  source 1..300: note = Related to JAGRKV010000051.1; note = Hyphomicrobiaceae bacterium
MAGLFAWISNRLDPGRSVEDLARWLKIEVADLQSVEPNYTTFRIPKRSGGFRTIEAPDERLKEVQRLILRRVLGGLKAHPCALGFERGRSIVTHAQAHVGKALVIRLDLVDFFPNTQADRVLEYFRSIGWNRRAAQLLVKLTTNNRHLPQGAPTSPRLTNLVNYKMDARLLAMARKVGGTDATYTRYADDLTFSVAHEGEHTSRDIIRGASTIVRDTGYLLHRKKKTHILRSHQRQTVAGLVVNDKVDLPRETRRWLRAVEHRERLGREATLTPAQLSGWRSLRHMIDTQRDPPARVRRR

SEQ ID NO: 6776 - protein, 309 aa, unidentified
  source 1..309: note = Related to JACRIL010000082.1; note = Planctomycetes bacterium
MGLMDFIRRRFGGGSGRSSLPAPDVGMDEKHLAGRLGVLPGKLELLNPTYKVFEIPKRGGGRRKIEAPAPMLKEMQNLILRKLLRRLKAHPCAYGFERGRSIAGNAAVHAGKAVVVRLDLKDFFPSISADRVRRYFRRIGWNGPAAELLVKVCTHEGRLPQGAPTSPRLSNLVNYSLDAGLLSAAKKYRADYTRYADDITFSFAIDDPGRIRSLIGSAKAVLSGEGYRINLHKKLRVARSHQRQKVTGLVVNSGVKLPRATRRRLRAIRHRLAAGKQATLTAAQLAGWTAFEAMIAAHDDPAAAGGQAS

SEQ ID NO: 6777 - protein, 317 aa, unidentified
  source 1..317: note = Related to NYZD01000065.1; note = Planctomycetaceae bacterium
MGVFDLIRRFFSNRDYDIPRDDPRQVPHDLSLEVRYPPALSVATLAERLGIAEGRLRNIEPNYNTFSIPKRSGGTRRIHAPSRELKAAQRRILRRLLARLNAHPTVCGFERGQSTVTHALLHAQQAVVVRLDIKNFFTSTDASHVAKYFRQIGWNREAIRLITVLCTHDGALPQGAPTSPRLSNLINYRMDARLAGLAQNQGAWYSRYADDLTFSFAEDSGERIHTVIRGAHRIAEQHGYEIHQRRKRHIRRRHQQQLVTGLVVNQTVRLPRHIRRWLRAVEHHRRTGKPTTLSDSQWQGWQAYAAMVERQSGATPQ

SEQ ID NO: 6778 - protein, 318 aa, unidentified
  source 1..318: note = Related to JAEUIE010000005.1; note = Planctomycetia bacterium
MGLFNWISKLFRRTLPPSVFKYPEPRWDKKELLRRLNLNEINLIYTVRGFNPRDTNLLAPHLIPLGYWWHKIPKRSGKPRMLYSPNPRLKLLQKLLLRKVFAKLAVHSACKGFRRGQSNCTHARLHVGKAVVVRIDIKDFFHSTSGNQVYDFFRRIGWNHEAASLIQAICTRKNRLPQGAPTSPILSNLVNYRMDARLAGLAGKSQAIYSRYADDLIFSFEQDNRRFIRGVIRRVVSILFESGYTINRTKLNVMRQHNRQVVTGLVVNRKVHLPRSTRRWLRSVEHHLNTGKSATLTREQLAGWKAYQQMIQTQSTGN

SEQ ID NO: 6779 - protein, 323 aa, unidentified
  source 1..323: note = Related to JAAYAY010000070.1; note = Planctomycetaceae bacterium
MGFLSWLLWGSGKSVGDLAEWLGVDVRQLKRLKPEYREFTIPKRSGGVRRIAAPSDELKRMQRRIGRRLLRGLRAHEAAHGFERNRSIVTNARVHCGQDVVVRMDLVDFFPSTSARRVHRYFRRIGWNRPAARLLTRLCTHEGGLPQGAPTSPRLSNLVNYRLDARIAGLVAALGGRYTRYADDLTISFAAEDAEDDWVIRSGPALPFVLEGHPEKIRYLRSFIRRVAGQEGYRVHRRKKTSVRRRHHRQMVTGLVVNEVVNLPRETRRRLRAIAHRAEQQKRPLLDADYRPFSYGRRQPTLTPAQLEGWEALQAMIVRQRVE

SEQ ID NO: 6780 - protein, 331 aa, unidentified
  source 1..331: note = Related to DUDC01000032.1; note = Planctomycetaceae bacterium
MTMGLIGWLLWGRGHGVGELARRLDIERRDIRRFQPQYREFTISKRSGGRRKIFAPNDELKKLQRRILRRLLARLRAHPAAHGFERRRSIVTNASAHQDQDVVMRFDLVDFFPSTSEHRVKRYFRRIGWNRPAAKILTRLCTYNGGLPQGAPTSPRLSNTINYLLDSRLAGMINAIGGAYTRYADDITISFSQEAEEDWGIRSGPAPPFTLRKHPEKIRYIRAFVRRAVREAGYQVHRGKKMNVRRRHHRQEVTGLVVNDHVNLPRKTRRWLRAVEHRARLLSQDREQSRYVMRKRPTLTPLQLAGWRAYRAMVLNGTGKTANATATRSHK

SEQ ID NO: 6781 - protein, 392 aa, unidentified
  source 1..392: note = Related to JACRUV010000658.1; note = Planctomycetes bacterium
MIRRPGPDGLAERRRVGHLYFRRRRAGPQIQVADTKQDSQGAAKANGRRGALCFAKDLFPFSTQYSRRSVMGFLSWLLWGRGFGLGELARWLDMDARELRRFQPEYRRFTIPKRSGGTRRILAPDDELKKLQRRILRRLLARLRAHPAAHGFERGRSIVTNARAHQGQEVVARFDLVDFFPSTSIQRVKTYFRRIGWNRRCAKILTRLCTHEGGLPQGAPTSPRLSNLVNYRIDARLAGMADALGGVYTRYADDITISFPKDEPEEEWVMRAGEPPPFSLARCPKKIAFMRAFVRRVVGEEGYRVHRRKKQSVRRRHHRQMVTGLVVNDGVNLPRKTRRWLRAVEHRAKMAKETPFDFANPSAKRPTLTPSQLEGWRAFQAMIANQSTGGEE

SEQ ID NO: 6782 - protein, 339 aa, unidentified
  source 1..339: note = Related to PBFX01000035.1; note = Planctomycetaceae bacterium
MGIRDPVVKLFDWIVNGTGHGTTELARRLGIPEQELRTVDPVYHAFSIPKRSGGTRKILAPEPRLKRFQRLLLRRVFAKLSVHPAATGFEPGRSIVTNARTHQGQAVVLRFDLIDFFSSTSTKRLRKYFRQIGWNRPASKLLLRLCTQQGGLPQGAPTSPRLSNLLNYRLDARLAGLIVKLRGRYTRYADDITISFATRDLHAAGKSDFPARNSAGGTPNHPTQTPTGQDTIRSITRAVQKVIESEGYRMHHRKKLSVRRQHQQQVVTGLVVNQRVNLPRSTRRWLRAVEHRTQMSQPLSLTSYQPGSYSRRKSPTLSPAQLEGWRSFRAMVQRQAIDD

SEQ ID NO: 6783 - protein, 328 aa, unidentified
  source 1..328: note = Related to MHYN01000254.1; note = Planctomycetes bacterium RBG_16_64_12
MGLIGRLIGWLTKGRGHGVEELARRLDSDLLDLSRFQPDYRPFTIPKRSGGQRRILAPERHLKRLQRRILIRLLARLRAHPAATGFERGKSIVTNARAHQGRAVVLRFDLVDFFPSTTAERLRKYLRRIGWNRPATEILLRLCTYEGGLPQGAPTSPRLSNLVNYRLDARLAGMAARLGGVYTRYADDLTISLPDEEQEKDWTIRSGPPPLFGLETNRDKIRFLQAFVRRVVEEEGYRLHRRKKLSVRRRHHRQEVTGLVVNDRVNLPRSTRRWLRAVAHRARLARQEGPGPSRPPSGGLPKRPTLTPAQLQGWQALESMIARQRTEG

SEQ ID NO: 6784 - protein, 327 aa, unidentified
  source 1..327: note = Related to JAFGAY010000394.1; note = Pirellulales bacterium
MGWLDRWFPGEGHGIDELARRLHVDPEQLRRTAPRYREFSIAKRRGGRRRILAPQTDLKNLQRRILRCILARLKSHPAAMGFERGRSIVTNALPHQGQAVVLRLDVKNFFASTRAGRVRRYFRLIGWNRPAAALLTRLCTHEGGLPQGAPTSPRLSNLVNYPLDARLSAMCERLGAVYTRYADDITISLSDEKEDRPLRNPPPRRGNVSPPPLSSEPNRLRYLRHFVRRVFDQAGYTLHWRKKASIRRRNHRQLVCGLVVNHRANLPRETRRWLRAVEHRTLLEKQAKTAPLSSLDRGRRKSPTLTQTQLDGWRALRLMITQQMEEG

SEQ ID NO: 6785 - protein, 365 aa, unidentified
  source 1..365: note = Related to JACOUH010000027.1; note = Planctomycetes bacterium
MKDLQRRILRRLLKRLRCHAAARGFQPGESIVTHATLHAGRAVVLRLDLRDFFPSTGSSRVYQYFRRIGWNRPAARLLTNLCTHQGGLPQGAPTSPRLSNLLNYRLDARLAAMAARLGAHYSRYADDITLSFGQDDRDRIRYIIRFVKRAAADEGYRVHGRRKLRIRRRHQQQRVTGLVVNAGVRLPRQTRRWLRAVEHHLRTGRVATLTPEQFAGWQAFRQMVEGRPRTASPAPLPPPLVPVPVELDGAWVLVALQKNGHAIPVNMPAEGIGPAEWTFASGELRIAQGDHEERADCSVDASTEPPRITIRPAGQEAGTAQGIFRLEGDKLTICVSEEGQPLPSAIPSVPGTGWTVYHLRALARR

SEQ ID NO: 6786 - protein, 305 aa, unidentified
  source 1..305: note = Related to CP066225.1; note = Planctomycetes bacterium
MGIFNKLKSLFSSNSSEPQHQTPTTPARFNLLDLEHRLDISHRQIKLIPLDYHTFTVPKSNGHKRLITAPNPELKKLQRTIAKRLLTKLAVHPNAVGFRKNHSVVTNAKAHTNSPMIIKLDIRNFFQSTPAQRVNHYFRFLGYDADSAQLLTSITTHIDHLPQGAPTSPILSNLLNYKLDTALTTLAQNHKAIYTRYADDITFSLDTKDSEAARNLVNAAAYLLHQFGYKLNNRKKRIIRNHRQQRVTGLVVNEKVNLPRETRRLIRAIQHAHDNNKPTTHSPQQLQSLKAYHQMIITQSEFETH

SEQ ID NO: 6787 - protein, 301 aa, unidentified
  source 1..301: note = Related to JAEIOG010000060.1; note = Phycisphaerae bacterium
MGLFDKIKGLFGSGSSGGVSGLTIDDLAQRLDMPVERLEGVEISYHSFTVPKSNGHQRRITAPDDKLKQVQRAILKRLLNKLAVHPNATGFRKGYSVVSNARLHVGSEVIVKLDIRNFFESTKINRVNKYFKFIGWDRKTANLLTELTTYKGGLPQGAPTSSALSNLLNYKLDSSLTTLAKKKGARYSRYADDMTFSLDGSDSKVINSIIWGAESALHDLGYRLNNRKTKVIRKHRQQRVTGLVVNEKVALPRKTRKLIRAIEHSQQNGRPSTHSADQLRSLKAYQAMVEKQGEDGELDEG

SEQ ID NO: 6788 - protein, 312 aa, Gemmata sp.
  source 1..312: note = Related to JAGKQQ010000001.1
MWPIFTPLWRTLSGGRSAPEAGIAPLPFESNWAERLARLGLSPENQRAIVASGALHPHLHYWRFQKPKRAGGRRAIAEPDRRLKRLQYAIVSWCFSAERSHPAAIAYQKGRSTADHIWAHAGAEIVITADIRDFFPSTRAERIETWWRERTDSDTARLLTLLTTDRDGLPQGAPTSPGLSNFVNTELDARLTRHAAPSGARYTRYCDDLAFSWPISSGPPSGFERGVRAALHEFGYTLHPEKGWRVSHRRDEPEIVGAVLTRSGGVRLPDRLRRVIRALARSASPGDVPKLAGYRGYAAQVTNRPGRRNPKT

SEQ ID NO: 6789 - protein, 309 aa, Gemmata sp.
  source 1..309: note = Related to NZ_LR593886.1
MWPIFTSLRRTLTGGRSGRTGDRPPVSSEADWAERFARLGLPPETLRNIIAADSLHPYFRYRRFHKPKRDGGRREIAEPSPRLKRLQREIITQYFATEQPHPAAVAYQRGKSTADHVWAHAGAEIVITADIRDFFPSTRADRVEMWWRERVDSETARLLTLLTTDCGELPQGAPTSPGLSNFLNTEMDAKLTRRATGACARYTRYCDDLAFSWPTGFGPPSDFERGVRATLHEFGYELHPKKGWHVHRRGDEPEVTGAVLTRSGGVRLPARIRQMMRALARRATSADTERLKGYRGYAAMIATRPRRRG

SEQ ID NO: 6790 - protein, 316 aa, unidentified
  source 1..316: note = Related to JAIOHM010000031.1; note = Anaerolineae bacterium
MNNPLSTLWYKLTNNWVAIYRQRYGYSDDYLTLGQMLGWGAIGALNVPQVPYPTLLRVLRRNSIYPDFRYRHFTRPKADGSLRELVEPDEKLKRIQRKILKTLLKNALIHPSAVGFRRKKSTADHAWAHAGAATIITADIEDFFPQTKTYRVEAWWKSYFIEQPEAESAARLLTLLTTYKGSLPQGAPTSPALSNILNYEMDAALERRVVASGGQYTRYCDDMAFSWGGIGDVPADFETAVRSIVQEYGYHLHRWEVWNAHDEPELTGIILARHGGVELPDDVQQTIRRLARSTSASDMARLQGYRAYESMVKKRR

SEQ ID NO: 6791 - protein, 327 aa, unidentified
  source 1..327: note = Related to JAHBVJ010000016.1; note = Anaerolineae bacterium
MLNDLPNTLRRLVGLPPAYRYTSPARNEGEWSMVTLCYRLGLKVEDAHQIMDSAAFPSGFRYREFTIPKRDGSPRQLLEPGPKLKQVQRRILTMLLRKAQPHHAAYGFRRKKSIADHAWAHANSRIIITADIQDFFPNTTRQHVKQWWHEQGFSTPEVRLLTALTTLHGSLPQGAPTSPPLSNLVNAQMDTALERHIQASGGIYTRYADDLCFSWPEGYAPPADFEFAVRSVLHEYGYALHPDKGWQVWDRDEEPTITGVVITKHGSVDIPDSMKRIMRTLQQHGTAADDTRLQGYQGYQRMITREPRPEKASAGLGKAPIKSPRLR

SEQ ID NO: 6792 - protein, 304 aa, unidentified
  source 1..304: note = Related to JAFGMM010000127.1; note = Anaerolineae bacterium
MWHRLPYALRKLRQTLIPIRYEPPDYALWNLQARLGLTPAEVSRLAMPGPFPPRFRYRHFTVPKKDGGRREICAPGPRLKEVQRQILRAYLDPRAPHPAAMGFRRALSIADHAWAHAGAAIIITADIEDFFPSTRARRVAAWWAAQGFNDAEVHLLTRLTTYRGSLPQGAPTSPALSNLVNAELDAALHRRAQQSGGVYTRYCDDLAFSWPDGGRPPADFEPAVRAALLGAGYRLHSGAEKGWQMWARRDEPEVTGLVLTRRGGVALPPPLYARMRSLARSDDPHDAARLAGYKGYELMIRKRR

SEQ ID NO: 6793 - protein, 316 aa, unidentified
  source 1..316: note = Related to JADZFG010000029.1; note = Anaerolineae bacterium
MLNKLPAPLRNLFGLYTSYMQPVKHPGEYALYMMAYRLGLNRYPVYRFLEPGPLPPYYRYRHFTVPKQDGTRREIVEPGPNLKAAQRRILQLYLNNRKPHPAALGFRRKKSIADHARAHAGAALIITADVEDFFPNTSRQRIKSFWRQQGFSTLEVRLLTALTSYRGALPQGAPTSPPLSNLVNYELDAALDRRVKPSGGTYTRYADDMVFSWPDLASPPADFEQTVRALLREVGYTLHPRKGWHVWVRRDEPLVTGVILKRDGSVDLPDSMRRIMRELARSDDPNDRARLAGYQGYEAMITGDATPVSRRKAQGR

SEQ ID NO: 6794 - protein, 318 aa, unidentified
  source 1..318: note = Related to JAADYZ010000077.1; note = Chloroflexi bacterium
MLRDILPAPIVDLLTQSLGVSLRRPRGFSPPAGDTWIIYHFFRYTLAMRDEDARAFLAGGKPPKGFTYRHFTVPKKDGSDRQLVEPGYALKAVQRRILRLLEARGVTNPAALAFRKGRSIADHAWTHAGAAIIITADIEDFFLSTSHRRVREVFHSIGYVDDRAHYLTRLTTYRGSLPQGAPTSPILSNLVNAEMDKQIARRTSESGGRYTRYADDMAFSWPDRFRPPGDFEQTIRGILREHGYRLHPRKGWRVWLRRDEPELTGLILTRRGGVDIPDSMKVIMRELEKGQSEDQAQRLSGYEGFRHMVQATRRRYRA

SEQ ID NO: 6795 - protein, 314 aa, unidentified
  source 1..314: note = Related to JAADYX010000020.1; note = Chloroflexi bacterium
MTRLDQILPDTLVRVLRMIATGYEHIPYRGHDDPYRSIYWMVGYRVGIDPPTIRAIMEGGDLPAVWRYRHFTVPKKDGSPRQLMEPGRDLKAAQRELLRRLNSLDPHPAALGFREGLSIADHAWTHAGARTIITADIEDFFPSTQATRIYDFWVRQRWVYDEIAARFLTRLTTYRGGLPQGAPTSPALSNLVNVGLDTKLAARARSAGATYTRYADDLVFSWPDEGRPPADFQHGVHAALHEFGYRLQPRKGWRVWHRRDEPEVTGLILTRGGSVDIPDSMKALMQTLERTATTEEDFQRLAGYEGYRQMVVRE

SEQ ID NO: 6796 - protein, 302 aa, unidentified
  source 1..302: note = Related to JAFGFI010000446.1; note = Anaerolineae bacterium
MASVLARLMGIFSVSTTKMCREDIFETPQVFRLSLLMDVPSATLLRFRSGWPGGRYYYRPLRCEKRDGSPRHIYAPSPPLKALQRALLSYLNSLTVHPAALGFRRGFSIADNARAHQGQAVVVTADIEDFFDSTPAQRVRDFFRAEGWDTTAVSILTRLCTFHSVLPQGAPTSPVLSNLVNTHLDADLTRVILQSGGRYSRYGDDLTFSWSTRAVPSGFEATARAILLSYGYHLNAQKGWRIWRVYAGDVAYITGIRLGLDGRLHPSSEIQQNMRELRHQRNDPVAAARLQGYQGFIKMLRS

SEQ ID NO: 6797 - protein, 313 aa, Paludisphaera sp.
  source 1..313: note = Related to NZ_JAALJI010000003.1
MSPWRPLGRLIPTALRSILPRFEHDSGAMGRLSTILGLSEDELRAFRLGPRYHYRPFTIPKPDGRNRRLLAPSAALKRLQRSLLDEYLGRLPVHPCATAFHPGASTVRHALPHARGTRIATVDLRDFFESTTAARVRRFFVSKGWRGESLGVLMRLCTYRGCLPQGAPTSPCLSNLVNERLDDRLRVLARRSGGRYTRYGDDLAFSWVERPMPAGFQRSIEAALERSGYSIQPRKGWLVREARGRPQVTGVVLAGDGRLHVPWRYRLRTAWLRWRGFWSRDPHVRAQWRGRQAYRRMVERGKAGPRRRPGRSS

SEQ ID NO: 6798 - protein, 313 aa, Planctomyces sp.
  source 1..313: note = Related to NZ_CP011273.1
MNPGHPLSYLVPPTLRRLLTPAGPSSAHAQALAQLLGVAEDELDAIRLGRRYHYRPIRGAKPDGRERRILAPSPPLKRLQRRLLDEHLGRLPIHPCATAFHPGASPVFNALPHARGATIVTLDLRDFFEATRAWRVHRFFREQGWSGEPLRVLMRLCTFRDGLPQGAPTSPCLSNLVNVRLDEKLRRLAARSRGIYTRYADDLTFSWVDGGMPGGFQRAVENVLEREGYEIQPRKVWRVSRARDRPRVTGLVIAGDGRVRVPWRFRVRTVLLRWRSWLTGDPVARARWRGCQGYLRMVDRSREGARSRPRKGG

SEQ ID NO: 6799 - protein, 300 aa, unidentified
  source 1..300: note = Related to MKTT01000068.1; note = Planctomycetales bacterium 71-10
MTPRHPLVRLLPPWGRDVDEALQREAVADLLGVAVDELDAIRMGPRYHYRPLAGTKPDGRERRILAPSPALKKLQRRFLDAYLVDQEVHPAAMAFRPGGSTLAHALPHARSRLIAAVDLRDFFESTRGGRVARWLAAQGWDREATRILMRLCVFRDALPQGAPTSPGLSNLVNRRLDERLDGLARRTGGVYTRYGDDLAFSWPDERLPGGFTASVEDVLARSGYEVQPRKGWRVGAARDGFEIVGLVLAGDGRVRVPRALRWRAALLRWRAALVGDPATTRRARGLAGYLKMVDRAPRTR

SEQ ID NO: 6800 - protein, 301 aa, unidentified
  source 1..301: note = Related to JAEUIF010001079.1; note = Planctomycetia bacterium
MDLNPGELLTRLLPNCLLGQAATPSAQRLADLLGIDVRELPAVRLGPRYHYRPFTIRKPDGRERRLLAPSPALKVLQRRLLDRYLAALPLHAAATAFHAGASNVLNARRHAHGRLIATVDVRDFFESTRAARVRAFFVRQGWHDAELHTLMRLCVYRNGLPQGAPTSPCLSNLVNRPLDERLENLARRMQATYTRYADDLTFSWDRDHLPDGFRPAVEDALHAAGYEVQPAKGWRIHGIGDRPVVTGLVLAGNGRVYVPWSLRWRLWRWRWQAWWSGDASAPLRLHGLESYVRSCAAVPEA

SEQ ID NO: 6801 - protein, 398 aa, unidentified
  source 1..398: note = Related to JAFGLD010000107.1; note = Anaerolineae bacterium
MEHLLSRFIPRSLRNLLPRQSSPSVSAMEMRLVGLLGVWPSEFSTIRLGRKYHYRPFSVTKRDGRERRILAPSPPLKKLQRMLLHRYLDTLPVHPAAMAFRRGCSIVDNAQRHAGQKLVATLDLVDFFESTTADRVRGFFLKQGWHGEALSMLMRLCVYRNGLPQGAPTSPALSNLVNYEMDERIADLARRADAVYTRYGDDLTFSWRTEHIPAYFVPALVSILTDAGYAIQPRKPWRVRPMSDEPKVTGLVLGRNGRIRAPLNLQWEVVKLRWHLFWHSGDAHARARLQGYQAFLQALEVKYDNHNHINWPDNLPGLRWEIFKLRWRLLLRPGDSDARSRLAGYQSLLYYYQANRKNSASTYRYISEGNDDYNDYDDEDDYDDFEDYDNDDLDELPF

SEQ ID NO: 6802 - protein, 300 aa, unidentified
  source 1..300: note = Related to JAFGMS010000346.1; note = Anaerolineae bacterium
MHNPLAHFVPRCLRELLSIPSTQASEWEAQLAYWLQVPVGELPNIRMGPRYHYRPFSITKRDGRERRILAPSPALKQLQHRLLHNYLYTLPVHPAATAFQRGCSIMDNARRHAGQTLIATLDLVDFFESTTADRVRRFFVRQGWRGKELAVLMRLCVYRDGLPQGAPTSPCLSNLVNYDLDEQMASLAQRADAIYTRYGDDLTFSWRNDRVPAYFEPKLRGILTDAGYAIQPRKAWHIQHINAGPQITGLVLGHDGRIQIPRRLYWEAFKLRWRLWWRPDPHTAARLQGYESFFNTPGLR

SEQ ID NO: 6803 - protein, 301 aa, unidentified
  source 1..301: note = Related to NZ_AP019860.1; note = Candidatus Uabimicrobium amorphum
MVKYSWQKILRDILPQKNIMAANTDDTNLEMLSSIFAIRIDILQEVSRSIHRHYTTFEISKKNGGTRNIYAPNPTLKKVQYEIFHYLQNFAIHPTATAFIPGGSIIVNARQHLNQELFLTVDIKDFFTNTSTKRVRNFFRDQGWEKQSLDMLVSLCTYQGGLPQGAPSSPQLSNVINMELDEEIYQAASASSATYTRYGDDITFSWSTSCMDSGLKNKVTQILTNFGYEISPQKGWQLFCAEQQPEIVGVVMGSDGKLRVPQRIHEKLDKLHQKNNPDLQGQIRGYENYIKGVESASVSIA

SEQ ID NO: 6804 - protein, 319 aa, unidentified
  source 1..319: note = Related to JAFGWW010000022.1; note = Planctomycetes bacterium
MGLFDFIGKFLGTSAPETASTKAASNAPASPYANQNYYIKKAVYLKYYLGQNENQLKEFRPEYNTFQIPKRSGGARTINEPKPETKALQHKILRMLRNGNTHKCAVGFRRGRGIVHNAIPHVGKAVVLKMDIRNFFPSVTREKCVTAIMQTGWEKGAAEILADICCLNGGLPQGAPTSPLLSNIANTRLDCRLYGLAKKLSTGTQKVDYTRYADDITFSFATDEPGLVRGVITLIFQILHEEGYQVNKKKTRVMRQHQRQTVTGLVVNETINIPRKQRRKIRAAMHRISVGEEPTLTNEQLQGWMGMLSLVQKGKEEYL

SEQ ID NO: 6805 - protein, 323 aa, unidentified
  source 1..323: note = Related to JAEURL010000499.1; note = Anaerolineales bacterium
MNWLSQLTRGLRRERTPADLARWLGLPEAELRPWLASGPAWARGYEYRRFTIPKRRGGVRVIDAPTEKLKDLQRRVLRRLLAPLAPHAAATGFRRGHSIVDNARPHTGQAVVINLDLADFFPSIAAARVDALFRAVGWNAEAARILTAICTLDGALPQGAPTSPALSNLVCRRLDARLAALARSQGGAYTRYADDLTFSFPAFGRNRRLRRHAGRPTPGRRPAPSWVTPRSLLGWVRAILEAEGFRIQFKKQVRVQRPHQRQTATGLVVNQAVNLPRATRRLIRAMQHHERLGRLDAAGRRRLRGLEALAGMVARQREEPQRR

SEQ ID NO: 6806 - protein, 319 aa, unidentified
  source 1..319: note = Related to JAGOBN010000015.1; note = Anaerolineales bacterium
MSLFNWIKQALGRARSPADLARWLQLPEAELRLWLDQRPAWTRGYEYRSFTLPKKRGGTRVIDAPTEKLKALQHRILRRLLNPLRPHPAATGFVPGLSIVDNARPHAGQGVVINLDLENFFPSITPARVEAVFRAHGWDAEAARILTAICTYENALPQGAPTSPALSNLVCRKLDARLAALAEYFDGAYTRYADDLTLSFPSFGRNRRLRRHAGRPTPGWRPKPGPAAPRTLLTWVRAILEAEGFRIQLKKKVRVQRPHQRQTATGLVVNEVVNLPRAVRRRIRAMQHRERLGQLDEAGRQRLRGWEALAHMVANQREG

SEQ ID NO: 6807 - protein, 323 aa, unidentified
  source 1..323: note = Related to JADZEK010000016.1; note = Anaerolineales bacterium
MNFLKAFGRLGGRERGLAELARWLGLPETELRPWLSSAPAWARGYDYTRFTIPKRRGGARTIDAPGDKLKALQRRVHQRLLAGLKLNPAATGYVRGRSIVDNARPHTQQAVVINVDLADFFPSITADRVKAVWRAHGWNDEAATALTHICTLDGRLPQGAPTSPALSNLVCRRLDKRLSELARRCAGAYTRYADDLTLSLPSLGRNRRRRPGPPRSGPAQPRLAQRARHSRKIITQLREIIEAEGFRIQWKKRLRLQRAHQRQTATGLVVNAVVNLPRATRRLIRAMQHRDRLGQLDEAGRRRLQGLVNLQQMVLKQRNSTGR

SEQ ID NO: 6808 - protein, 348 aa, unidentified
  source 1..348: note = Related to JADLEU010000283.1; note = Anaerolineales bacterium
MLRRPGTAAAAEVGLLDYVQQAELPGFLMPVFASLNRLLKRARSPKDLARWLDVPEGELRGWLSGPAPWARGYDYDHFTIAKRRGGTRTIDAPGDKLKVLQRRVLHRLLGPLPARPEATGFVRGRSIVDNARPHVGQGVVVNFDLADFFPSITANRVEAAWRALGWDAEAATILTRICTLDGRLPQGAPTSPALSNLVCRRLDARLGALARSLRGQYTRYADDLTFSFPGLGRNRRRRPGPPRSGPARRRPRGPSRRVLATVRDIVMAEGFAIQWKKRVRIQRAHQRQTATGLVINRKVNLPRATRRLIRAMQHRRRLGRLDDAGRRRLRGLEALAAMVDRQRAAPGR

SEQ ID NO: 6809 - protein, 317 aa, unidentified
  source 1..317: note = Related to JACPWC010000114.1; note = Chloroflexi bacterium
MNLFKSLFNTVSGGRSPADLAKWLDLPEAELREWLTNKPAWARGYEYARFSIPKRRGGVRAIEAPNKKLKALQRRILRRLLNPLKFHPAATGFVPGRSIVDNARPHAGRGVVINIDLAEFFPTITAERVTQVFRSLGWGAEAATILTNICAYEGRLPQGAPTSPALSNLICRKLDERFSALVKRYKGQYTRYADDITFSFPGLGRNKRLRPKPKGRPPLARPAQGGPGRTLLTLIKTIVEEEGFRIQMKKKVRVQRPHQRQTATGLVVNRQVNLPRTTRRLIRAMQHRQRLDQLDAEGQRRLKGLEALMDMVSRQRG

SEQ ID NO: 6810 - protein, 336 aa, unidentified
  source 1..336: note = Related to JACQNR010000440.1; note = Acidobacteria bacterium
MVQNADRKKAGRAVRREYPVVGVFKSIARILDRGRGPDKLAAWLGLRQDEVEAWAQGRPPEPSGREFYYNRFTIPKRDGRTREIDAPSDALKSMQRRVLHRLLNPLPAAAESTGFVRGRSVVHNAQPHTDQDVVINIDLENFFPSITAQQVRASLVACGWSNTSADILTNICTYQGRLPQGSPTSPPLSNMVARRLDARLAGLVKGYDGHYTRYADDMTFSFPAFGAALDWKASTAVKQARCKLLSMIQMIIEEEGFKIQRKKRIRIQRAHQRQTATGLVVNSRVNLPREFRRRIRAAEHREKLGKLSAEDKARLRGWQSWRAMVSHQGAQAASPP

SEQ ID NO: 6811 - protein, 791 aa, unidentified
  source 1..791: note = Related to JAFUWU010000052.1; note = Oscillospiraceae bacterium
AAKLAGLPEDIAREDVSIAGLDGLRLSWGETLFAPDLAAITPLTDQAGRFAGSVLGCEAPAWCFLPVGRMATRLRFSSELESMPESMRRQLADAYIETHPQKVAPGQGGMHWLTAKSFECPEWEDLCALQTSKPTPELLQAMANTRQRRAVKEAMRYLRLFRDRNYENCVTRFMGTELWRKAGGVRLHQDLAEDLEKFLGMPGAVLSAPERQRFAAAAILDAEDREELARNFSRLIGSRVPAEFVLEHVCAGGRKDAVQLLLDSAPDAIRRRYIIDFIGTHLWERAGGASLHEDFAQDLAQALASPSRQLAESELCRMALRMADERHDASLVAAVLPALTRSDKTWAAAEQGVETPLLVEAVRAIDESDILDRVLSFAKQPDIELAAHDALLQFLMFDEEILEEHLWRAEHRCSAKRLPECETTLAQLTAIAIREHGNLRRMARLLSAHAEKCGLKGRQAEGLVAQALRSAARLVSRHGRHRAAALELLSCIGLECATALKYVLANLDRKAGSGRELDHVYHLWELPKKSGGKRTICAPPMPLKIVQRAILHRLLEPLGAHKAAYGFVPGRSIGQNAALHVGSEVVANTDISSCFPSVRWQLVLGVLRRDLGKTLLSGTVSLVTDICTGQGGLPTGAPTSPAILNRVLLKTDEILTAAAARRGCTYSRYADDLTFSGGRGAVEMLGVARSTLERIGLKLDPKKTNIFRRGRRQTCTGLVVNDKVAVPRAIRRRLRAAVHAVEQGREPAWHGREDTVAALGGRLNFLASVQPEKAAPLKERLARALHGGKDR

SEQ ID NO: 6812 - protein, 1108 aa, Sutterella wadsworthensis
  source 1..1108: note = Related to JAGZDF010000029.1
MTANGEARFAEVIKAFPTLSEAEVLRLSYAFFKSEPENQAILLSIAKRGALASVAQDIEAQYPPSSEAATYLLKGETLVLPGFCTALPTEIQLRYLLAKWAHSSTPNVLQLVQKLSSFKGLKSLMLQAELQVLVGYLKAHSIWVTKCEPEATLLLPKDLISGFMHGDVADEFFLGGSALQHLEDLANCGLRSILVSVNNAWEKLEFDKLNELFERVPNALIDHPLQPDLQAALKKRMISSSKHTLAKRLKRKKNQTWNFMDQRVATALSHLLGFKVPRWAIGDHEAFSQILVDQNLLQCFDDRQLQKLINEIGMPVMTACAAQSATQKLVKNYPEAYAPLPLSTIWRAVNREDMFKVVGWPKITLESLTLALNAGIAQQKLVWLSGYMKAVDASQKEAIQTLLLTKHLKLAARVIESTDPCWLQVPIKACVENGLWSVVLQADAKRVMDEVPRRFLVDKVLGNCRRKAFSRDPFDRIYDDQLLEAYRALTSNTALRRHFVTSLLERSWCTDHKGTGYLILGGRRFSYVALATELLRCTAFVGDRDYRKEVVVQGLKSAKSQSHRQTLLRLIQQDVIETDMPEAWIKAVLSWPKEVLKTLLPKMTGKLLDAYVDRVGVRGLNACYATSPKALSSRHFFALRVTRLKKGGVWPEDRLLKRDDHGYDEVIETASNFLGIREARCLDMCLERMADKGEAVLQYLCEHAKDVMSHELTRWVDVVLARYAIAPEARLKALTSDVTTADVKFWPQQGPDGDEGDVYAYLRVHHSLKALSEVWSARGVVPDNVRTIMASKWPNDAAWFELMLVLGPSYVSLIRQVMGMMDFKAPFGSRFDAHYRHSTIPKKSGGVRDIYAPERALKALQTLINVKLLQPLGAHDAAFGFVPGRNITGNAERHVGQSIVTTADIHSCFPSVGRGLVVHALKRDLGERLSYGAILKIADICLSQGVLPTGAPTSPALLNRVLLRTDELLTDAATSKGCTYTRYADDITFSGGEGAVNLLGVAKGVLKPIGLMLDPKKTNVFRRGRRQCCTGLVVNDRVSVNREKCRRLRAAVHALEMGRPLLWDGKPETVAQLRGRLAFLASVKAEEGARLMARLEAALRQKTTVCAQ

SEQ ID NO: 6813 - protein, 1226 aa, Mesosutterella sp.
  source 1..1226: note = Related to JAKNCT010000004.1
MKNFRQAKDESSFSLEIRDAVNSLDFAIPRALPRGDPFAPSVPEEYWKKIRSAVEQLWPARVRPLFKGKDEARAYQEAWISAAYSPFWDCLRISALWCAGQPGRQALLEAVRQADAVPRQYPPAASPLLKAVERGPHNPYLDEESALDKYREVFPIGSFTPPIDTCMKLGRLVVESRRKRPACVSAWDVFRCLPPTLPHLSCRWLTRTLLGFADACARLGIRIKKIPAACAAFLGRDASIAIRSPAVRSFFLLPPKKDFSIDVRAPAGMTLLGYLFYAFSKTGEYEAVFIVSESLLRAFSGEPKLLRRFKESPGYQLFLKAAVQEEPTPKGRRDWLGERRSLEGNPRVGALLRHLFGKILPGWNRSGQASFLVELAKGARANCYFPREYQRFLLLVSSERQKRRLEESGHWLQLFDLEDGCRKGAANWKFILLQESWDTVWNAKDRLQEELTAEKDASAYLRFVARHHPSGDLSLDFYNNKKIKERFIYDFHGSPLWEKAGGACLEPQQAEALCFAWGSASFRGRAGSLAPALEEVGPYCLEDLLALMLTPAGLRRCRGALLRVLPRASADAVRHIADRCEEGDVLRAIALHGPEEARVPAALRAYDQLAPGKAAALGRKLFLAGLPVRLAPGWLDRGSWSAEKLFLALCELCGDPDRAGLRQALEACAPEPAGSRRLSRKARLIVARLAARAARRFEPGEAGAAPGALSAREVGLAEWLLREARCCAWGAASYNGPGQSIAPALNEIGPNCREDLLALMLTPAGVRRGGGALLRVLHKAPAEAVLEIIDHCTDVEVLQAIALHGPKEARVPAARQAFDRLRPQKAIELAKKFFLAGLPVRLAWGCRDVKSWTREKLFLALCASCDKRDANELCEVLDVFARSFQGPDAEAAARGTLEEVARLAARAGRLLVSAEAGLVAGLWPGKQARIVKWLISAMDWKAAPGCRLQKSYRRFHIPKKHGGKRLISEPIKKLKFLQRGVLERLIAPLGAHPAAMGFVAGKSIADNASVHSGQPVVAVADVHNCFPSVAWPVLYRVLERDLGPRLGAPACALIADLCTLDGGLPMGSPASPALLNRVLFKADEILASEAKRKGCRYTRYADDLAFSGGEGAVGLIARAGSVLSAAGLRLDPKKSSVFRRGRRQVVTGLTVNAKPDVSRDYRRRVRAAADRWRKGLEPSWLGCPVTREQLLGRIAFVNMTSAEEAVRLRKWMREGDRLRGKKGKAA

SEQ ID NO: 6814 - protein, 999 aa, unidentified
  source 1..999: note = Related to RGQD01000262.1; note = Betaproteobacteria bacterium
MTAPDPRQRRAEDLCALLEQQGADLFAAPRMAGLDPYAHDFGACWLSEFSAGLAPLWPACLSLFGRQLPKQAVLQQCWSVAMERPLWLGMLYRAACAAGLSPAASPLLWAEASRLKAITAARWRTDAMAVALMAADAAAVVVPDLGPQTALKGSLRLRYRLAHLCATGAALQGLIDAAAHQSGVTDYQRRVELARAVHGAQSGGRRWRPLREVEYLLLTPKSRQLVIGTPALWPLLLGAALQRLAALPDHLAGRIAERDSLSRWLASMMLALRERRLDQAGADIARLDDSALLRQLVLVLRREQAGLRRLDADFGLATLHGSDGRAWAPMEAVALARLSSLCGRAMPVWWAMSAGKVAQQLAVGALQSSELPLHDLVLLRRGWCEADELLLIAAGKGGLLLADAVGWRSAPLTDLVRVANEPGKFGNFGRQKLADRLLALPDARPWLLCMAGPQAPVLRALADRAISDCAQTFARSWGRFVSSSIGTPEWQGVIDAVQDQPGTYPLVFMYGLALLADGRTPVAPQGFGQAMLASLCVAVGDGAAPLSSSAGLPGPLPEQAAQAAALSLSTQRLLRHLLPAVLRWLELDPQATDGLVDEGPEPLLMALAAHPESPLPLLDRLRFSSRPVLQRAAWRQRLHRVSSLDDLRDLTLHLPPQVGLLPWRTRWLSLAADDALQRAVTLLACARRNGWWLRALHKHLGEPLWLDGLQGAITLLKGSAAREAAMLELVRAVGAELAPPLMAVFAAARRSAAPGHKLDASYTRSLRPKKSGGQRVILAPGRALKRVQRAVLDHLLLPLGSHACACGFVPGRSICDNAAPHVGQPVVVNADVSNCFPSVKWPLVLGALRRDLGHSLAPVAVSMLVDICTAEGGLPVGAPTSPTLLNRVLWRSDEVLAQAAEQRGLRYTRYADDLTFSGSDTAVQMLGVARRTLAQIGLALDPKKTNIFRRGRRQMVTGLVVNQQVSVPRHIRRRLRAAVHRVEQGGVAQWDGAEQSAAA

SEQ ID NO: 6815 - protein, 977 aa, unidentified
  source 1..977: note = Related to RFVU01000247.1; note = Betaproteobacteria bacterium
MLDVLKLLNAQQDRLRTTLTELDPLAPQFAETAWQAIAALAEPLWQPLRQMVDTERDVYVLQQAWAVCWKSRLHVALLYRAGMANPATREEALRLRGITLERWQKPLSPKDDVRQHDLVAFLMAADETEAGVPHLGRNAYYKGSIRLRYALAHAYRSGAALPALLHLASVQACVTAYQRRIEFSRVVQQGAIDGRMWRRLGATEYALLSLSAQELLVDAPATWPQVLLRPLNDGNFLQLAAQLTEERKRLNGLLSDLMHAIRMRHLGKADAILAQVPDTPLAHALSQRLKREPWGLDDAMTHPSMRPAFGPWVPMSKASLARLRPWAPQALPAWWGLSATEVAQAIGSGELVPQEPASAITRYITRQDLAPLQRTWTRDEQLTIIKAGAGNLLPMAAPAWDDVPLHELVPTLQAMRFGTHSILARRLAALPDASEWIALMADAPDADHARKLRELAQAAIDTCWHGNRISCWSEWIVSAWGCAGWDRVQQIALAHTTPLKAAVAMFASSRMPLLPGEFQAVLARSLHHAELLPPRPLPWIRRWLSYDPLAARALTLHAPLLWLERLARNVATPTQTLDALLACQYESVVRMAWRNRLKRVTRTEELAELAMRRPKGAGPAGSVYRWLQLPGADRNATLVLIHRHDVRRLRLLHEEWGSTTFDAACQSAQQQLISRADAGEPQARREAAMLELQTRLGLDFAEHMHQVLMLLTRDAPSGHKLDASYRSFEIPKRHSGMRRISAPHASVKAAQRIVLNAQPHVGQPVVVNADIRNCFPSVRWQLVLGTLRRELGRQLSPTAISLLTDLCTAQGALPVGAPTSPALLNLVLRRTDEVLSHAAQRVGAQYTRYADDLTFSGDHRAVGLLRLAKRTLGCIGLELDPRKTNVFRRGRRQMVTGLVVNDRVSVPRALRKRLRAVVHSAEQGIAPHWNGRACADDLSDVRGWLAFMGLLHAPQAARLRARLNAAAPLDQGVRDAY

SEQ ID NO: 6816 - protein, 461 aa, unidentified
  source 1..461: note = Related to RFZY01000240.1; note = Betaproteobacteria bacterium
RRWLSYDPLAARALTLHAPLLWLERLARNVATPTQTLDALLACQYESVVRMAWRNRLKRVTRTEELAELAMRRPKGAGPAGSVYRWLQLPGADRNATLVLIHRHDVRRLRLLHEEWGSTTFDAACQSAQQQLISRADAGEPQARREAAMLELQTRLGLDFAEHMHQVLMLLTRDAPSGHKLDASYRSFEIPKRHSGMRRISAPHASVKAAQRIVLDKLLQPLGAHLAACGFVPGRNIAHNAQPHVGQPVVVNADIRNCFPNVRWQLVLGTLRRELGRQLSPTAISLLTDLCTAQGALPVGAPTSPALLNLVLRRTDEVLSHAAQRVGAQYTRYADDLTFSGDHRAVGLLRLAKRTLGCIGLELDPRKTNVFRRGRRQMVTGLVVNDRVSVPRALRKRLRAVVHSAEQGIAPHWNGRACADDLSDVRGWLAFMGLLHAPQAALLRARLNAAAPLDQGVRDAY

SEQ ID NO: 6817 - protein, 498 aa, unidentified
  source 1..498: note = Related to JAJTGH010000210.1; note = Comamonadaceae bacterium
SFRQVVARSLHHIELLPPRPMLYIKRWIARDPASATALADHGPVHWVQRLVANTTTPLAALDALIASEGLPAPLRRLAWRNRIARTRDAQTLAELSARMPANTGHFDQLNQWMVQGTQASTAMALVLTARRDGPRLLQLHQRFGDEVFITACREAAQLLRQMAQDPTSGTRQSGRHDAAALELLGHLGAQAAPHLMPALALCRSQQPAGCKLDGAYAQHRIPKKNGTLRLIHAPHPALRKAQRLILDQLLAPLGAHPAVCGFVADRSIVHNALPHVGQAVVVNADIKNCFPSVRWPLVLGALRRELGHSLSPAALSLLVDLSTAGGALPVGAPTSPALLNLVLRGTDETLHSSAERAGLRYTRYADDLTFSGNSQAVGLLRLAERTLAQIGLTLDPAKTNVFRRGRRQMVTGLVVNNQVSVPRAARRRLRAAVHRVELKEQPHWNGQPQSMAALRGRLAFVSMVCKPQAQPLVDRLQRALAQDERPDSEPPSPQGSLA

SEQ ID NO: 6818 - protein, 821 aa, Verrucomicrobium sp.
  source 1..821: note = Related to JAJTFN010000084.1
MALRPARGNLPLPTLEVLRPILLKSFGPQGGRRSFLNSIPRVSGLATCLEEGFLQGLSPLSRTEFDELPSAVRRWFLGCPALVSVGLDEGFRRDVASHPDSPEMVALEHWEQKVLPKALHAMRSGILSEADGFPAGFFRNPLALRQQEPIRQALRSRKHLFGPSADFLGQELPQAAIRRFDPRTRRLLQFHGARADQRLLGGPGDDLESLLQLVRDTTVGQLADAIHQCSSEGPLLDLVRLHPTEPAVREAMERVLGIPGLRWGLLRMLGRPVLQAAGEDALVSILRANPDVVTCCDVELANRPEFGRALVRCFRSRDGAARVLHRLPGRAVSALLSETHPVVGLGGEIAQAGARSRNRPTRCAILALLVRHAPRLIEGTYGWVIPAGIHQDVARRALYHRRHGGLGALFRFTDRKGRPHWQETVRKTGATPALRRVLRRDRPDLIPELHRWDALRALKTPGFRRRLVAFLEGDFEVDLGLAPAALRHLVPWVRKRWIRQPTVALAYEIALALSPRDARYLLALCTQRAGIGLMPPGGTAFDSLYRTVHIPKRSGGTRALQVPNPSLKRLQRRFLAHGFDAIPLHDAAHGFRKGRSILSNAGPHAGKPCVVNVDIEGFFPGTTYRNILRACSELADGALSPAARHVVADLCSYQGALPTGAPTSPAIGNIVLRAADAAISKAVHRFGVAYTRYADDLTFSGGTGCVGALRFVEKVLGELGYRLNAKKTNIFRRGRRQMVTGLVVNQAPHLPRRTRRLIRAAAHRAATGGEIQWNGRPMSRPELEGRIAFLKMVHPEEARELLGRLGGDGAPGGVPGGKGSA

SEQ ID NO: 6819 - protein, 1037 aa, unidentified
  source 1..1037: note = Related to DNQI01000253.1; note = Verrucomicrobiales bacterium
MGVDPKVDRAALALASSKMQVDVSAATLKLEDEAVSDVDEIHARLAEILISNGTNGRRLREEARDLARDRQRCWRGRAKSRGISVDGYARNLIASAPRHCLCELIFVYLDAEKASEEGFSKEVAEYLKRSRTRRSNLFRQLLETNRVPTSGALLRVLEFSAGKITPVLAGEAFEGKCPEKEIAPRLSALYQYARSPEEADAFCMKFGHAVFDREKFDSLSRKLKSRILSQKKLSRRLLTSDFRREIENDPLSHPDTPESLHLAATPKRNREAFRRIASGSWQHEEVEELILSGAVHQFASRIDKLLARKASWVEHSRSSGRYSWDAESGWKTNPFELVSSPTSKTVREAIEAIRPLALHDDLFILQLETLDERAKFLGDLPSGRRRRICQRLGEKPYLEILEKAVGLDRGLAEKLLRCREKSRETLREQFIPRRSSETAMIDLWLECFDSQEIFREFFKLKRLQGRWRTVLEYFVRAPYTHLGTWRQKEKRGTKGPLPSRFLNAVLESGGDWRTFQTVMTRLKAEDLARLVEHAPDRMLTWLTGISEGLSSGNRNQEFACFLDAMVPAIPKRLGDVLPREMSDTMFRTTLEKLAGPIRRGVLTPSGYRWLLNRNTRGGDPAWLELLEASRERNLSPSEDPALHVLASGILALGGRDRFRVLFEAYPTLYFGEALERLDLWTVVRQTFDHPSLARWLERKTERSKLVVLIPKVRREYRSRPTVAAALEVALRFSLSDARYLKWLALKRWQARPCAEGTAFDDLYRTHRLPKRAGGSRVITAPEPRLKRLQRRLLRNGFDELPQHSASHGFRQGRSIVSNAVAHTGREMVVRADITSFFPSTGYAHVLRSCRLLADGQLSEGAVRLVAEVCCYAGALPTGAPTSPVIGNLVLKPVDASLEAASKKLGIIYTRYADDLAFSGDDGTQKILPFVRKVLSDYGYQSDPKKEHIFRRGRRQVVTGLVVNEKAHVPRRIRRRLRAAVHHASHGKNPHWHGHKMNETELLGRLAFLQQAHPEEASELRTQLQQREHQRDRKGQEE

SEQ ID NO: 6820 - protein, 305 aa, unidentified
  source 1..305: note = Related to RFON01000065.1; note = Planctomycetes bacterium
MSDLREMDHLRAIAWAGRGATNLQAGCLLDSRYRTYELPKRSGGVRIITAPDPRLKRLQRRLLVGAFEAVPLHDAVHGFRSGRSIATNAARHVGQRLVVNVDIAGFFPNTKFQQVLSACKRVDGGRLSPYAARLLAEICCYAGALPTGAPTSPAVANIVLRPADTAIANAAATHGISYTRYADDLTFSGEGDAKRIIPFVRRVLAQAGYRLDQRKTQLYRRGRQQLVTNLVVNERVNLRRSDRRRLRAAVHHRCVGRPAEWHGRAMDDHALEGRIALLAMVDRKEADLLLARLRSQASGWRSRDA

SEQ ID NO: 6821 - protein, 940 aa, unidentified
  source 1..940: note = Related to JABITJ010000441.1; note = Gammaproteobacteria bacterium
MSSRFSLPSLLLSSNEDSYFAFLRALPVEQNLTSQDILALCKKLDWRSLDSASKCQALLTQLVKDSSADFEELAHDIDISSQSFWRNLLACSEASTRPGLQFLIEANEAWGNEVLGSNQAKIMDDLPANKIVNALMTLLVDPARLTSTQLGLIAPRQRAACLHHYLRQRVPAARKKKNLELLPIFRSARKIYGPEANPRVVLLAVQRALIRQSLSAKKIGKREFLMLDDGLQSALTASPVLLDRFVASQYRHVLISMRRQIVRVKKLPILDLTHTIQSLESGNLSNKLIPALEFWRFVRPDFSKLVVNSLLKIADTSEITQSTALAQWCGTTSYDMSIGFLSVLSAFAPLEKFLSYPDRTRRDIAYKMNAKLLLLVLRAGPVPEIGHVAKLAAKKPGILRAWLTEWDRWQKDEDISYGMSLMSEIIANSRQVDVHWRVLERQIASLPLSTLSIFLSSDNSKFHNGTRNQSRLIKLMLQSWRRGQKHDNAQRLLKICRRHGRTILEVAGDSLTAMEIRCIAGSKYLGELRKIIASRSQKIPGWRQFVTVSLLKAERAPYLLNRIIEGNPHLVAEAFHVRPDLVRWKDVELVDPNDLVHAATHSKKFARKLDLRLTDRRRRSLLPVIRALYGNKPRSCAAYELAMLTELKLSRTFVSLALMLAHANQVPEGNTFNAFYKTYKLPKKSGGSRTITAPSTMLKAVQRGLLKKAIAPMDNSPSATGFRKGSSIVKNAQEHVNQKIVVNVDITAFFPNTRYSLIRQVAAQAVDGHLSPIAQWLLAEICSYQGALPTGAPTSPAVGNIVLKRADATIAKAAEHRRIKYTRYADDLTFSGEDGVVDILPLVVRTLGAWGYELDNKKTNIFRRGRRQIVTGLVVNEKPNMAKPLRRRLRSAVHRRLSGRQPSWHGKPMSDSELLGRIAFLAQTQPAEAKKLRDQLEAVQ

SEQ ID NO: 6822 - protein, 1327 aa, unidentified
  source 1..1327: note = Related to QWPT01000007.1; note = Planctomycetes bacterium
MLVVVEVAKWRTQKEANMLNGYRRPNSMASQQGEQCIQSVPFCSTLPNITSGLKHWEMDCVRPSTYFKSIALQLWTELQIDKNFAKELQRNHRSANGLQCVRYLHATAKSDADRALTWLFATHLLPSWKLPQPMLPMLLAQLQREYKDVALVQAIMRMADQSVKAGEAGRAFDHELDHEFDHAPEALVFVDSADAHLFLEAANKKCSADAPLWMCLSTCVRPDRNAANGACACPCHALEPLSQLRRLYSLLARAHRRVPQGKNAFELETLLSVTDLSTPNPTAHGPVDLRQTSHVAHNRIDRFGLDFIINQLPFGSVIAGPLRRAMLDTVFLGEFAPFLDSIANEAPPAGRMRQLTDRQISHAHSLRVRHRNEWDSAIGATLDLVTARSTDAIPADSNAIQEDCWNHLRIVDAILHEANPRRRIGEYLRRIVAREGPALQPDAATKCQPTEPLLEAMELIGRALILRELRSTVGGPKPLTSTSTMGLLGRFAMPSESISNSLKLNLPDPPIAATPSAPEGPWYRRQANDPKHTNLDSIKHCLRCLYGCRSDAIMLSIASVFDGPTKAVAMATSGNWLKPGALARWMRTSSIPSSNRFDFVRQLTLTHGDKLDKLLPMFARERTWDDHRPLFKGQQRPTNATEQWLVQSIELPPKSLALLSPRARKAYLANFIRRYGDLATKFLAPNFQSRIQREKNGQLDFAGNALGTVACAVNELPWRTVRAALPLHVIETVISESKFGAARVPASVPPSVPPSVPLADVKKLFSYHGESALVVWARAWHRIVSSAATTQSGKARATKALIRNISKGKFNLQCFCELASQPPSASKSKKRFVSDFATTILAIPAIVQALVSQSKSLDQTWFLLQNSRGHALADLPRSQLENFVLSIDSDLRDISDGPPGDSPADAKKLNRPYRKALRSPLNFVAQFVDVIARRLCTVSASDDAAITAQKIDLARLLLRVIATRELRAPASVETIELLTQRLSTRRDAQLTRKAAQGRCKPLKEPAEETTVLAVALELAKQGLADEFQQVLMITRTASLDDRYRAHRIPKKRGGMREIHQPDADLMRLQRKVLARFLARAPISEHAHGFVRGRGILTNALEHTGKRVVLNVDIRNFFGSLPIEHIRAALNQTRLRSQVPKTENQGWAVRDRESLSPAALDVLVKIVTRAGSLPQGAPTSPAITNIALRHTDGILAKACRRIGVSYTRYADDLTFSGADGPVQGIVPFVRELLTRIGLELHPDKTHVYRSGRQQLVTGLVVNSWPNLPRRDRRRMRAAAHRLGTTGKALRWKGSPMSLAGFQGRLSLLNMVDESRADSLRLLAKMEPR

SEQ ID NO: 6823 - protein, 321 aa, unidentified
  source 1..321: note = Related to PBOU01000026.1; note = Planctomycetaceae bacterium
MPTALTPPTLPDSXRPLAAEAGSKYHVYPLVSGKRVKKTRWIEAPDTELKAAQRWLLDNRLYHLAPTSFAHGFVPGRSILTNASHHVGRRWVVTTDIRNFFPSITASRVNDCLAGLDLXTEDRRTVVQLVTRRGRLPQGAPTSPHLANLVARTLDLRLAGLAQSHGWTYTRYADDLTFSAGSPDAPDSHRDLLPPRELLWIIKRIVTDEHFQLADDKTHVMPHHQRQTVTGLVVNQRVSLPKPRRRILRAMLHRLDTSGPEALDLHQLQVAQGHLALARLIDPGGYEQACRDLSXLIRQAIHPEPTSCKXESGTDFATTID

SEQ ID NO: 6824 - protein, 317 aa, unidentified
  source 1..317: note = Related to PBOJ01000102.1; note = Planctomycetaceae bacterium
MSTITSFTLPTSLQALAPGVGKRYHVYPLVSGNNKKKKRWIEAPDSELKAAQRWLLDNWLYHLPPTGFAHGFVPGRSILTNAAEHVGRRWVVTADVRDFFPSITAGRIATCLAELELDAADRSTVVQLVTRRGRLPQGAPTSPHLANLVARTLDLRLSGLARQHDWTYTRYADDLTFSAGSPTSPDTGMPPHELLWAIERIVSDEDFQLAADKTHVMPHHQRQTVTGLVVNQRVALPKPRRRTLRAMLHRLETSGPETLDLRQLQVAQGHLALSKLIDPDGYDLACRHLGELIRNSVAGSALGTAVDSGSTATTRLD

SEQ ID NO: 6825 - protein, 345 aa, unidentified
  source 1..345: note = Related to PADE01000125.1; note = Planctomycetaceae bacterium
MSTRAQRAHPGPLFLLRDRTDPRCHRRALIDAHRKHRPNPLTTTLTSLPDSLLALAGDTERRYQVYPLVNGSKRRWIEAPDRELKAAQRWLLDHWLYQLAPTDAAHGFVRGRSIVSNAGHHVGRDWVVTADLSNFFPSIGADRVSQVIAGLDLNANASDAVVRLVTRRRRLPQGAPTSPHLANLVARRLDLRLIGWARRGGWNYTRYADDLTFSGEGNPRTLLLTVERIVQDEGFTLAPGKTHVMPRHQRQLVTGMVVNERVTLPKPRRRLLRAMLHRLQTTGADAVDPGQLQIAQGHLALAHFVDPERFQAECRALADLLRGEASPQADTPNPTVCTPIDKKVD

SEQ ID NO: 6826 - protein, 312 aa, unidentified
  source 1..312: note = Related to DLVN01000025.1; note = Planctomycetaceae bacterium
MPTEYMSDFMPTTLPCPPAAVLALADSAEQRYRVYPLMSGSKRRWIEAPDQELKTAQRWLLDQWLYQLAPTDAAHGFVPGRSIVSNAARHVGCAWVVTADLRNFFPSIGASRVAQVLTEFEQPADVTAALVRLVTRRQRLPQGAPTSPQLANLVARRLDLRLLGWARRSGWNYTRYADDLTFSGAGNPRPLLEALKQIVRDEGFTLAPGKTHMMSHHQRQVVTGMVVNERVALPKPHRRLLRAMLYRLETMGVDKVDPQQLQVVQGHLALAHFVDPARFEAECRALATLLREASSSLPATASSSFVPAVTKT

SEQ ID NO: 6827 - protein, 307 aa, unidentified
  source 1..307: note = Related to JABJEN010000114.1; note = Planctomycetaceae bacterium
MNRSAFDPGVNETSGDLIDLVESLNVPLQRLSEIAATANERYDVYPLVIGKKKRWIEAPRDKLKQLQRRLLDSVFYRLVPHESAHGFVRGRSIVSNARRHCGRRWVVTMDIRDFFPSIGAERVNRQLLSLPMTDAEREIVVKLVTRNARLPQGAPTSPHLANLVSRRLDIRLRRLADEAGWTYTRYADDLAFSGEGRPKQLIRIVEQIIQDEGFQPARQKTRVMSRHQRQIVTGLIVNEKVALPRPKRRLLRAMLHRLRSTNEPLSSLPDIRVIHGHLALATFIDPDGYRETCNQVAQLIEGRCSFV

SEQ ID NO: 6828 - protein, 307 aa, unidentified
  source 1..307: note = Related to JADHUC010000127.1; note = Pirellulaceae bacterium
MGNALSESENGRTAGDSIRLAEILSAPPERLNEILASADELYRVYPLIKGRKKRWIEAPRSELKRLQRRLLDSVLYRLVTDESAHGFVRGRSIVTNARRHCGRAWVVTMDIRDFFPSIGAERVDRQLVSLPMTEVERENLVRLVVRNGRLPQGAPTSPHLANLVSRRLDLRLKRLAETTGWTYTRYADDLTFSGEGKPGKLVQIVENIIVDEGFQPACRKTRVMSRHQRQVVTGLVVNDKVALPRPKRRLLRAMLHHLSSANQDSVCLPDIHVIHGHLALAALVDPDGYRLTCRQVAQLVENRYDDA

SEQ ID NO: 6829 - protein, 354 aa, unidentified
  source 1..354: note = Related to PBMI01000048.1; note = Opitutae bacterium
MTKANLPTNGCDDLANLLDLDPNRLTQLAGEAVNLYERFPLKTRRRRPRWIEAPKPFLKLVQRRLLDRLLYATPPHSAAHGFYPELSILTNARIHVGSAWVVSYDLEDFFPTTDLDKVRSVLNKRYDVEEGVLESIIRLTCRNGNLPQGAPTSPHLANLAFYQGDELLSELAKQHDLGYTRYADDMTFSGKELPAELDDEVRQIVHRVGYRLAEKKTKRMGRHQCQKVTGLVVNEGVRLPRKQRRRLRAIRNDIAMMGMESALARSGYGSVCQLQGHLAFERMTNKSNGVSRGLQNLRPKNALAGQPPVEPEDKDGGLPPPSCPSVRRRQSADHGGTPQQMPDSELESTVQTVG

SEQ ID NO: 6830 - protein, 306 aa, unidentified
  source 1..306: note = Related to JABJCN010000134.1; note = Opitutae bacterium
MRTTETHSVIVQDMDIYPEADAVPPPLTSADLAKSLHLSEERLVSLLSSAEKSYNRFPLKCGRRRPRWIEAPNPFLKHVQRCLLDKILYTVVPHPSAHGFQPGRSIVSNARMHSCREWVLSMDMKDFFPTTDIHMVEKMLQEHFNFTQETIEAILRLTCRRNALPQGAPTSPHLANLVFMEGDRRLTAMAIEHGMTYTRYADDMTFSGDTLPEDIEEQVELIAQEAGYRISRHKTRRMGQHQCQKVTGLVVNEGVRLPRGKRRRLRAILNDVRKNGMDAALARSGFRSADELSGHLALARMVGTVQ

SEQ ID NO: 6831 - protein, 312 aa, unidentified
  source 1..312: note = Related to PBMT01000070.1; note = Proteobacteria bacterium
MLKDLQHPLELSTAELQPFASRIGFPTDVLFDILSKKEDQYYRFPISKRNGKNRWIEAPKNELKSIQKQLLLQILYEQKAHSAAHGFVPNRSILTNAKPHVGQNWVVNFDISNFFSSTQIHLIHKVLQTYPTLSKREQHIIFTLISKDNTLPQGAPTSPHIANLVLYDFDHFISDYAQKHQLAYTRYADDLTFSGDQIPKELPLIVKKRLKEDGYHLAQHKTSWTGKHKRQLVTGLVVNDKINLPRPMRRQMRAIIHSIKTNGSIKAFATSSWSSDQLYGRIALQAMWDSEAAEKQLRELLGAQELDWTAYI

SEQ ID NO: 6832 - protein, 391 aa, unidentified
  source 1..391: note = Related to BK058704.1; note = Siphoviridae sp.
MPVIDKVDEFKMMFNGVKDPVGIFDFCGVNAERALTEKSKDAELVEKLNQFLDGQFFTSHSIDRLARVVGEGTDIIRLAKVGYRGSIYMLNESVDQFAELSEAIGFPKEIIQQYVSDTASHYSRFFIWKDEAKTKKRWIEAPDDTLKQMQEAILRNILYKIAPTKFAHGFICGRSIVTCAKAHTGKKFVLKLDLKNFFPSITREMLLGAMAPYINESNFKFVLPAMELCLMEGRLPQGAPTSPAASNIVARQLDLLMYGISSQFGCEYTRYADDLIFSSNERDIYTMIPIIKKAIAKFGLVVNEKKVKVLKSHQRQTVTGLVVNSDGQTSVARRKRMKLRAFIHHILTGRYPLDRVNFARLKGNITFIAMANPNQGRWFLEKWDEIQAMRG

SEQ ID NO: 6833 - protein, 308 aa, unidentified
  source 1..308: note = Related to JAHJLU010000432.1; note = Myxococcota bacterium
MFGWWRRRKERRQLTEKLLFINRNIAPHYHSFPLKKATGGYRTIEAPVEELKEAQRLILKRYYYGLECSTAAHGFVRGRSITTCARHHCDRLVVVAVDIKDFFPSITRDMVEKITRDMVPELAKNKELFDLVLGAITSNDALPQGSPASPTLSNLVFNGIDNQLVSLACAFKARYSRYADDLFFSSRYNRNLPGIISSVERILNAHGFSINRKKVRVMRRGQRQVVAGLIVNGKTPAVGREQLRSLRAAIHLLEKELQGAGPQSPSVAKLMESIQGKISFFHMVNPQSVRRLARTFKAICRQQAARSS

SEQ ID NO: 6834 - protein, 308 aa, unidentified
  source 1..308: note = Related to JACPTZ010000105.1; note = Planctomycetes bacterium
MVDLLPLLVKEGAMEESRYRMYRIRKANRRFRTIMEPDPALKSLQRSILRWLMARRIRASKYAHGFVKGRSTTTNAALHVGKRVVVRIDIQDFFPTITERQVKYALTREGLLSDDAARIADLCTVEGKLPQGAPTSPFLSNMIFRVLDYRLAGLAKKWGATYSRYADDLIFSSDRDDLQAIYHPVASILEEDGFEVNPDKFRVYRSTRRQRVTGIVVNHHPTLPRESRRRLRAALHHVRRSIVTGEEVPAERLDSIEGSAAYLTGIDRERGRRLLVEVRDLKALLALRTRMVSRRRPRRTSGIAAAPS

SEQ ID NO: 6835 - protein, 320 aa, Proteus mirabilis
  source 1..320: note = Related to JAEHOZ010000020.1
MNAAPLLVSFYTLSKFLDALPEKHRNSYQRQIENLFAQSLPPCVSEICLAVLFGYSVDFVYALSKNQHKFYRSFQIRQGRKTRTIHSPRVALKVVQKWLGVHLSDAITFEPHVCGFVKGKSFADAAKIHQGAKWVYSVDIENFFPSITILQISNALEKLGYTKESAELLANICSLNSTLAQGSPASPVISNIVMKDIDLQLKELADKYELQVSRYADDIVFSGTEPFNEGIPKDLNTLFNSTSFTLNKNKTYFSDSEKGQRLKVHGLLVKKDKIRLTKGYRNKIRAFRHMLEKEKVSENDLQRLKGHLTFAEFIERKNQV

SEQ ID NO: 6836 - protein, 320 aa, Parashewanella spongiae
  source 1..320: note = Related to NZ_ML064597.1
MNAAPLLVSFDTLKKFLDALPEKHRKSYQQQIEKLFTQSLPPSVSETCLAVLFGYSVDFVYALSKKQHKFYRSFKIKQGKKVRIIHSPRVALKVVQKWLGTHLSNAISFEPHVCGFVKGKSFADAAKIHQGARWVYSVDIENFFPSITVVQISGALEKLGYSEESAKFLANICSLNGTLAQGSPASPVISNIIMKDIDQRLIELAEKYVLKVSRYADDIVFSGKEPFSTDIPNELSSIFGLTPFLLNKNKAYFADSQKGQRLKVHGLLVKEDKILLTKGYRNKIRAFRHMVAQGKVSEGDLPRLKGHLTFAEFIERNNQV

SEQ ID NO: 6837 - protein, 320 aa, Alteromonas sp.
  source 1..320: note = Related to SIHM01000015.1
MNAAPLLVSFNSFNKFLEALPVNHRTACKQELEEIYGKSLPIGISEVCIAVLFGYSLDFVYALSKKQHKFYRSFQIKQGKKTRTIHSPRVALKVVQKWLGAHLSSALVFEDHVYGFVKGKSFVDAAKSHQGAKWVYSVDIENFFSSITDLQISEAFKELGYSHGSATLLSNICSLNSKLAQGSPASPVISNLVMKDVDAGLKAMANKYGLQVSRYADDIVLSGKAEFKSEIAGELHSIFEATTFSLNTDKTYFADAEKGQRLKIHGLLVKEDTVILTKGYRNKIRAFRHMVEQGKVSADDLPRLKGHLKFAEYVQRQNDT

SEQ ID NO: 6838 - protein, 372 aa, Maribrevibacterium harenarium
  source 1..372: note = Related to VFRR01000008.1
MQKRSGEELSRGCASCPFAKARHRNTDGQTSIRASPGWTFVHRCKFFEKYSVMNAAPLLVSFNSLSKFLDALPEKHRENNGDQIESLVDKSLPPVVSETCLAVLFGYSLDFVYALSKKQHKFYRSFKIQQGKKVRTIHSPRVALKVVQKWFGAHLSNAVSFESHVCGFVKGKSFADAAKIHQGAKWVYSVDIEDFFPSISTFQISNALESVGYSKDAAQLLADISSLNFKLAQGSPASPVLSNIVMKDIDKQLKELANQYDLQVTRYADDIVFSGKGVFQEALPTELEAIFEGTTFSLNKNKTYFADSEKGQRLKIHGLLVKEDKITLTKGYRNKIRAFRHMVEQGKVSEDDLPRLKGHLRFAEFIASKNEN

SEQ ID NO: 6839 - protein, 321 aa, Vibrio owensii
  source 1..321: note = Related to NZ_CP025796.1
MNAAPLLVSFNSMDKFIESFPRSQVEKYRQNIQFLYENSLPPAVSAPCLAVLFGYSTDFVYALSKNQYKFYRTFQIKHGKKLRTIHSPRVALKVVQKWLGYHLSSAISFDSHVCGFIKGRSFVDAAKMHEGAKWVYSVDIADFFPSVSSEQVTEALVSIGYFSESAELIANLCSLDEVLPQGSPASPVLSNLVMKDMDKELLHLADKHGLKVTRYADDIVFSGRDNFIEELPEALDSIFEQSTFSLNRDKTFFADAEKGQRLKVHGLLVKDDQVTLTKGYRNKIRAFRYMLDQGKVSEEDIPRLQGHLKFFEFINEKNKND

SEQ ID NO: 6840 - protein, 321 aa, Vibrio anguillarum
  source 1..321: note = Related to RDPS01000003.1
MNAAPLLVSFNSMNKLIESLPLSQVEKYQQNIQFLYEKSLPPVVSVPCLAVLFGYSTDFVYALSKSQYKFYRSFQINHGKKLRTIHSPRVALKVVQKWLGHHLSGAISFDSHVCGFVKGRSFVDAAKVHEGAKWVYSVDIVDFFSSISKQQVSEALVNIGYLPESSELIANLCTLDNVLPQGSPASPVLSNLVMKDIDRHLQYLADKYGLKVSRYADDIVFSGTDAFSDELPLDLEALFEPTAFSLNRDKTFFADADKGQRLKVHGLLVKDDKVTLTKGYRNKIRAFRHMLEQGKVCEEDMPRLQGHLKFFEFIESKNINQ

SEQ ID NO: 6841 - protein, 339 aa, unidentified
  source 1..339: note = Related to PGZF01000003.1; note = Gammaproteobacteria bacterium HGW-Gammaproteobacteria-15
MDACPSSKLIYEICVMNAAPLLVSFDSIDKYLEALPEKHRTAHSAALSDLFSRGIPPITSAYCLAILFGYSLEFIYAMTKRPDKFYRVFSIKNGKKTRRIQAPKVALKVIQKWFGAHLSNNLTFHPHVYGFVKGRSFVDAAKHHIGARWVLAVDIDNFFPSISKERVLLSLIAQGYSNDASKLISDLCCLNDSLAQGSPASPVLSNLCMQSIDDSLIKLSEKYKVTVTRYADDITFSGIGEFDEGLKRDLQELIKSSGFQLNDDKTYFADSTTGKRLKVHGLLVKEDSVRLTKGYRNKIRLYKHLQKSGRISEDDYHRINGHINFADFIDSMSGIKDAI

SEQ ID NO: 6842 - protein, 321 aa, Acinetobacter bereziniae
  source 1..321: note = Related to JAEDYI010000001.1
MNAPPLLVSFASIDKYLEALPPQYKTQYEDEIKRLYTNGFPPIVSKLCLGVLFGYSSDFIYILAKKPSKFYRSFTLKQGKKTRKIFAPKVGLKVIQKWFATHLSNVIEFHPHVLGFVKGKSFADAAQLHIGARWIFSVDIVDFFPSISKEAVIEALIQTQYYTSKAAELISDLCCLNDALAQGSPASPVLSNIVMKPFDEKLLELSKKYNIVVSRYADDIVFSGKDEFDTNLHKDLNELFAESCFTLNSQKQYFADRNKGQRLKVHGLLVKDENIALTKGYRNKLRAYKHMLNTGKVSEKDVERLVGHVKFSEFIESKNVN

SEQ ID NO: 6843 - protein, 318 aa, Serratia fonticola
  source 1..318: note = Related to JACBJC010000018.1
MNAAPLLVSFLKVETYIRALPIKQSEQYKDEIITLVEKKLPPVVSPYCLAVLFGYSLEFVHALSKNQHKFYRRFEIRQGRKTRKIDAPKVALKVIQKWFGFHLSSALEFEPHVFGFVKGLSSAKAAKLHVGARWVYSVDILNFFPSISQIKIKEALIKEGYTDNGASLLIGLCCLDGALAQGSPASPVLSNIFMRDIDKKLSELARKYLITMTRYADDIVFSGRDNFPQKLKDEVSQLIIEAGLVLNENKQYFASVDKGQRLKVHGLLVKEEAVRLTKGYRNKIRAYNHMLANGKISEKDIPRVLGHLKYAKFIDNLN

SEQ ID NO: 6844 - protein, 316 aa, Shewanella insulae
  source 1..316: note = Related to NZ_WRPA01000017.1
MKAAPLLISFHELGSYIEALPESQKRRYADEISKLAEAKLPPVVSPYCLAILFGYSREFIHAMSKQQHKFYRTFTIHKGRKRRTIQAPKVALKVIQKWIGYHLCQAIQRPEHVFGFIPGCSAKMAAEQHCNALWVYSIDIKDFFPSISDELVESALQELGYSEMGSKLITSLCCFNGVLAQGSPASPTLSNLIMIKVDDDLRKLSEELNISVTRYADDIVFSGKNEFPEGLGGQISNIFQDAGLELNEEKEYFADSRKGQRLKVHGLLVNSDKPRLPKGYRNKVRAYKHLLNSGKVSEGDLKRLLGHVNYANSIES

SEQ ID NO: 6845 - protein, 320 aa, unidentified
  source 1..320: note = Related to nan
MIAPPLLVSFSDINSYVNSLSEENQALHENNIRSLFDQNLPPIGSISTLSTMFGFSPRFVAMLLSDVSKQYRTFEIRKGKKKRKIQAPKVGLKVIQKWFGHHLSGALVLDDGVYGFVPNRSAIDAASKHCTASWVYSFDIKDFFPSTTRETVLSALVELGYVEESAELISQLCCLDNKLPQGAPSSPALSNLVMRRIDTELARFADENNLTYTRYADDIVLSGKEECPESLSEAVRSAFKDTDWELNPNKEYYADVRKGQRLKVHGLLVMGEKPILTKGYRNKLRAYNYMIENGKAKEKDLPRLKGHIEYARLVDRWNNG

SEQ ID NO: 6846 - protein, 320 aa, Kangiella aquimarina
  source 1..320: note = Related to NZ_KB893650.1
MNAPPLLVSYSTVESYLSALSQDSVSSYQKEINDLVARGLPPVVNTKLLGLLFGLSNKFITSLLIDKKRHYRNFNLRKKGKVRTINAPKMSLKVIQKWFGSHLASSIDYASYVYGFIPGRKALDAAKVHCGSRWVYSIDIEDFFPSTPSELVYESLKSLGYTELGSKIITEICTLDGYLPQGAPSSPALSNLVAKNLDRHLYKLSTDLGVKYTRYADDIVFSGAEDFPKNLPEIIIEIFADTPWSLSERKNYFADTLLGHRLKVHGLLVKEDAVRLTKGYRNKIRAYKHLLEQGKIKDSDLQRIKGHLTYAKLIDNDSEL

SEQ ID NO: 6847 - protein, 327 aa, unidentified
  source 1..327: note = Related to JAFEDC010000007.1; note = Proteobacteria bacterium
MIAPPLLVSYSSLNEYLEALGPELSYQYKTEITQLFEKRLPIVVSFRCLSVLFGFSTNFVYKLAQQNWKFYRTFTIRKGKKKRTIQAPKVALKVIQKWFGYHLSEVLSFDKYVHGFVPGRSAIGAANVHTNARWVYSVDIENFFPTTTKKVIKESLISIGYSFEAADLIANICCYKDTLAQGAPSSPVISNLVLKELDKQLKTIADSNQIRFTRYADDIVFSGIDKFPTEIKDQISDLFKETCWKLSPEKEYLAESPMRLKVHGFLVHGEKARLTKGYRNRIRAYKHLLNAGKIRNEDLGRIVGHVKYAESVIKAQKPGLCPDSAHS

SEQ ID NO: 6848 - protein, 317 aa, Nitrospira sp.
  source 1..317: note = Related to JAFIUX010000008.1
MLAPPLLVSYTSPEDYLIALDPGLRRLHQSKIKRLLEQGLPPVVSSRCLGVLFGYSTKFINAMAQQNWKYYRSFTIRKGKKKRKIQAPKVALKVIQKWFGHHLSESLSFDDHVFGFVPGKSAPFAAKQHTNARWVYSVDISNFFPSTPKDVISTTLVDIGYSEKAAKLMSGLLCHRDYLAQGSPASPILSNLVFRELDKQLKEIAGNNRIRFTRYADDIVFSGVDQFPENIKEQVNNLFADSCWVLSKEKEYFSEIPKRLKVHGLLVHRDRPRLTKGYRNRIRAYKYLLETGQIEKRDLSRIMGHLNYAKSIDTQEK

SEQ ID NO: 6849 - protein, 317 aa, Methylovulum psychrotolerans
  source 1..317: note = Related to PGFZ01000010.1
MKAPPLLVSYSSIDDYLSAISPEDREQYEKQIRSLVCKGLPPVVSSQCLANLFGYTNTFVHSMASKNWKYYRGFSIRKGKKKRYIQAPKVALKVIQKWLGFHLAKSINYNDFVYGFVEGKSAIDAAACHTNATWVYSVDIKDFFPSTSKETLISNLESLGYSRKASALIASLCCYEDYLAQGSPSSPVLSNLVMRDIDLELYKISMIHGVRLTRYADDIVFSGQSEFPESLKREVKSLFVDTCWSLSEQKEYFAQIPKRLKVHGLLVHQNSPRLTKGYRNKIRAFRHLLEAHKVHEKDIKRLTGHIKYAESVDRHKN

SEQ ID NO: 6850 - protein, 319 aa, Marinobacter adhaerens
  source 1..319: note = Related to VENC01000012.1
MIAAPLLVSYNSLEDYLSCLSSEMREEHEQQIRWLVDQKLPPVVSSRCLSVLFGYSAKFVNAMALNNYNYYREFTIRKGNKRRKIQAPRVAIKGIQKWFGHHLSEVLPVEDYVYGFIPGRSAVDAAAQHCGASWVYSVDIENFFPSTTDDVVIKALMEIGYSEKGARLITRLCCYGDRLGQGAPSSPVLSNLVMKPIDIQLKNIAENLGVKLTRYADDIVFSGQGKSPVELRDRVLDVFKDTCWDLAENKEYFSNSDLGQRLKVHGLLVNGEKPRLTKGYRNRVRAYRHLLENNRVKPEDKRRLIGHIKFAESVESWKE

SEQ ID NO: 6851 - protein, 319 aa, unidentified
  source 1..319: note = Related to CP064972.1; note = Holophagales bacterium
MKPPPFFVSFRTAADYRAALGDGVAELYWPDIGHLGERRLPPVVSVRALACLFGVSSKFVGALRRNPERYYRSFVIRTGRKKRQIHSPKVGLKVFQKWFGTHLAAALEFDPWVFGFVPGRSAPMAARVHARARWIYSVDLADFFPSVSRTRVVGALQGLGYPGHGAELAASLCCYGEGLAQGSPASPVLSNLVFREQDQQLHELAREFGARLTRYADDIVFSGQAAVPAGLPDRVKAVVTAGGWDLNDAKEELAESPIRLKVHGLVVHGDRPRLTKGYRNRIRALRHLSAVGKVRSEDAARVAGHLRYADSIDRLSEEE

SEQ ID NO: 6852 - protein, 322 aa, unidentified
  source 1..322: note = Related to JAGQSE010000087.1; note = Acidobacteria bacterium
MNTPPLLVVFPGLESLGAALARDTHRIYWSDVERLVERGLPPAVSVRVVACLFGFSARLVGAIQRSPERYYRIFKIPKGKSSRQIEAPRVALKVIQKWFGSHLAAACPLDDCVYGFVPGRSAPLAAKQHCGASWVYSLDIRDFFPSVSSGMVSEALRLKGYPDHAASLMAKLCCYEGRLAQGSPASPALSNLVFAPVDQLLAEIARANACTYTRYADDITFSGRTEVPARLQEEVRKALQEGGWQIAGHKEHLARAPRRLKVHGLLVNGRFPRLTKGYRNRLRALEHLLGQGRLDEAKEMEVRGHLAYARSVESLQKSSDGG

SEQ ID NO: 6853 - protein, 323 aa, unidentified
  source 1..323: note = Related to JADFXO010000295.1; note = Nitrospirae bacterium
MRTPPFLLSFSSLEEYLRALSDSDRAEKGSEINNLVAQQLPPVVSKKCLATLFGFSNSFIDTLHRRTERYYRIFEIPKGKKKRIIQAPRVALKVIQKWFAHYLANSLNLHEAVFGFVKGRSAVQGAALHCGAHWIYSVDIEDFFPTTSIDKVISSLTNLGYGYPGAALIAKLCCYEGNLAQGSPASPVLSNLVFREIDEELFTLSKQNGICYTRYADDIVFSGINSFPDHIREEVISIIQARGWKLSIKKIHLAKRPYRLKVYGLLIHGERPRLTKGYRNRIRAFKHLFADGKIPEDEISKIRGHLSYAHSIEEFEMMPKDDL

SEQ ID NO: 6854 - protein, 319 aa, unidentified
  source 1..319: note = Related to JAHJTB010000218.1; note = Proteobacteria bacterium
MNAPPLLVSFSSTMEYREALSHELRGLYWETIEKLISKKLPPVVSIRCLSILFGYSPRFLGAMYQFTERYYRTFTIKAGKKKRTINAPKVALKVIQKWLGYHLGESLSFCDHVYGFIKGKSAIQGAYVHCGASWIYSVDIENFFQTTNIEKVKSALNGIGFQERGSEVISKLCCYSGNLAQGSPASPILSNLVFTNTDNDLARLANKNGLLYSRYADDIVFSGKEDVPADLSNDVKSIITRSGWKISEKKEYLAKRPHRLKVYGLLVNGDYPRLTKGYRNRIRAFKHLVENEKIADENKKRLLGHLAYAKSIDNFSNKY

SEQ ID NO: 6855 - protein, 322 aa, Pseudomonas fluorescens
  source 1..322: note = Related to QFOU01000006.1
MQSPPLLVSYPELEDFIKALPNDYAADTKQVLRHLHSLSLPSVTSITSLAVLFGFSPRILASMTNQPEKFYRVFRIHKGKGKYRTIQAPKVALKVIQKWLSHHISEAITYPKYVHGFVPGRSHITAAQAHVGANWVYSIDIENFFPTTSESKVEAALRGIGYSESGSKLISKLCCYTKNLSQGSPASPVLSNLVFKDLDSRIAELSSQIGVNYTRYADDLVFSGQGEFPEALLPVKAWISEAGWSVSKDKEHFAQLPKQRLKVHGLLVHESSPILTKGYRKKIRTYKFLHENNRIREDDKNRILGHLSYAKLVDSFSNQTEE

SEQ ID NO: 6856 - protein, 325 aa, Citrobacter amalonaticus
  source 1..325: note = Related to NZ_LT556085.1
MKTPLPLFFTFADAEQLLKALSKPLRDRYSAELLRLQQLGLPPLVSWSILSVAIGVSPQFITSILKNKSKYYRVFPISKGKGKKKRIIEAPKVSLKIIQSWFAYHISLNGNITLSKSAFAFIPGKNGIYEAASVHCGAKWIMSIDLRDFFHTITSEAVVLALTEIGYREDQASKLSDLLTLNQRLPQGAPSSPVISNLVFSKTDFKINELIADLNVKYTRYADDLTFSSEDESFDINSLKERIVQILVSDNWIVADEKLKIAKAPNRLKVHGFLVHEIKPRLTKGYRNKIRAYKHLLNTGKVVLEDLDKIKGHINYSDYIDRLNE

SEQ ID NO: 6857 - protein, 325 aa, Raoultella planticola
  source 1..325: note = Related to AP022438.1
MKTPLPLFFTFTDAEQLLKALSPSLRDRYSAELIRMQQLGLPPLVSWSVLSVAIGVSPQFITSLIKNKIKYYRVFTIPKGKGKKRRVIEAPRVSLKIIQAWVAYHLSLNENISLSESAFAFIPGRNGIYEAASKHCGAKWVLSIDLRDFFHTITSVLVSAALVKIGYKADQANKLSDLLTLNQRLPQGAPSSPVISNLVFKSTDLKINELIVGMNVKYTRYADDLTFSSEDEGVDIELLKENVLRVLNSDGWVVAEEKLKISKSPNRLKVHGFLVHEIKPRLTKGYRNKIRAYKHLLQTGKIIEGDLDKIKGHVNYSAYIDKLNE

SEQ ID NO: 6858 - protein, 325 aa, Salmonella enterica
  source 1..325: note = Related to AAIGLR010000001.1
MKTPLPLFFTFTDAEQFLKALSTPLRDRYSAELIRLQGLRLPPLVSWSILSVAIGVSPQFITSLIKNKSKYYRVFSISKGRGKKKRIIEAPKVSIKIIQSWVAHHLSINHSLGISENAYAFIPGKNGIYEAASKHCGAKWILSIDLRDFFHTITSDIVISTLVEIGYRADQAAKLSELLTLNQRLPQGAPSSPVISNLVFRSTDLKINELISNTGIKYTRYADDLTFSGDDETFDIEELKDNVVELLLSDNWVVAEEKLRIARIPNRLKVHGFLVHENKPRLTKGYRNKIRAYKHLLRTGKIVEKDFDKIKGHVNYSEYIDRLNE

SEQ ID NO: 6859 - protein, 332 aa, Musicola paradisiaca
  source 1..332: note = Related to NZ_CM001857.1
MKTPLPLLFSYEDEAQFLRSLSSGLRNRHSEEVRRLVAIGLPPVVSWSVLSVAIGVSPHFLNSIIKNKCKYYRSFTISKGKGKKKRLIEAPRISLKLIQAWLAYHLSRNSADYISENSYAFIPGVNGIYEAAKRHCGSQWVLSIDLKDFFHYVNSNKIMPALLDLGYRTEQAAKIIDIVTLQDRLPQGAPSSPYISNIAFKPTDELIERIITGRGVSYTRYADDLTFSGCDAEFNIDGFKGEIINALKSHGWIVALDKVKISKKPNRLKVHGFLVHNQKPVLTKGYRNKLRTYRHLMQAGTIKPDDLDKIKGHLNYGYYIDRLNSQEVEFSC

SEQ ID NO: 6860 - protein, 329 aa, Pantoea agglomerans
  source 1..329: note = Related to JABLUT010000044.1
MKTPLPLLFSFENETQFLSSLSLGLRNRHAEEIRRLLALELPPLVSWSVLSVAIGVSPHFLNSIINNKVKYYRTFTVSKGRGKKRRLIEAPRVSLKLIQAWIAHSLSHMSRQYISEHSYAFIPGVNGIYLAAKKHCSSQWVLSIDLKDFFHSITAEKIIPALIEMGYRAEQASKIIDLITLNERLPQGAPSSPYFSNVSFRPTDDLIVRMIDGQSIKYTRYADDLTFSGVDLDFDVEKFRDDIIAVLHEHNWEVALEKVRISKQPNRLKVHGFLVHNDKPVLTKGYRNKIRAYRYLMLSGAIKPDDICKVKGHLNYSDYIDRLNASEEV

SEQ ID NO: 6861 - protein, 325 aa, Morganella morganii
  source 1..325: note = Related to JAAQVS010000001.1
MKTPLPLFFSYPDAEQLLKALSQSLRVKYSSELARLEQLKLPPLVSWSVLSVAIGVSPQFITSLIKNKSKYYRVFSISKGKGKKKRTIEAPKVGLKIIQAWIAHHLSINTFLDISDSAYAFIPGKNGIYQAAKKHCNSKWVLSIDLKDFFHTITLDKVILALIDIGYHAEQASKLAEILTLNQRLPQGAPSSPVISNLVFKSTDACINEFIVEDNISYTRYADDLIFSGVNEDFDIDSLKDNIIVLLQSKGWIIAEEKLHIAKVPNRLKVHGFLVHGNKPRLTKGYRNKIRAYNHLLHAGRISEKDIDRIKGHVSYSAFIDSLND

SEQ ID NO: 6862 - protein, 327 aa, Klebsiella sp.
  source 1..327: note = Related to NZ_CP082360.1
MKTPLPLLFSYNDAQQFLGALSPEVRDVYSPEINRLFDRGLPPVVSWSVLSVAIGVSPHFINSIIKNKDKYYRIFPIAKGKGKKVRIIESPRVGLKIIQSWLAHHLATNDNIPVSDSAYAFIPGKNGIYEAAFRHCNAKWVLSIDLRDFFHSIDFDRVINGLRNTGYTFEQSGKIAAIVTYKNRLPQGAPSSPVLSNIVFKDTDDKINDIIADKKIIYTRYADDLTFSSDDLSIDVENLKQNIINLLENENWTIATEKLKISKIPNRLKVHGFLVHDVKPRLTKGYRNKLRTYEHLLRNGKIIESDLNRIRGHVNYGKHIDKLNDEN

SEQ ID NO: 6863 - protein, 327 aa, Enterobacter asburiae
  source 1..327: note = Related to NZ_KN549084.1
MKTPLPLHFSYDSLDQFLAILSPGLRQRHAEELRRLDDLKLPPVVSWSVLSTAIGISPHFINSLIRNKNKYYRVFTIAKGKGKGKRVIEAPKVSIKLIQAWLAFHLSNNDNLGLCDAVHGFIPGQHGIYEAAKKHCGCDWVLSIDLKDFFHSISHRRVVNAFENLGYTVAQAEKIADITTYNAHLPQGAPSSPVISNLVFNDTDNAIIRFLDGKGICYTRYADDLTFSGSDISYDVEKLKTEMLQLISNDGWIVANEKTHIAIAPNRLKVHGFLVHAVTPRLTKGYRNKIRAYTHLLNSGKVDPEDLDVIRGHVNYGRYISKLNNGN

SEQ ID NO: 6864 - protein, 321 aa, Yersinia intermedia
  source 1..321: note = Related to NZ_CP009801.1
MRTPPPPLLVSFKSTQNLLDALPSAISEKYKTEINELLDKMLPPVVSVAVVSIIFGVSSNFIASILRNPIKQYRVFTIKKGKKKRRIESPKIGLKLLQSWIGANLSNKKLLSDSVYGFVPKRNGVFEAAQKHCLAKWVYSIDLRDFFPNISSRRIKNELEKLGYSKHAIELISTICTYEDRLPQGSPASPVLSNLVFRETDKNLEELAKMLDIRYTRYADDLVFSGLGVIPENLQNKIKKILIDDDWVLAEEKEHLSKLPNRLKVHGLLVHGDKPRLTKGYRNRIRAYKHLLELEKIKEVDLYSCKGHVSYANSLDKFTDK

SEQ ID NO: 6865 - protein, 320 aa, Comamonas kerstersii
  source 1..320: note = Related to DOQQ01000002.1
MKALSPPLFVNFSSLDEAFQAFSYPENIQDWRALTQRNLPPVISTQFLSLLFGVSPNFISSITRKPNKNYRTFIIKKGKKERVINSPKIGLKLFQTWIGHHLSRAVLLEENVCGFIPGKNGILEAASQHSAAGWLYSIDLRDFFSKINSERVKSALLDLGYPEDSAKLITSLCTLNGCLPQGSPASPVLSNLVFKSTDQIFIDLASKLNIRYTRYADDLVFSGNNNQPENLPQIIKEILNNENWEIAPEKEENLKAPYRLKVHGLVVNGLTPRLTKGYRNRIRAYKHLKNTNKIKDNKEKIQGHLAYADQVDKFFAQKIS

SEQ ID NO: 6866 - protein, 320 aa, Serratia marcescens
  source 1..320: note = Related to FCLB01000008.1
MKTSPPPLLVSFKSAKNLIDALPPSVSEKYEDEIKYLTEKNLPPVVSVAVVSIIFGVSSNFVASILRRKESQYRNFTIKKGTKRRKIEAPKVGLKIFQSWIGHNLSSALIFPKCVFGFIPDMNGVFEAADVHCESKWVYSLDLRDFFTSISREKVKSELINLGYSAHSAELITILCTYQGRLPQGSPASPVLSNIVFQKTDSRLLKKSEELGIKYTRYADDLVFSGINPMPAALPELIKEVLLDEGWTIAEEKEHISCLPNRLKVHGLLVHGEKPRLTKGYRNRIRAYKHLLNSGKVKDADLDMVNGHISYAENLERFNN

SEQ ID NO: 6867 - protein, 359 aa, Pseudomonas alcaligenes
  source 1..359: note = Related to FTMP01000014.1
MHRRAPAKRQRLLRIRCLSAGGNNESQDSFACMGTPPPPILVSFRSFDDLLEALPVDGREEYRQELQQLYDKVLPPVISISILSVLFGLSASFIASMLRRPHKHYRHFVIKKGRKRREIYAPKVGLKLFQRWIGHHLAEALNYPDCVLGFVPHKSGVFSAANTHCSARWVYSLDLKDFFSQVTGERLSAPLIGLGYSQKSTSIILKICLFNGFLPQGSPASPVLSNLAFEPTDRELSNLAKQHGVRYTRYADDLVFSGEALPPEGFEAQVKEILAVNNWEIAKEKEHFAALPARLKVHGLLVHGARPRLTKGYRNKIRAYRHLLNTGRVKPGDLARVKGHVSYSDCLDHFVENGAFEPK

SEQ ID NO: 6868 - protein, 300 aa, Idiomarina loihiensis
  source 1..300: note = Related to DMTT01000123.1
MNHGDTVNQINEIERLLAIGLPPVISLSSLATMLGVSVNIIQYIVRHPSKLYDAFELKKGRKVRQISAPRVALKVIQSWFSVHLAKVIPYPNSVVGFRPGVPGVFEGASRHCQASWVLNLDIKDFFDSINRERLKRPLLELGYTEKSADLVLDLCTLSDQLPQGAPSSPPLSNLAFMRTDKQLEEVCSRFKVKYTRYADDLIFSGEGEFPEGFDTEIKDVLAGNDWEMAESKEQLVFAPKRLKVLGLIVNDAVPKLTKGYRNKVRAYKHVLSTKGSEADNFAVLQGHIAYHDSLVKFNSD

SEQ ID NO: 6869 - protein, 393 aa, unidentified
  source 1..393: note = Related to JAIENL010000062.1; note = Burkholderiaceae bacterium
MLNACLCWQGRKNGKFSFGGSASARACITPISEDYVQKEACRKAGAPSNHPPFGRLHQRRLFSLAFAVKALPPPLFVSFASLSEALEAMPVVYRDGIRAVMQPLVDQGLPPVLSSGVVATLFGVSTTFIRAIANSPARYYREFTIRKGKKLRKISAPKIALKLIQSWIGTHLSHSVVLSNCVLGFVPGHNGVIEAAARHCSAKWVYSLDLRDFFPSIDSNRVIQSLLKLGYPESASILITQLCTLGGSLPQGSPASPVFSNLVFIQTDVELNAMAEEFGVRYTRYADDLVFSGEGELPADLQTRVRDCLDKHAWHIAPEKEKVVKLPHRLKVHGLLVHGSEPRLTKGYRNRIRAYRHLVLAGKVTAEDQAKIAGHISYAQQVESASGSQMAPS

SEQ ID NO: 6870 - protein, 306 aa, Hydrogenophaga crassostreae
  source 1..306: note = Related to NZ_CP017476.1
MDEALEAMPERFREGIQQVMQPLVERGLPPALSVGVVATLFGLSIPFIRAISLNPGKYYREFTIRKGKKDRRISAPKVALKLLQSWIGTHLSHSVKLDDCVFGFVPGRNGVIEAARRHSEARWVYSLDLRDFFPSVKIDRVESALVELGYSINSASFIATLCTLNQALPQGSPASPVLSNLVFANTDKALVQIATEEGVRYTRYADDLVFSGQGIVPPLLQDRVCACLVDHGWEIAPEKESLVELPKRLKVHGLLVHGVTPRLTKGYRNRIRAYRHLFAAEKIQPADLDKVKGHLSYALQVEKVPQ

SEQ ID NO: 6871 - protein, 320 aa, Reyranella sp.
  source 1..320: note = Related to JAGNNA010000003.1
MKAPPLLVSFSAVEDFVASLPDAVREAHEPEILKLHSAGLPAVISVRAISTLFNISAEFVNAISRTPQRHYRKFQIRKGKKTRDILAPRVALKVIQRWIATHLAASIRLPSCVFGFVPGKSVIDAASVHCDATWVYSLDLRDFFPSITARQVYDAIRSLGYSEDAASLVMQLCTLNGSLPQGSPASPVLSNLVFRDTDVLLSSLAAARSVRYSRYADDLVFSGLAPAPADLQTTVKAVLLDAGWKLAIEKEHLAALPNRLKVHGLLVHGSSPRLTKGYRKKIRAYRHLTRVGKVKPADASRIAGHLAYASSIEKFTKSKE

SEQ ID NO: 6872 - protein, 319 aa, Chromobacterium subtsugae
  source 1..319: note = Related to NZ_JYKA01000004.1
MNTPPLPLLVTFSSLPDLLLALQLEEEDHERKTQIEALHRKSLPPVTSTLALSTMFGISLNFIHALARHPEKNYRKFKIRKGKKNREISSPRIALKLIQRWFAQHASSALVFPEYVCGFVPGINGVTEAAKRHCNAKWVFSVDLRDFFGQVSRARIHNKLVALGYPESGADLICQLCLLDDKLPQGSPASPFLSNLAFQETDEKLNLIASKFKCRFSRYADDIVFSGKNEFDPIIEKEVKELLEQERWVLAEDKTEISQLPHRLKVHGLLVHGDKPRLTKGYRNRIRAYKHLLSNERIRADDINKVKSHISYANIIDSI

SEQ ID NO: 6873 - protein, 369 aa, Paraburkholderia tropica
  source 1..369: note = Related to RQIZ01000001.1
MRIALECEGRGQKGACRTTADPSNRPPFGRRHNESHHSFALPVNTPPLLVCFPSLDTASNALSERTRQAYGEEFRGLIERRLPPAVSIRIVATLFGFSPSFVGAMVRRPGRYYRVFEIRSGTKIRKIQAPRVALKVIQQWIGGHLAVAIPYRSSTFGFVPGRSHIDAAGQHCGAEWSYSIDIKDFFQSTSEEAVRRALMELGYSEHASHLVSSLCCVGGYLAQGAPSSPALSNLVFLNYDIQFEQYAAEHGLTYTRYADDIVFSGRGEIPASLPELAKRTIESGGWQIAPEKEKTQRRPYRLKVHGLLVEGISPRLTKGYRRRIRALRHLMEHGRVAADQLAKVAGHLNYAEQVASWARKSERSSEVDE

SEQ ID NO: 6874 - protein, 328 aa, Burkholderia sp.
  source 1..328: note = Related to NZ_JJMR01000016.1
MNTPPLLVTFPSLDFFVSALAEDTRSLYEAEIRGLVELGLPPVVSLRTIAVLFGFSPSFVGTLAKRPARYYRVFEIRTGKKVRFIQAPKVALKLIQRWIGGNLASTFNYLDSTFGFVPGRSHIDAAARHCESNWAYSVDIKDFFRTTSAARVRTALLKLGYSGRAADLTVALTCYEGFLAQGAPTSPVLSNIVFREYDQLLEELACELNLTFTRYADDIVFSGTGAPIAELKDRVRSIIESGGWKISEKKEKLFQKPYRLKVHGLLVDGTVPRLTKGYRRRIRALKHLLSQGKVPPKQLRKVQGHLNYAQQVDSWLASQAATDGDESS

SEQ ID NO: 6875 - protein, 366 aa, Burkholderia oklahomensis
  source 1..366: note = Related to JAEDZZ010000001.1
MRIALICEDHGQKGACRTAAAPSDRPPFGRRLNESNLSFALPVNTPPLLVNFPSLDFLLKALAEETREIHADEIRFLIERQLPPAVSTRVIATLFGFSPLFLSAIARRPDRYYRQFEIRSGAKLRQIQSPKVALKLIQRWIGGNLATSLTYPDCVYGFVPGRSHIEAAAKHCGADWVYSADVKDFFQSTSFDAVQRALTEVGYQPKAAQLVATYSCFKGFLAQGAPSSPVLSNLVFLPYDRQLLEYAVQCDITYTRYADDVVLSGRGQPPEDLKAFIHQTIEAGGWVLSERKEKLSVKPHRLKVHGLLVDGDSPRLTKGYRHRIRALTHLLEKGSVSPETMSKVLGHINYAKLVAEKGRDEGQGGD

SEQ ID NO: 6876 - protein, 328 aa, Thiocapsa rosea
  source 1..328: note = Related to NZ_RBXL01000001.1
MNTPPRLILFSSLDKYLQALGDGFDEAHVDAIRCLDSKGYPPVVSIRALSVLFGYRSQFVGAMLNRPQHYYRRFQIRSGKKQRRIDAPRVGLKIIQKWFGHYLARAITMPDVVVGFVPGRSILHGAAMHCRAKWVFSTDIKDFFQSTPTAIVKNALVDIGYTEHGAEIASGLSSLNGVLAQGSPASPVLSNLAFLKVDRQLQEYCHERGLVYTRYADDIVISGAGKPSPNISSDVRGMIETGNWQLSEEKTTLLSLPNRLKVYGLLVDQARPRLTKGYRRRLRAIRHLVDSGKIDAQNDPKAYERACGHLAFAQSVEDFSDRVQKDST

SEQ ID NO: 6877 - protein, 320 aa, Luteolibacter ambystomatis
  source 1..320: note = Related to NZ_CP073100.1
MNAPPLLVSFDSLHRLFLACGVEDNSSAASSLSALVEIGFPPIVSKATLGVLFGYSPRFIGAMCKNPDRYYRTFYLPKGNGKFRRIDAPRVALKVIQKWAGFHLANNLKLSPSVVGFIPKISAIDGAARHCSQDWVFSTDIENFFQTTAQSRVTQSLIKFGFPAEGAELFSKLSCLNGNLAQGAPCSPVLSNICFSEFDVLIENYSLDNELVYTRYADDIVISGRGNPPPDLENKILEIVTAAGWSISSSKTRFSRRPNRLKVYGLLVSGDVPRLTKGYRNRIRALRHLENSGKLSPESEDVALGHLSYAKSVERFGLGS

SEQ ID NO: 6878 - protein, 324 aa, Marinobacterium profundum
  source 1..324: note = Related to NZ_BCNS01000018.1
MNIPPLLFSFTTLDQLISSLDEETRHSKENEIASLFKNKLPPLVSIQVLSTLTGFSIPFIYSMTNKPEKYYRTFIISTGKKKRIIHSPRVSIKIIQKWLAHHISSSVNFNECVYGFVKKKSHILAASKHCGSDWVYSVDIKDFFPSTTIEKVRLGLIDIGYSEKAADLISKISSFESCLAQGSPLSPCLSNIVFKNVDNNLCEIAKNYELTYTRYADDIVFSGTGNKPSQLSSAIKDEIESAGWKLAPGKEFYSDRKDHLKVHGLLVNSNRPKLGKRYRNRIRAYEHLLRNDKISPADKPKIMGHVSYRDSVDTLGKKEDTTPA

SEQ ID NO: 6879 - protein, 377 aa, Burkholderia anthina
  source 1..377: note = Related to CABVLY010000035.1
MRGGNGDRLRTAVCCARVCITLTCEDPSTEGRLPNGGRSFESPAVRQAASTKATSFALPVNTPPPLLYFGSVDELIAALSPVTRERYEYQIRTICDLNLPPAVSIHVIATLFGYSPSFVVALLKRPERYYRIFTIRSGKKRREIVAPKVSVKIIQRWIGGNIERHIEWLPCVFGFVSGRSSIDAASIHCGADWVYSIDLRDFFPSTTRATVQAALTDIGYEPHCAELIARLSCYGGRLAQGAPSSPVLSNLAFMRFDQRLMELSNAFDVKYTRYADDMVFSGNGTFPAALKGEIEAVFRDSDWKFAGDKEYFAEKPSRLKVHGLLVDGGVPRLTRGYRNKIRAFRHLMSTGRVREKDVSKISGHIAYANLVLRKAGR

SEQ ID NO: 6880 - protein, 362 aa, Ralstonia solanacearum
  source 1..362: note = Related to NZ_CP034197.1
MCITLICEDRTIEGRLTNGGRSFESPAVRQAAATKATSFALPVDTPLPLLFFESIDELVGALSPLTRERYEPEIRRLFDARLPPAASIHVVATLFGYSPSFVVALLKRPERYYRTFYIKSGKKVRLINAPKVSIKIIQRWIGGNIARNVQWLPCVFGFVPGKSSVDAARVHCEADWVYSVDIKDFFPSTRSESVQVALIKLGYKPHAAELIARLCCHGGRLAQGAPSSPTLSNLVFQPFDEQLQRLADTLNVKYTRYADDMVFSGENAFPEKLKNGVSEIFLKSDWVFAQEKEYFAKRPTRLKVHGLLVDGRVPRLTRGYQNKIRAYRHMLEAGKVAKTDIERIRGHVAYADLIEKKTNLTK

SEQ ID NO: 6881 - protein, 325 aa, Azotobacter beijerinckii
  source 1..325: note = Related to FNYO01000057.1
MRLPHSLLSNPFFQFSRLSDLLAVLGNEVGELEIEEIEHLCSIGLPPVTSENVICAVFGFNPGFVWSLLNKKHKYYRRFEIPKGQGVRVIYAPRLGLKVIQKWLSLRLSEFWVPDDSVYGFVVGRSHVDAAARHCGARWAFSCDIENFFPSTSQASVERALIGIGYKEKSAKLIAEVCCYQGALAQGSPASPVLSNICAAGLDKKMLAVRDKYGCVYTRYADDMVFSGEGEMPRELEADVLSCFDGEEWEVAEGKTYSAVYPGRIKVHGLLVGGGVPRLTKGYRNRLRAYRHLLERDAVVKNASVVMGHLAYEDFVRRKALPESE

SEQ ID NO: 6882 - protein, 322 aa, Pseudomonas oleovorans
  source 1..322: note = Related to PTLV01000220.1
MRLPQSLISSPLFQYHRVSDLLAALDGEIDDEEVSEIQRLSNLGLPPITSANCLAAIFGVNPKFIWSLCNRRSRHYRHFSIPKGSGMRDIHAPRVGLKLIQKWLSVRLSQFWGEREGVYGFVTGRSHVDAAAQHCGSDWVLSCDIENFFPSTTELFVIQSLEAIGYRHSSAALIASLTCYQGGLAQGSPLSPILSNICFNFLDIKFLVLRDSISGVYTRYADDIVFSGRGGFPEGLLEQIRNCFKGTPWCLADNKNYKAIRPCRLKVHGLLVDGDKPRLTKGYRNKIRAYSYLVDNKKITKHESIILGHLTYAEFVTIHQQG

SEQ ID NO: 6883 - protein, 343 aa, Azotobacter beijerinckii
  source 1..343: note = Related to NZ_FOFJ01000068.1
MRKQLEALLSMRLPPYFFSNPYVVFPTLSDFIKSLEGEITDTELQEVNRLAALNLPPVVSGSVVAAIFGVNPGIVWAIINKPHRYYRTFNIPKGNGQREIHAPRVVLKIFQKWLSVRLADAWRPADCVYGFVAGRTYIDAAIKHKNAKWVFSCDIQEFFPSTPSIYVKECLQRLGYNHDQAALVSSLCCFRGGLAQGSPASPVLSNICADDLDKQLLRVAEKYGCNYTRYADDVTFSGSAEVPSGLTDDVAGVFHASPWELAPGKTKLSVSPARLKVHGLLVHTGTPKLTKGYRNKLRAYRHLAAHGKLTKNLSKVNGHLSYAADVDRRVAADNIEVENLFGP

SEQ ID NO: 6884 - protein, 323 aa, Massilia horti
  source 1..323: note = Related to NZ_SPUM01000038.1
MRLPLHLQSSRYFTFGTLQEFIKASGTSTDAEIAEYERLEALGLPPISSRHSLALMLGVNPALIWSFEARPHRFYRTFHIAKGRSTRRIDAPRVGLKIVQKWLSAQLQAAYSPPEHVYGFVPNRSHVQAASIHCGAEWILSADIADFFPSTPFALVEANLKRLGFNEYAARTIASLSCLDGALAQGAPTSPVLSNICFDEMDKALLALATKHQARLSRYADDIVFSGSGEVSETLISEIRDLFVQSPWELSERKFVLSRRPNRLKVHGLLVEDKRPKLTKGYRNKLRAFRHLLANGRVRSAKDVEIMAGHLAYSDFVEKSFET

SEQ ID NO: 6885 - protein, 371 aa, Acidocella facilis
  source 1..371: note = Related to NZ_JAGIXE010000037.1
MQHAHCAKTNDRRMPSFGRCSFETQPKRRHLDESQLCYMRLPHQLLESPFFLFSRVEELVEAIGLETGDDEAIQLRALSERGLPPVTSVHCLATMLGVNPGLVWSLINRPHRYYRTFEIPKGRGTRRITAPRVALKVIQKWLGYHLARAASTPPHVYGFVPGRSHIEAAHVHRGAEWALSVDIANFFQTTPSSLVINTLEHLGYGVGAPLLASLTCYLGFLAQGAPSSPVLSNLCFAATDEVLVRLSERYGCKITRYADDVVFSGQGGMPGGLRSELRGIFAATPWKLSPEKESVQPIKGRIKIHGLLVDGPHVRLTKGYRNKLRAYEHILLTRGGEATDRHVLSGHVQYGHHVEAILERLALSRANESPD

SEQ ID NO: 6886 - protein, 375 aa, Rhizorhabdus histidinilytica
  source 1..375: note = Related to WMBU01000038.1
MRLPQHLLASPLFVFKNAEELIGAMGDRSTPEAIGDIRTLSAQGLPPVVSEEALAAMVGINSGLVWSFLNRTWKHYRTFEIPKGNGVRQINAPRVALKIVQKWLSVNLAKFYEAPEHVFGFVAGRSHIDAAMRHIGAKWAFSADISDFFPSTPEAMVAEALQTIGYSDQSSRIIARLGCLGGRLAQGAPTSPLFSNLCFRQMDSAVLELSHKYECRLTRYADDLVFSGQGDFPNTIRDDLTALFANGPWHLAPQKMLVQPLKGRIKVHGLLVNDSGVRLTRGYRNQIRAYAHLLATRGDQAMEAPKLIGHVEHARHVQRVTGSPSGISKNEGVERERIIIPPGIILPDRQPSADDRRPEAQNESFVGWLKRILNF

SEQ ID NO: 6887 - protein, 325 aa, Burkholderia cepacia
  source 1..325: note = Related to NZ_JAIZQS010000002.1
MRLPLPLLNSQYFQFSSFAELRTALGDSVSSEELQEAARIVLGGLPPITSRLTLAAMLGVNPGLIWSFENRPQRYYRSFSIPKGRTTRQIDAPKVALKLIQKWLSVQLARTFEPADHVYGFVGGRSHVQAAAQHVGAQWVFSLDIQDFFPSTPIRLVVESLKSLGFGSDGASLLSRLACLRGALAQGAPSSPILSNICFQQMDGQLAQIAQNVGARLTRYADDVVFSGIGEMPPTLENDVRAIFTDSPWTLAEHKIRIAQVPDRLKVHGLLVHGAQIRLTKGYRNRLRAYRHLLHEGKIRDDDLAKVCGHLSYAASVERESDGTS

SEQ ID NO: 6888 - protein, 324 aa, Burkholderia gladioli
  source 1..324: note = Related to NZ_CADFBE010000001.1
MRLPPSLLNSQYFLFSNFAELRKALGDSASSEELEEAARLVLAGLPPITSRLTLAAMFGVNPGLIWSFENRPRRHYRSFSIPKGRTTRQIDAPKVALKLIQKWLSVQLARTFQPADHVYGFISGRSHVQAAARHVGAQWVFSVDIQDFFPSTPVDLVATALEALGFGRDGAVLLSRLACLRGGLAQGAPTSPVLSNICFQHIDGHLVQIAHNAGARLSRYADDIVFSGIGDIPPMLENDVRTLFDGSPWTLAEQKIRTVRAPDRLKVHGLLVHGAQVRLTKGYRNRLRAYRHLLGEGKIQEADLAKIRGHLNYAASIERDGDEI

SEQ ID NO: 6889 - protein, 313 aa, Paraburkholderia sp.
  source 1..313: note = Related to NZ_CADFGI010000002.1
MYTSLGELSRALGDAARPEELAEIERLVLLDLPPVSSRIQLATIFGVNPGLIWSFENRTRKHYRSFFIPKGQTTRRIDAPKVALKVIQKWLSVHLSHGFKPADHVYGFVSARSHIQAATLHVDAQWVFSVDIQDFFPTTPIQLVSDSLEAIGFGRDGAMLVARLSCLAGFLAQGAPTSPVLSNICFRLIDEALIAIAARYSIRLTRYADDIVFSGTEEYPAQLETDVRALFSVGPWTLAEHKVRVNKLPERLKVHGLLVHGPKIRLTKGYRNKLRAYRHLMTHEKVAEADIAKIKGHLNYAASVDKFRDASED

SEQ ID NO: 6890 - protein, 324 aa, Paraburkholderia domus
  source 1..324: note = Related to CAJNAS010000001.1
MRLPQPLLDSQYFLFSSFAELSKALGEAAHPGELAEAERLVLRGLPPVTSRMALATMFGINPGLIWSFENRPRQHYRSFSIPKGRTTRQIDAPRVALKLVQKWLSVHLSRAFQPAEHVYGFVSNRSHVQAAARHVGARWVFSVDIQDFFPSTPVDLVAESLQTIGFGHEGARLLSRLACLRGALAQGAPSSPVLSNICFQHVDEQLILIASRYGVRLTRYADDIVISGTDELPPTLENDVRALFSQGPWRLADQKTQIAQLPDRLKVHGLLVHGEKIRLTKGYRNRLRAYRHLISRGGIQDADLAKVKGHLNYATSVDKEGGDA

SEQ ID NO: 6891 - protein, 303 aa, unidentified
  source 1..303: note = Related to JAAGNS010000286.1; note = Proposed Ferrovum sp.
MDELLKASAGAVPEAEMNEARRLVNLGLPPVTSRMALATMFGISPGLIWSFESRTRKHYRTFFIPKGSGKRRIDAPRIALKIIQKWLSVHLQKCYQPPEHVYGFVSAKSHVAAAARHCGASWVFSVDLKDFFQSTPEVVVINSLERMGFAVNSATLLAKLSCLNGTLAQGSPSSPVLSNICFEHVDEQLLKISKMYNVRLSRYADDITFSGTGVFPAALPEEVLGVFEEGPWRLAEQKTDLAMLPNRLKVHGLLVHGNHVRLTKGYRNRLRAFRHLLKNHKVSDMDLARVQGHLEYSEFVERF

SEQ ID NO: 6892 - protein, 321 aa, Pelomonas sp.
  source 1..321: note = Related to JAJTWT010000001.1
MRLPHPLLNSQFFQYASLSELLKATERALSESERELMLQLSGKGLPPISSRAALAAMLGINEGLIWSFEARPGRHYRTFYIPKGKDVRRIDAPRVALKIVQKWIGFQLAKAYLPPEHVCGFVEGRSHIDAARIHCRATWVFGVDIQNFFPTTPIDVVARALLDIGYHELGAVLISRLCCFENALAQGAPSSPILSNMCFASYDQRLKAIADRYGARLTRYADDIVFSGQDDFPVALKEEVLGIFASGPWALSNQKIKLAVWPQRLKVHGLLVHGDQLRLTKGYRNRLRAYEHLLAAGKIRAESISVVRGHLGYKDQVAKRA

SEQ ID NO: 6893 - protein, 321 aa, Rhodococcus sp.
  source 1..321: note = Related to MWOL01000027.1
MRLPQPLLDSQFFQFSSLAELLKATGELVPPSEQVQMRRMVDRGLPPITSRAALSAMLGINPGLMHAFITWPQRYYRTFEIPKGRRGVRRIDAPRVGLKIIQKWVAERLQNCYERPEHVYGFVSGLSHVHAAAQHCEATWTFGVDIKDFFQTTPINVVTKCLLQIGFDENGAAVVASLCCLNGVLAQGAPSSPVLSNICFLHVDQRLAELAAEFGVRLTRYADDIVFSGMGEFPERLQTELFAIFSSGPWRLSERKTRLDKLPNRLKVHGLLVHGERARLTKGYRNRLRAYDHLERTKGEDVEDADVIRGHLSYGKFVESL

SEQ ID NO: 6894 - protein, 320 aa, unidentified
  source 1..320: note = Related to SSEM01000053.1; note = Desulfurellales bacterium
MRLPQPLIESKFFQFERLADLERAIGEHGSALELAEIRRLTNLGLPPIASSSTLATMLGVNRGLIWSLVNRPRRYYRRFSIPKGKEERIIHAPRVALKIPQKWIGVQLSNYFRAPAHVFGFVPHRSHVDAARVHLGAKWVLSLDIENFFPSTPQELVEQALVNIGFGEAGANLIASLACFNGFLAQGSPCSPTLSNYCFSPWDESLALLAAREGVRISRYADDIVLSGHGTPLDGLQEQIAATLANSPWRLSQRKISLSVAPARLKVHGLLVSGDRVRLTKGYRNKLRTFEHILQTRENLDAKFERKVRGHLAYGKFVEA

SEQ ID NO: 6895 - protein, 326 aa, Ideonella sp.
  source 1..326: note = Related to PTEU01000002.1
MRLPHLFLDRLCFGLSGPEELLRVLGPLASPGEDECIRRLCALDLPPVSSPRALAAMLGVSEGLVWSMLHRQHRHYRHFSIPKGRGSRDITAPRVALKVIQKWLAVRLQAKYYRPGHVFGFVPGLSHIDAARQHLGARWVCSFDIENFFPTTPEGLVAARLVDLGFPESGAGIVARLACFSGVLAQGAPTSPVLSNIALCDIDQRLSLLAERYSLRLTRYADDIVFSGLEAVPDQLAREVYELFAASSWRLSEAKTERVEIPSRLKVHGLLVHGEEVRLTKAYRNRIRAYRYLMERNGIQQADLPKVKGHLSFAESVRKAGGASFG

SEQ ID NO: 6896 - protein, 326 aa, Undibacterium parvum
  source 1..326: note = Related to CP034464.1
MRLPQPLLDSPYFQFSTVNELCKAAGDPDSAEVMEIRRLDALNLPPVSSRQILGLMFGLNSGLIWSFQSRTHRYYRTFNIPKGNRQRRIDAPCVGLKAIQKWLATQLQGAYKVPDHVFGFVAGRSHIDAASVHAQAVWVLSVDIRDFFQTTPKSLVKTRLLELGFLEKGAELIASLCCLRDNLAQGAPTSPLLSNVCFIHVDQQLSYLADKYNLRLSRYADDIVFSGKGQCPDTLRDELESLFIGSTWVLAPEKTELVSLPKRLKVHGLLVHGENIRLTKGYRNKIRTYKHLLATKGAELTNSEKIKGHISYEKYVDLVVDAQRNT

SEQ ID NO: 6897 - protein, 314 aa, Stenotrophomonas nitritireducens
  source 1..314: note = Related to NZ_LDJG01000072.1
RRTFYRRSTKEKLCYMRLPQLLQESQFFLFSGVEELLSALGSVIDPAEKQEVLRLADLGLPPISSKDALATMLGINPGLLWSFENRPQKHYRVFTIPKGAGRERTIVAPKVALKVLQKWLSIQLQRNYVPPNHVFGFIPGRSHIQAAQKHLCARWTYSVDIENFFPTTSRDVVCEVFLQLGYSPESSQMLAGFCCYKGFLAQGAPTSPVVSNLAFRNIDERLVQLAERFGVRLSRYADDIVFSGIHDFPDELRIDVDRIFGDSPWRLSPDKTEFDQLPRRLKVHGLLVHGERVRLTKGYRNKLRAYAAVSLYTS

SEQ ID NO: 6898 - protein, 323 aa, Xanthomonas arboricola
  source 1..323: note = Related to MDDY01000002.1
MRLPPLLLESQFFLFSSLEELLAALGDSVAELEKEEVARLAALGLPPISSRDALATMLGINPGLVWSFEHRSAKHYRRFTIPKGAGQERVIIAPRVALKIVQKWVSVQLQRAYAAPQHVFGFVPGRSHIDAAKQHRLAEWTYSVDIADFFPSTPLRTVTAVFNRLGYGDEVASMLASLSCYQGFLAQGAPTSPVISNLALHEVDRRLIDISRSFDVRVSRYADDIVFSGQNGFPEELVDEVNEIFIDTPWTISQGKTELNRLPRRLKVHGLLVHGAQARLTKGYRNKLRAYAHLIKNGLIQEGHKLRVKGHLRYGEQVKEAAD

SEQ ID NO: 6899 - protein, 323 aa, Stenotrophomonas sp.
  source 1..323: note = Related to NZ_MOYM01000001.1
MRLPLFLQDSQFFLFSSVEELVAALGDSVAVVDKEEVKRLAELGLPPVCTREVLATMLGINPGLLWSFEYRPDKHYRIFRIPKGARGEREIVAPRVALKILQKWLSVLMQRHYAAPDHVFGFVSGRSHLEAAKVHRMAHWTFSVDIANFFPSTPAYVVAEAFESIGFGAESAEMLARLTCYRGFLAQGAPTSPVMSNIALRAVDEKLSDISRRFGARLSRYADDIVFSGVEEFPEGLRAEVADLMTDTPWELSAEKTEFNQLPGRLKVHGVLVHGPQIRLTKGYRNKLRAYAHLSKRGRIRQDDLLRVAGHIRYGIQVEEVAD

SEQ ID NO: 6900 - protein, 331 aa, Luteimonas marina
  source 1..331: note = Related to NZ_VOHK01000004.1
MRLPHSLLESQFFALTSAKELVIAMGDSLSEEESDELHRLAGLGLPPVSSALALSTMMGINPGLLWSMLSRPTRHYRRFTIPKGRSERVIFAPRVALKIIQKWLSIHFEKRFTPLPHVYGFVRGKSHIQAAKIHTTAQWVYSTDIEGFFPSTPIGLVVEALMSLGYNADSAEMLAKLCCINGHLAQGSPASPVISNIVLRHIDAGLQRIAGDFGCRLSRYADDIVFSGAQTPPADLGDVVPELFLDTPWRLAPEKTHISTAPRRLKVHALLVHGAEVRLTKGYRNRLRAFRHLIKNGRVREADLKRIQGHLHYADHVAAESVVNGDGSAIP

SEQ ID NO: 6901 - protein, 348 aa, Agrobacterium sp.
  source 1..348: note = Related to NZ_KI535289.1
MSLTRGPSNRESSSRHLTKDSFAKMRLPHHLVESLLFQYETVDDLVLSLGSEVTPAEVLDIRRLVALGLPPVISRDVLATIIGVNPGLIWSMERRPRKYYRYFPIKKGVGERHIFAPRVALKIIQKWLSYQFARTYLAPPHVFGFVAGRSHLQAANAHCGARWVHSVDIRDFFPSITANVLSSKLVELGYNDLSSDFITKFCCLNGQLAQGAPTSPTLSNLVFRAMDNRLVEIAERFGARLSRYADDIVFSGTQQFPEDLPACVEEIFVGQPWQLAPEKTETAILPHRLKVHGLLVHGHKIRLTKGYRNRIRAYEHLQANGRIIDEDARRVGGHLMYARQVESFIVPD

SEQ ID NO: 6902 - protein, 324 aa, Shinella sp.
  source 1..324: note = Related to QFOR01000002.1
MRLPHPLVESLLFQYEAVDDLILSLGSDVTPDETADIRRLVALGLPPVISRDVLATIIGVNPGLIWSMERRPHKYYRYFSIKKGIGERRISAPRVALKIIQKWLSCQFSKVYVAPQHVFGFIAGRSHLQAAHVHCSANWVYSVDIRNFFPSITANVLSGTLMDLGYSAPSADLIVKLCCLNGQLAQGAPTSPPLSNLVFRGMDSGLLEIAQRFGARLSRYADDIVFSGTEQFPQNLPATVAEIFAGQPWHLAPEKTEIAILPNRLKVHGLLVHGDQIRLTKGYRNRIRAYEHLQANGRILEGDAARVGGHLMYARQVKNFIAPD

SEQ ID NO: 6903 - protein, 320 aa, Rhizobium laguerreae
  source 1..320: note = Related to WIFE01000020.1
MKLPRHFVESTFFMFESAAELVTALGPRVGLGDVAEIHRLAQLGLPPIISRDALAVMIGVNPGLIWSFEKRPGRYYRHFQIPKGSGVRNIAAPKVALKAIQKWLSIHFEKCFMPHTHVYGFVPGRSHLQAASVHCGAKWVFSVDIRNFFPSTSAHLVKRALTTLGYSAESSDFLTKFLCLAGGLAQGSPASPVLSNMAFIEVDALLAAMAANYGARLSRYADDIVFSGVNEFPPDLPVQIAQLFARLPWNIAPEKTETAIAPQRMKVHGLLVHGDQIRLTKGYRNRIRAYQHLMTSGKIRDDDWRRIKGHLMYARQVSSS

SEQ ID NO: 6904 - protein, 322 aa, Methylobacterium sp.
  source 1..322: note = Related to NZ_LMNG01000030.1
MRLPQTLLNSIFFTFALEQEFVSAFGTSLQAIERSEIERLAALQLPPITSEDALALMIGVNPGMIWSLVNRNYKYYDSFVIKKGAKERRISAPRVSMKLIQKWISLHLENAYDPPDHVYGFVAGRSHLDAASKHCEAQWIHSFDIRNFFQNTPSNVVENSLLEIGYKEPSTDIIVPLCTLAGFLAQGAPTSPVLSNMAFKKVDAQLAEVAAAEGLNLTRYADDIVFSGIKAPNSALIEIIKRILAQTPWSLAEEKSHFSEAPNRRKVHGLLVHGNKPRLTKGYRNRIRGFEHAMHKGKIKPEDLIRIKGHLNYAAYVEKKFI

SEQ ID NO: 6905 - protein, 323 aa, Phaeobacter inhibens
  source 1..323: note = Related to NZ_CP010735.1
MRLPQHLSSSPFFSFSEKDDFFKAIKTVVDDDELERIHLLIARGLIPITSKEVLATMLGVNPGIIWSMVNRPHRYYRSFSIPKGKEKREILAPKVSLKVIQKWISVQLQNNVTFLDHVFGFIPGLSHIDAASQHTEASWIYSIDLEKFFPSTPQSWVEASLGILGYDIKSASLVGDLCCYGGALAQGAPSSPVLSNISMSGVDGSLSALAAELGVRVTRYADDITFSSIYEFPEALPARLSALFKDTPWSISSKKTHLAKSPGRLKVHGLIVNDGQVKLTKGYRNKLRAYKHVIEKNKCRDKDTARLSGHLRYAAQIERHNGE

SEQ ID NO: 6906 - protein, 322 aa, Ruegeria pomeroyi
  source 1..322: note = Related to NC_003911.12
MRLPHQLTGSRFFSFSDEGEFLKSVSAVVDEEEFVRIGSLVQAGLMPITSKEVLATMLGVNPGIIWSLENKPERYYRRFKIPKGKGEREIVAPKVGLKVIQKWFSVQLQDCARIDDHVFGFVPGRSHIDAASVHTNANWVYSIDLTNFFPSTPINWVASSLINIGYDADSADRISKLCCYRGALAQGSPASPVLSNISMRGIDAALGALAAEMDVRVTRYADDITFSAAGEFPQVLPERLESLFSQTPWKISQEKTYFSEAPVRLKVHGLVVNGNTVKLTKGYRNKLRAYRHVLQTNRCRQEDLARLSGHVRYASQVSSRDD

SEQ ID NO: 6907 - protein, 325 aa, Salipiger marinus
  source 1..325: note = Related to NZ_FNEJ01000006.1
MRLPHNLVESQFFIFSEREDFLKAVDSVVDHEELQRINKLIEGGGMPITSKEVLATMFGVNPGIVWSFINKPDRHYRKFSIPKGKGKRSILAPKVGLKVIQKWISYQLQGKARFPDHVFGFVPGRSHIDAAVRHTSARWVYSIDLEDFFPSTPRSLIASSLCSFGYDFKSSELISKLSCYDGGLAQGAPSSPVLSNIAMFEVDTALAELAEELGIRITRYADDITFSSEGVYPSSLPERLSTIFYSTPWKISKKKTYFSVAPKRMKVHGLIVNCGEVKLTKGYRNKLRAYRHVLQSGLCKKEDACRLEGHLNYYSQVIKHRDSST

SEQ ID NO: 6908 - protein, 305 aa, unidentified
  source 1..305: note = Related to JAAFAL010000034.1; note = unidentified bacterium
MGKKLKRGEAEEIQRLAALGLPPITSRWCLGTMLGVNAGIFRSMELRPHRYYRNFRLASGNKVRNIRAPKAGLKVVQRWIAHNLANAYVAPDHVYGFVSGRSHIDAAMQHVNASWVVSVDISDFFPSTPVSVVRSRLLSIGYQEVAANLITSLVTYEESLPQGAPTSPVLSNICFGPSDLKMAAIAEHYDARITRYADDIVFSGETGIPHADILVSVRDHFERTCWDINERKVRISQAPNRRKVHGLLVHGGSVRLTKGYRNRIRAYKHLLNTRSDIPQEDYHSIMGHVSYADHLAELVGKSDSN

SEQ ID NO: 6909 - protein, 322 aa, unidentified
  source 1..322: note = Related to JAIUPC010000007.1; note = Proteobacteria bacterium
MRLPHNLLENVGLLTDGPKELIASLGEGCGVEEADEIVRLFSLGLPPVTSLKALAVMTGYNPGFIWSLVDRPEKYYRVFDIPKGRQLRRIEAPRVALKLIQKWFSLHFERQWKPHDAVHGFVRGRSHLSAARKHVTAEWVVSVDIENFFPSTLKTDVRAALVRLGYRSEESLATIERLCCRYERLTQGAPSSPVVANIALDLLDQKIAAIADHHGVIFTRYADDIVLSGRDRAPANILEELTAIFEGTSWRLSAQKQSVSHLPDRLKVHGLLVHGEHVRLTKGYRNRLRAFRHLSDRGAIREADQRRIRGHLNYSQQIERGG

SEQ ID NO: 6910 - protein, 321 aa, Roseomonas sp.
  source 1..321: note = Related to JADCJU010000004.1
MGLPHHAVYSQMLCAGSEQDLLLGMGAFCSSAEAEEISRLTALGLPPVTSLEALAVMTGFNPGFLWSLQNRPDRQYRVFSIPKGKTFRQIEAPRVGLKFIQKWLSIHFEHKWSAHPAVHGFVKGRSHITAARVHLNAQWVISVDLENFFPSTKVDTVEKALRKLGYKTDASISILSSLLCFKLRLSQGAPTSPVISNIALSDIDDKISLIAQNCGARYTRYADDIVLSGTLSPPENLLLAIKNVFEKTCWRLAERKTSTVQLPQRLKVHGLLVHGEKIRLTKGYRNKIRAFNHLFEKDAVKAEDAQRIRGHVNYSRQIERV

SEQ ID NO: 6911 - protein, 322 aa, Labrenzia sp.
  source 1..322: note = Related to NZ_CP041191.1
MRLSHKYIEKIALVAGSAEDLITALGNSCSPEEKAEIQRLVDAGLPPVTSSDALSVMTGFNPGFIWSLVSRPEKQYRVFKIPKGREERQIEAPRVALKLIQKWFSVHFENKWVAHSSVHGFVRGRSHISAAKSHLGAEWVASVDIRNFFPSTTASEVDNALRDLGYGDESIKLLKRLCCFGGRLSQGAPTSPILSNIALHRIDLDASNVAIELGAVYTRYADDIVFSGKGLPPPDVLEKLEKLFTGTCWQLSERKRHIAQLPGRLKVHGLLVHGDKVRLTKGYRNRVRAYKHLVSKGRINLDDRNRIGGHINYAKQIDEASD

SEQ ID NO: 6912 - protein, 325 aa, Niveispirillum lacus
  source 1..325: note = Related to NOXU01000023.1
MRLPHNLIERLTLVAGSPDELCSALGDAAGGEEVAEIGRLSAAGLPPITSLNALSVMTGYNPGFVWALANRTARYYRVFEIPKGRGTRQIEAPRVALKLIQKWLCHHFSAKWQPLDAVHGFVPGRSHLTAASVHLRAEWILSIDLENFFPSTPIDQIRGSLRKLGYQDGDGLELIANLLSFRGRLSQGAPTSPVISNIALSDIDGILSDIARNFRIRFTRYADDITFSGISGVQLPDELLASVREQFVGTPWRISERKIHIAKSPARLKVHGLLVHGDELRLTKGYRNRLRAYRHLMQLGRIDASDLGKVTGHMNYASQIERLKS

SEQ ID NO: 6913 - protein, 323 aa, unidentified
  source 1..323: note = Related to JADLAT010000006.1; note = Alphaproteobacteria bacterium
MRLPHHNLESVCFLFEHFSELIKAMGDKCPPEEAIEIERLFNLGLPPVTSENALATMLGYNPGFIWSLLNRTSRYYRQFDIPKGAGTRKIDAPKIALKAIQKWLSYHFQKKWIPNEHIFGFLPGKSHMDAASKHLSSKWVYSIDIQNYFPSISTVRVRDALENLGYSTEPSLKIIPTLCCLRGSLVQGSPASPVLSNIVLKNLDEELANFAREKNWKFTRYADDIVFSGIDDINESDFIPIKLFVNQDGWMISDKKTYLARHPNRLKVHGLLVHGDTIRLTKGYRNRIRAFRHLLNADKIKEQDLAVIRGHLNYSAQVDDFQL

SEQ ID NO: 6914 - protein, 319 aa, unidentified
  source 1..319: note = Related to JABJKH010000091.1; note = Rhodospirillaceae bacterium
MRLPQPQLESIGFLFEAPSELIQAMGNECSPDEADEIRRLYGLGLPPVTSQESLSVIFGYNPGFIWSLLNRTPRHYRHFEIPKGAGHRQIEAPRVALKAIQKWLSHHLQRAWTPNENVFGFVPGRSHIDAAAKHLSSEWVFSVDLENFFPSVSIRRVKEALRTVGYQTDKSVEILSTLCCLDNHLVQGSPTSPVLSNIVLKNVDQQFASIAAEKKIVFTRYADDIVFSGSGDIPHQTLTQIKSVVSDDGWTLSERKERLSETPNRLKVHGLLVHGRKLRLTKGYRNRIRAYRHLLKNEKIKEEDLSKIKGHLNYASQVE

SEQ ID NO: 6915 - protein, 323 aa, Roseibium aggregatum
  source 1..323: note = Related to CP045631.1
MRFPHPDFSELCLFAQTPDILIKALGDFSDDEERQLILEYCAQDLPPVTSVISLAVMTGFNPGFIWSIVSRPHKHYRSFPILKGKNAPPRIINAPKVGLKAIQSWLSIHWVRKFDHHPNSFGFIPGRSHAHAARCHVGAEWVFSVDIKDFFPSIQEDRVLKALQCLGYKAGDGTTLLTRMLCLDGALSQGSPASPVISNMILRGLDERLLALSLELGIVFTRYADDIVFSGKGQPPKALLEKVVNEVNGDGWTIAEDKLYTSILPARLKVHGLLVHGASVRLTKGYRNRIRAYRHLLAEGKISKDDLSSVLGHVSYADFVEKL

SEQ ID NO: 6916 - protein, 337 aa, Pseudovibrio sp.
  source 1..337: note = Related to NZ_FREX01000003.1
MRLPHPRTEQLGFLAETPKEVCKLIGASCGEDEQKLIQQYYELGLPPVTSVNAISVMFGYNPSFTWSLLKNSHKFYRVFEIPKGPKKRNISAPKVSLKVIQKWLATHFYNKWERPDYVFGFVRGKSHIGAAQEHIGANWVISVDIEDFFPSIRWTRVYDAITDLGYQDDFSKQALTLLSCYYGSLAQGAPTSPILSNIIMGPLDKKIFELARHNSATYTRYADDIVISGKDGEPNSLLEQVCTLIESDGWKISVQKKKIQKSPNRLKIHGLLVNDKNVRLTKGYRNQIRAYKHILNNNSIDDESKNKLRGHIAYADHVATYSEQLPPPSTPSSKLPV

SEQ ID NO: 6917 - protein, 326 aa, Sulfitobacter pontiacus
  source 1..326: note = Related to NZ_AXZR01000004.1
MRFPHPDLEKICFIAEDPDTLIKLLGEHCTADEAALIQQCCASRLPPISSPDAIATMFGYNPGFVWFMLTKTNRLYRTFFIPKGKGERQITAPRVSLKLIQRWLNFHWSAAWVAPDCVHGFVSGRSHVTAATEHCNAKWIVSADIEDFFPSVKTARVRQALAELGYANMDSLALLGKLVCLNGALTQGAPTSPLLSNIVLGQLDRNLTTLAEELNLVFTRYADDIVFSGKGEMPEGIDKKIKAIIEQDGWTVAEKKFEVAKAPSRLKVHGLLVHGGKVRLTKGYRNRLRAFRHVLSNGKASEKDVPKLSGHVAYADFIDLQHRKPD

SEQ ID NO: 6918 - protein, 329 aa, unidentified
  source 1..329: note = Related to NVXB01000069.1; note = Hyphomicrobiales bacterium
MKPPHPSSFSVGFLTESSDELIRIIGNRVTEEESQLIRQYFDLKLPPITSVPALSGMFGLNEGFIWSVINRATKHYRRFEIPKGRTTRTIFAPKVGLKMIQKWLSIHFQECWSSPRSVFGFVPGRSHLAAAAQHLGSEWVMSIDIKNFFPSTSTQKVEAALGRLGYNDEFSRMAITKLTCLRGGLAQGAPSSPILSNIVLHDLDQRLSQYTEANDLVYTRYADDIVISGNDSPPNDIIDDVRSMVKDDGWEIAESKTSLDRIPNRLKVHGLLVHGKQIRLTKGYRNKIRAYQHLLANNKITDEDFSKISGHIRYASSVEKFDTHPDNYD

SEQ ID NO: 6919 - protein, 492 aa, unidentified
  source 1..492: note = Related to RPGP01000001.1; note = Desulfobacteraceae bacterium Eth-SRB1
MKINFNEDILLWAIGVLQPASASDALKFISYIYPEIKPLPLVKEIDQVLSRYRDLGIVVRVHGKSRLYSLTYAGNAKLSLKLRRHRDKARLFLLKDTRKCNMVLSGEEKKESVGASPTSDGSSTLQDFARPIKSAAAPRYPRHNGRFYWSRISKQLNFQVGLNFSSPDIFLKYYSFPSLKAIHNISPDPAEGNDLSVTDFALSVGVSPRLITSLLHATHKYYRQFNIGKRGGGKRTISAPRTFLKVIQYWILDYLLYTLKSHPICHSYQRGKSIITNASPHINSEYVANIDISDFFGSINQTMIIDLLRKNGFGEQLSKTIARLTSLNNGLPQGAPTSPILSNAYLYSFDETAAQIAQNTGLHITRYADDIAISGKKKDSIINVITLFKQELSAKGLELNAKKTRVASRGGQQRVAGVVVNDKALPPRKLRRRVRAMFHQADNYPEEHVEKYNTLRGYLSYFNSFPALKGGPELESYKEILKSLSNNVQPGA

SEQ ID NO: 6920 - protein, 493 aa, unidentified
  source 1..493: note = Related to JACQWO010000092.1; note = Desulfobacterales bacterium
MRVTLNENILLWAAAVLQPASAADVRSFIASIYPEISLLPNIGEIENIFSTWREEGYLQRVHGKSRLYSATYKTNLKLSVKLRRSRDKSRLFLLKSTRAANVNVSGVREQDSVGDSPSTEGSIILQEGAWPIKPAAAPRVPRTTGRFYWPRISKQLSIEVGPSFSSPDTFFNYYSFPSIKTIHEASHKPASEKDLSITDISLAIGISPRLITSFIHAPENHYRQFKIGKRGGGERVINSPRTFLKVVQYWILDYLLHSLPCHPNCHSYQKGKSILSNSLPHVGQKYLANIDISNYFPSINEKMVFSLLRDNNFGEQLSKAVARIVTLENGLPQGAPTSPIISNAFLCNFDEIMTQRALSFNLVYTRYADDMTISGENKENIISLIKNLSANLKDMGLSINEKKTRIASQGGQQKVTGIVVNEVSQPPRTYRRNIRSMFHHAERNPELFADNIKVLKGYISYLQSFPNMQGKKEIFRYKNVCKTIEKNFVQQSH

SEQ ID NO: 6921 - protein, 483 aa, unidentified
  source 1..483: note = Related to JAHJDK010000078.1; note = Nanoarchaeota archaeon
MSARFNWRIILWALGVVQPATAKEIRELLLKVFPDAGRIPSQDEFKVYLNLWEKERLVGVVNRKSAHYSLTSRGNYRMGSDLRYNRDKVRLFLMKEARRNRIYLSGEQIKELVGDSPTVIGSREIYKRHRPIIAALPCFGRNYWPMLLGQLLADPLKNGSPDNHLALYSFPSFESLISSYDRFSRIKKPSLHLLALAIGISPRLISYIIYKRPEHYRQFEIGKRGGGTRNICSPRVFLKTIQYWILDYLLFALKIHPSCNSYQKGKSIITNASDHVGKNYVANIDIKDFFNSISERSISKFLCNQGYDAGFSELISKLVTLNDGLPQGAPTSPHISNAFMYQFDEKIFKFCEKLKMVYSRYADDMTISGSNKKDIIRGIGFAKQYLDSMGLSLNESKTRIASKGGQQKVTGIVVNSHISPPRMFRRKIRAMFHNAYKNPKEYRDKQGQLKGYLCYLCAFPGVLTAKDKEIYVRTINRLSSFAE

SEQ ID NO: 6922 - protein, 442 aa, unidentified
  source 1..442: note = Related to JACXUH010000041.1; note = Betaproteobacteria bacterium
MEPIISRWLEERCIVRVHGKSRLYSISHVGNDKLSIRLRRHRDKARIFLLKSAHDASFQVSGEAHQELAGDSPAVNSSGNTQEGTWPISSASDPRVPRVPVRTYWPRVVRQLDFKVGSVPRSPDTHLTYYSFPSVQSIHDASERCAPPNDLSISDLGIALGVSPRLLTSFIHKPSRHYRQFEIGKRGGGNRVISSPKLFLKVIQYWLHDYFLYRLQIHDSCHSYQKGKSILSNAEPHVGKHFVANIDIENFFGSITKDMVSQLLRNNRFGEHLSNSVARLVTFNDALPQGAPTSPTISNAFLYDFDETMAAWSIIEGLTYTRYADDMTISGNDREQILDAIRLAERLLNEIGLRLNSKKTRIASKGGQQKVTGVVVNEKPQPPRDLRRRIRAMFHQAKMSPDEFRQKLPMLRGYLSYLSSYPALRNSEELNSYINVLKKISQ

SEQ ID NO: 6923 - protein, 502 aa, Marinobacter sp.
  source 1..502: note = Related to NZ_KB822693.1
MSIQFNDQLLLWGLGVLQPAAPQEVLSFLKLVYPTVEQWPDELYLNDRFFHWEELGYIVVLNKKYSMYSLTALANMRMDVKLRRQRDKARISLLRAAYDANVSRPGVMDQDLDGASPSSEISSTLQEGSRPVGSGSKPSRTEPTRLRTRTYWSRVSEQLSVQVGLDFHSPGIPSFQYRYCSFPTLKAVHQASLGESSENDMSISELGLAIGVSPRLLTSFLHKPENHYRHFSLPKKGGGERDIAAPRFFLKTIQYWIKSYVLCHLKVHNTCHAYTSGKSINTNAKPHVGKAYVANVDIENFFGNITKEHVFRILEKNGVGRKLATAVSGIVTLNRVVPQGAPTSPVISNAVLYEFDKAMSKISVDKGLDYSRYADDITFSGESRSDIEYIVSKCRELLSAEGFNLKDKKSRVASKYASQRVTGLVVNEKVQPPREYRRKLRAIFNNALINPQEYVDRLDELYGYFGYLSSFDGARNARQIRKDRIAIYRVSRLARIKKSKDE

SEQ ID NO: 6924 - protein, 302 aa, Nitrosomonas sp.
  source 1..302: note = Related to SSFV01000001.1
MSLSQLALAIGISPRLLTSFTHRPENHYRFFDISKKGGGKRQIASPRFFLKTVQYWIKSYILCHLKIHDSCHAYLVNKSIITNAEKHARKEFVANIDIEDFFGSIKTDHVFQLLKKNGIGEKLSKAVAHLVTLDGKLPQGAPTSPTISNAFLYEFDNSLSKISNEAGLEYSRYADDITISGSSRSAIESVIFGCRNHLWSNGLKLNENKTRIATSHSSQRVTGLVVNEKIQPPREFQRRIRAIFHIVNKNPESYIERISELRGYYNYLLSFDAIKNSRHLQRYRMVINKLKAAARNNSSSLI

SEQ ID NO: 6925 - protein, 499 aa, unidentified
  source 1..499: note = Related to PALV01000013.1; note = Gammaproteobacteria bacterium
MSVKFNNRLLLWGLGAVQPATPSEVIGFLKLVYPDVTAWPDRNFLRIIFNEWLDRNYVIELNKKYEIFSLTSAGNHALGYKLRVHRDKARVTLLRAVYDANLASLGDVAQDSDGDSPSSEASSALQEGSRPVNSGSEPSRTESTRLRARIYWPRVSEQLLSVGLDRHTSNIPSYRYRYCSFPTLRAIKQASNDNSDTQDLTISQLGLCIGVSPRLLTSFVHKPENHYRTFRIGKKGGGSREISSPRFFLKSIQYWIKSYILSQFNAHNACHSYRIGKSIITNANEHARKSYVGNVDIEDFFGSVDKKMVFECLRKHGYGSELSRSIAGLVTFNNSLPQGAPTSPEISNAILFDFDERLFAAASDVGVTYTRYADDITLSGGSKQVVAQLIRECEEGLKAHGMRLNSKKTRIASIRSSQVVTGLVVNEKVQPSRAYRKRIRAIFHQAGINPSQYVGRLKQLQGYYSYLSAFDSLKDSKQLREYREVIRKLGISSKEKVDG

SEQ ID NO: 6926 - protein, 484 aa, Desulfovibrio sp.
  source 1..484: note = Related to ATHV01000015.1
MKKNELQILLWSIGILQPASPTLVRHFLQEMLPKAFNNTTTQKIKEKFSWLQKNGFLAYALDGVDYIYSLTREGELALGPGIRKSRDKIRLFLLRDSASYIQDSPSSPERGLELTGDSPVVETRYVLQGRRPIAPAAGPGVRRYWPSTFKQLKGFAGPKPRSEFYPFDLYSFASIDELNAAVGTECDRNSLSLIHLALSIGVSSKLLFAISNNSRRYYRSFEIRKASGGMRTIHAPRIFLKTIQRWIVDYFLFQLPCHPGCHSFQRGKSIISNAAIHVGKKYVGNIDIADYFKSIKSEHLVHKLSKFFGIGLSRAISLICTHDDFLPQGAPSSPILSNFYLFDFDKEISLLCEQNELSYSRYADDITISGKEKNSIYNAINYSKYLLKKHNLTLNYQKTRVSSRGGQQNVTGVVVNQKINPPRSLRRNIRALFHNAQKNPMQYTDKIEMMRGYLSYLNMYESQKNIINKSRYEHIIDAIAAVKE

SEQ ID NO: 6927 - protein, 480 aa, Halodesulfovibrio sp.
  source 1..480: note = Related to WYDS01000022.1
MSNKVHPYYYLWALGIIQPATPTQVQHVLEKTFVESGVKFNLNEIVQCFENCLKGKIVLKASEWNDSLFSLGPNAYMLLPNRLRFNKDRTRLFLLKKARIASRRASGHLDLDADGASPSDKRSFKIQVPRPIKPLGLAPAQFYWSGAYRQLTSTAGPNSTLPEVRLPFLSFESINLIKSINESTKTTPFSITGLALCIGISPSLLVSTIRNIEKQYQTFEIEKHSGGTRTITAPRVFLKTIQHWLADYLFSTLPVHDVCHAYRSKRSIISNAEKHTNQKFVAKIDISNFFGTITSEMLIKKLSPFCSVEEATVFSRIVTLNGSIPQGAPTSPCLSNFILFDADGIIAKECQKVGVNYTRYSDDLTFSGENRGQLLEIISFTENVLKEYGFELNPSKTHIMTSGMLQNVTGVTVNEKVQPPRKVRKKIRAMFHQAEQSPENFKDQLENLAGYVSYLNAYPELKDSQTLRHYKEVLVKLSTL

SEQ ID NO: 6928 - protein, 459 aa, Desulfovibrio sp.
  source 1..459: note = Related to MLBG01000117.1
MKTELSTQIYAWALGIMQPASATIVKHFMQMALPDSCQDLETKDVKVQFAKMLKLGLISQSSEKIDYVYSLTWLGNLSMNNKLRVHRDKARLFLLKDAAQAAHKERFSEGRGLELTGDSPVMDLSSDKQSRRPIGQVVDSADLAYWSSTFKQLKHSAGPLPRSSFSTSFGLYSFASCNELQLACHNICPNTFDLDISSISLCIGISPSLLVSMSNKPEDHYRTYEIGKKNGGTRIIHSPRIFLKTVQYWIKDYILHSLNIHDSCHAYQKNKSIQTNASMHLNKKFLANVDIKNFFGSISQEKLQNTLATRYSKKMSQCISRLCTINNLLPQGAPTSPVLSNFYLSEFDAKVETFCHHLQLDYTRYADDLTISGNYKDNVLKAIDFAKDTLNLYELKLNDSKTRVASKHGQQKVTGVVVNEKMQPPRKFRKKIRATFYQAKKILAIIPTRKKSCEDILVI

SEQ ID NO: 6929 - protein, 491 aa, Brevundimonas naejangsanensis
  source 1..491: note = Related to CP038027.1
MTQILNAPSIIMALGVLQPATTFEVVGFLKTMLPHAGTLPQPDEVLEFFKEREAAGHVLRVARGDGGTSLYALTLAGHRYLNVRQRQVRDKLRFYLLRDARQARRRSSDGEASRLVGASPTLDTSSPIKGSVANKYGHHVPPGRTYWPRISRQFGVSTGLSASSSDTFPEWLSFRDQRQCELATNFGEGQFELDFEGLAACLGVSPKIISQIASSPNRHYRSFEIAKKSGGSRTISSPRVFLKVIQWFLLDFILTSLPVHHAVHSFSFGRSVVTNAQTHEGQAFVGSLDIEDYFGSVTTSAIFELLVGSGFRNHEARLIARLSTKDGGLPQGAPTSAVLSNAVLYPFDEQINKECARAGLTYTRYADDITISGADRRELLRVMALAEGLLAKHNLHVNKEKTRVVSQGSQQRVTGVVVNQTAKPSRYFRRLVRAKFHNAALSEDHNKVKVEQLSGYLSYLQMFPSLKGSKLFETLAHDLSRARQKDPPMLI

SEQ ID NO: 6930 - protein, 374 aa, unidentified
  source 1..374: note = Related to JAFLCS010000004.1; note = Caulobacterales bacterium
MVGDAPTLESSSSIKGCAANNFGHSVPRVRTYWPRISRQFDRSTGLSAPSSDTFPEWLSFRNRRQCELAVGIERGQFKLDYEGLAASLGVSVKIVSQVSRRPARHYRSFSIQKKSGGERKISSPRVFLKVMQWFLDDFILDGLPVHSSVHSFVTGKSVATNGKLHVCQSYVGSIDIENYFGSITKAMVQRLLLENGFLDDEVSLISALTTLNDTLPQGAPTSATLSNAILYGFDCDMAMSCEEAGLVYSRYADDITISGSSREAVERALSRAKRQLANRSFRTNPSKTRIVSDRARQVVTGVVVNAVAQPSRTYRRNVRAKFHNAAKQKTPAGVEIRALAGHLAYLKMFSSLTGSRQIAALERDLRKVRAKKQE

SEQ ID NO: 6931 - protein, 488 aa, Pseudolabrys taiwanensis
  source 1..488: note = Related to NZ_CP031417.1
MKKVLNAKMALLALGVLQPASAREVRAFLKFVFPESGTLPDVEEFEQFLREQESVNRVVEVERRTMAYYSLTLLGSLYLPPDIRKKRDKFRAYLLRDARRGRFIESRELGTELAGVSPASDTSTIVKGRAANNLGRSSFGRRFANGQAYWPRIQGQFITRTGPTRRSRDTFPNLLSFQDLDQAKRANGNVFCFDYSGIGLCLGLSPQLVWNISRRQSSHYRAFPVAKKGGGTRLIESPRVFLKVIQWFLNDFVLHRLPVHDAVHSFRFGRSIATNAECHKRSMFVGNVDIENFFGTITEGAIISLLTRNNFAPLEAMAIAKLCPNWGALPQGAPTSPIISNALLYDVDKKMSAVCEARGLAYTRYADDISISGPRRRDIADAIRIFEAAISDFGLKINQEKTRIAHRSGQQRVTGVVVNEFAQPSRAFRKLVRAKFHAASVSPDKGVRMIPELGGILGYLKIFPSMQQRREIASYGAIIKFLKSQRTE

SEQ ID NO: 6932 - protein, 547 aa, Pelagibius marinus
  source 1..547: note = Related to NZ_JACSDK010000013.1
MRTEEPTVWPFPSVKRRTLLRALLYGAASGAALGTLGLSPRAGELASEEIVLTMLGILQPASAEEVFCILELLHDAAAAEGMALDLERPRAGEISEAVEALQRQGAILPVQANPVRRYSMTAAGNRRLSPRLRATRDTTRLFLLHGPRARIMEMSREGREGESGGASPPSNLRSLIDSLGRPLGSTEDDGNQPPTRAWPVARHRLWSRHCRTSPLALSRDTSLRFLSFDSLEQLRLAGGTSGMVSRLRLSPQGIALSLGVSLQFLRWLRDTRYDRHYRSFAIPKRGGGKRWIESPRIFLKVTQRFVLHHILSGQPVHDTVHSFVPAVQAGELRNSITNARRHLAKPYVAKIDIKDFFGSLRGYLVDQAFQDTALLNADARRLLSSLCTRRNALPQGAPTSPMISNLILRRFDENMARLCSELDLVYTRYADDITISGAVREDVELAAWFARKGLTGEPLTLPVNEDKSRILSAGQQQRVTGVIVNERGLPPRRMRRRVRAMFHQAALDPARLREERARLGGYLAYFRAFPDYPSGELARYARVLAQK

SEQ ID NO: 6933 - protein, 499 aa, Catenovulum agarivorans
  source 1..499: note = Related to NZ_JH767528.1
MSLATIQIGCNFPPELNLDKDKTTVVYWIAAILQPSDKSTILTFLKSIQDHIWENISQDDITHSLNYLCKQQYLLKLSIGLTDYFSINPAKHIKLSINERLNKDRIRFFLLNCGKADKFQTVRRNCKIKVDGVPPSFEERLPIQLRVEIRGRRSQPIISSWVSLLESTLFTVSPSTTQLSPTHKSLSYPNYNFIDHIDADLSPHMTVRHILAADLGISVQLISRILANKTQYYRSFEIIRKNGNKRLIEAPRTYLKVLMRYINHHLLTGLAIHDSVHSYRQGKSFLTNAQIHVAKQYVFNLDIENYFGCINKRQVRELFSINDFTASAATLLSELCTFNDRLPQGAPTSPIISNAILFKIDQSMHRYCEKNNLCYTRYSDDITLSGNSRQSIVKAKSRLIAMIHGAGFKINDKKTRLMPYHKQQLVTGVVVNKEATPARNELRRIRAKFHQAACSSQLPYATRSQLLGYISYLSHFEKYRNSELLHKYSRIIENVSFVA

SEQ ID NO: 6934 - protein, 485 aa, Methylorubrum sp.
  source 1..485: note = Related to SRHQ01000067.1
MTVTLNRGFILWAVGVLQPVASGELLYYMEHVFENAGALPSENDLHSYLVEAANVGQLIRIMREPDLFSLTIQGNSYLSRSQRMSRDRERIFLLADAWNGRKLTSREEQTTESGGVSPPLLQRTTLEGTGANECGPSVPRGRTHWPRYSKQLTKTTGSSSSSRDTFINFLSFNDATQVNLARRASGRAIQPDAVNLALMIGLTPRLISQIIVRPDRHYRSFPIKKRTGGAREIHAPRVFLKTIQRFIVDYIFHVLPQHDAVHSFRNDRSILSNAQCHVGKQWVAGIDVENFFGSITERHINSHLSSIGLDAPSARTLAKLATLNGVLPQGAPTSPILSNSVLYNFDELMSAEAEKQSLVYTRYADDITISGSSIDCIRSLIACATLLLNDMYGLVINDKKTRVLSRRSRQVVTGVVVNDVALPPRDLRRRMRAASYNATKVEGVNVEALNMLRGYLGYFQEFPDLVDNKEFTDFRKNLGNIRARF

SEQ ID NO: 6935 - protein, 489 aa, unidentified
  source 1..489: note = Related to VXOZ01000123.1; note = Chloroflexi bacterium
MDSFIGHQTTLWAIGVLQPVSASELVDYFKALLDDAGDLPDSRELQRFCRDASKRGLVVRVRRRPDLFSLSLKGNRRLSREQRLLRDRARLLLLKETKKSRVHVSREVQATELGGASPSEDASSTSQGGSANKSRPLVPRGLACWPRLSKELLIRPSPASRDTPLDLLSFMTWAQVAIACGKTQEELTLDCHSIGMMLGVSPKLIQQLAWDPEHHYRSFEIPKRAGGLRTIDSPRVFLKVIQRFLADYILVHLPISSAVTSYRIRMSIQENARPHVGAEYVANSDIENFFGSIKHGPIVNLLMHNGLRASSAKLIGDLVTKNRSLPQGAPTSPPISNAFLYIFDEFMLSYCHTEKVSYSRYADDITISGNNRSAIEDALAMAKTKLLVEYGLRLNMAKTRIASKHGQQKVTGLVVNERISPPRVYRRRVRAIFHKARLNKQVNVEEFRRLRGYLSYLKSFDALRHSSEVQEHESTLSKLSIRSTNADTV

SEQ ID NO: 6936 - protein, 486 aa, unidentified
  source 1..486: note = Related to SSDV01000007.1; note = Sphingomonadales bacterium
MKTKLNTSNLLWVIGVLQPVSAEEITSYLATVFDDAGTMPKGTDIHKFCREQTDKKHLIRVAREPDLFSLTLLGNQYLSDDLRKSRDRSRIYLLKEAYKARLKMLRGVKATGLDGAAPSADVRPSKKGPEANKLGPVVPSGQAYWPRFSRQLSEQTGSLPTSRDTPLPFLSFANREQLAVAIRSKGEAGSINFTSLGLMLGISPKLIQQIAHHPDRHYRSFQLKKASGGMRNIESPRVFLKVIQRFFLDYILSDLPVDDNVYSFRKNYSIAHNAERHVGKQFVANIDIKNFFGSITSEKILSLLRKHGVEQRSAVLISALVTKEGILPQGAATSPLLSNSLLLEFDSRMSRLAENACANYSRYADDVTFSGNDRDVIANLIKTAEIELLHDYGLQLNKDKTRIATQRSQQKVTGLVVNEKVWPSRKFRRQIRAAFNNARKQEAVDKKRLEKLAGYLGYLRSFDVMKGSPDLVRYSSILASLTVAPD

SEQ ID NO: 6937 - protein, 480 aa, Burkholderia gladioli
  source 1..480: note = Related to NZ_LAVN01000001.1
MKNARINESLLLWAVGVIQPASPGEVIAFIERVTQSQFPPGVLEGVTAQCSHYVARGLLREVNKRRNWYSLTYEAELRIPKRLRRRRDRIRLFLLKGARAARMRAVGVPHTQKSVDVSSTSRTSGGEDIQEVPRPTKSFGRGERAQERFPWPRIFEQISDGSGSATGTPTHSDSSNATNPLAFYTFSGRHRAAADNPYPLNVRELGLAIGVSARLLTSIGKFPNRHYRRFQIPKANGTNRDIASPRIFLKTIQYWIKDYLLYRLPVHETCYSFISGVSIEDNAACHAGKNFVATIDIRDFFGSITLENVQTVMRRAGHTISLARIVAKLVTLDGSLPQGAPTSPIISNSYLFDFDRAMSMWCAKRGCSYTRYADDITISGETRSEVQRCVDHAEYRLNRYGLRLNEGKTRLQSRGARQVVTGLVVNELAQPSREQRRMVRAMLHRYQTGIMREPTDIARLRGWISYFHSFEHLREKFPRI

SEQ ID NO: 6938 - protein, 477 aa, Duganella sp.
  source 1..477: note = Related to QVIO01000003.1
MSHTRINESILLWAIGVIQPGSPAEAIEIIEKATKSKLPPGSAEGITLQCEHYVQRGLLRLVHKKKNWYSLTHLGDVSIPKVLRRRRDRIRLFLLKNTWQSRIADVGAPVMQKSVDVSSTMQNSGEYVQEVPRPTKSCNRGERGHERFRWPRIYEQMTKGSGSANGAPTPPVTPNPLTFYTFSGKHRGEIENPYPINARELSLAIGISARLITSIAKIPEKHYRRFKIPKANGSFRNIASPKLFLKVIQYWLKDYLLFRLPIHETCFSFIKNVSIEDNASPHTKMAYVGTIDIEDYFGSIKVTAVQSVLKRAGFTASASRIISKLVTLDDALPQGAPTSPIISNTFLFRFDEFISRWCKTHECTYTRYADDVTISGMNKSSVLQCIDRAEILLNRYGLKLNSKKTRIQSQSTRQVVTGLTVNELAQPSREQRRKVRAMLHNYQIGKLNDPKEIQRLRGWISYFRSFDHLKEIFQMPA

SEQ ID NO: 6939 - protein, 485 aa, Janthinobacterium sp.
  source 1..485: note = Related to PGES01000001.1
MSLPRINESLLLWAVGVIQPTSPLEIVQFIEYVTRGTVPPGTLEGIEQQCQHYTKRGLLRSVSTRHNWFSLTYAGDVSIPKEMRRRRDRMRLFLLKKCWQSRIHHVGVPRSQKLIDVSSISQHSGKDIQEVPRPTKSSNRGERGRERFRWPRIFEQIPIGSGSAIGTPTPPPPNTLTFFTFSAQHRSEAAGNPYPINAKELALGIGVSARLLTSIAKTPEKHYRKFQIPKADGSHRNIASPRLFLKILQYWIKDYILFRLPIHQSCYSFLPGVSIIDNATPHIGKNFVATIDIENFFGSITQQGVQSLIVRAGYTAALARIISKLATLDNTLPQGAPTSPIISNSYLFRFDQSISAWCARLGCTYTRYADDMTISGTDRVTVNNCLERATNLLNRYGLKLKSSKTRIQSRGGRQAVTGLVVNEIVQPPREQRRLIRSMIDRYRRDLLDPADLTKLRGWVSYFQSFHHLKNKYNYDEISDLEKDKI

SEQ ID NO: 6940 - protein, 519 aa, Geobacter sp.
  source 1..519: note = Related to VMKF01000002.1
MAIAINQNLLLWAVGTIQPANSDEVAGFISHVTQDSIPEDIPFFFRDQLRRLAIEGLVVQVSQREGLFSLTERGNDRLSSELRRLRDRIRLFLLKKAKNVRKAPLGDRQQMGGASPSGSEKILLKEVARPIRTTALPHGRTNWPRIGKQFLHRNVERSPSIPPTPTFPANRVRFYCTDGPFDGTTSEVNWLALAIGISPRLITSFIHKSEKHYRHFPIAKKNGGVRNIDAPRVFLKTVQHWILDYILVDLNSHAKCFSYRRGFSIEDNAAIHSQQGFVYNIDIENFFGSISTSAVNQTLTKQGIPPKLAKLLSYLCTFKGSLPQGAPTSPVISNSYLYDFDVFIDRICYQLGCNYSRYADDITISGNEFSKVGECIAAAEQQLRLFRLKINTAKRRVQSKNTRQLVTGLVVNTDPKPPRTYRRQIRAFFHQIKNVPNVDPKGQLCKMYGYYSYLSSFKALSENKELIGYRRQILEFKSIHFPIMHMHSKDMEELDLFTQPATITETDSFFELPAEPAPN

SEQ ID NO: 6941 - protein, 498 aa, Nitrosospira multiformis
  source 1..498: note = Related to FNKY01000001.1
MTVRVNSQLIMLSLGIIQPASPSAVAKFLSMSLLENSAPIEEQILMPLFEKWGAEGLIVRVHTKLKLFSLSSKGNHILTKEMRHLRDNTRLFLLKELRDGTLAPLGELGKEELTDASSVSLIDLVIQEEERPINPAVTLGKAQSDGRVYWPLLAKQLFVGSIPQSPSPRFRYGSFQSLDSCHMAHPYGAQENDFNLIDLSLCIGISPRLLSSFLYSSEHHYRLFDIAKKNGGTRTIRSPRVMLKTVQYWILDHLLHKLPIHDSCKSYRKGLSIFDNAKSHCDQNYVGNFDIKNFFPSITTTRLTNHFRLHGFPENASRLIAKLLTVNNELPQGAPTSPVVSNSYLFKFDEVVSNFSKNLELNYSRYADDVTISGAKRSDIHAVIAFSTNELARYELLLNPKKTRIAGRGSRQIVTGLVVNKVAQPPRTYRRQVRAMFDNAINNPEEFRSRLSELSGHLSYLGSFENLQNSQSIERYKETLKKLRTHLSVNNLYPSPQQ

SEQ ID NO: 6942 - protein, 487 aa, Janthinobacterium lividum
  source 1..487: note = Related to NZ_JAAOLY010000027.1
MAVRLNPQASLLSLGIVQPASPAEVANFIEQSLLKGKSKVDLNELTLLFERWKTDGLIQRVHARENLYSLSATGNHSLSKEMRHLRDKTRLFLLKDLRNGSIRLPEEAKSELADVSSASLNDLVSQEEQRPISALTPLRSTHRREPAYWPLLGKQLLVGSTVRSSGTRFRFGSFPSLKACHAAHKNGADGTDFNISDLALGIGISARLLSSFTHNARKHYREFEIPKKTGGVRRICAPRTMLKVVQYWILDHILYKLPVHSACYSFKEGVSIYDNAVVHLKSNYVGNFDIKDYFPSITMDMLKDFLITNGYGQIASNIISRLTTFEGSLPQGAPTSPLISNAFLSGFDEEISVYVAENGMQYTRYADDITISGADRGKILSAIEFATEKLKDLNFLLNEKKTRIAGRASRQVVTGLVVNEIVQPTRSYRRQVRAMFHHASKYPEEFQARTKQLGGHLAYLMSFENIRETAAISEYKRILVSITNPSP

SEQ ID NO: 6943 - protein, 499 aa, unidentified
  source 1..499: note = Related to PQGD01000012.1; note = Proposed Superficieibacter electus
MEESTNYKLLVWGLSVIQPATPNEVLNYLTSTLNDNGLLPDVEKMIHYFELLDQLGYIHQVSKRNNLYSLTPRGNERLTPALKRLRDKIRLFMLDNCHSISKLGVLASTDTENMGGDSPSLQLRHNLKEVPHPSLSWAAGTLPSSPRQAWVRIYEQLNIGSMSSDEASTPTTARNAPLSFVGRLGFSLNYYSFNKIDEPLFNNDGVTAIASCIGISPGLITAMVKSPKRYYRTFNLRKKSGGFRSILAPRKFIKTIQYWLKDHVLNRLKIHSSCYSYRSGVSIKDNAINHVKKKFVASIDISDYFGSINKKMVKDCFYKNNIPDHIVNTISGIVTYNDVLPQGAPTSPIISNAILFEFDEEMTAHALTLDCIYTRYSDDISISSDYKENIAILINIAEANLLSAGFTLNRQKQRIASDNSRQVVTGILVNESIRPTRCYRKKIRSAFDHALKEQDGSQLTINKLRGYLNYLKSFETYGFKFNEKKYKETLDFLIALKQS

SEQ ID NO: 6944 - protein, 353 aa, Cronobacter sakazakii
  source 1..353: note = Related to NITF01000014.1
RQAWVRIYEQLNIGSMSSDEASTPTTARNAPLSFVGRLGFSLNYYSFNKIDEPLFNNDGVTAIASCIGISPGLITAMVKSPKRYYRTFNLRKKSGGFRPILAPRKFIKTIQYWLKDHVLNRLKIHSSCYSYRSGVSIKDNAINHVKKKFVASIDISDYFGSINKKMVKDCFYKNNIPDHIVNTISGIVTYNDVLPQGAPTSPIISNAILFEFDEEMTAHALTLDCIYTRYSDDISISSDYKENIAILINIAETNLLSAGFTLNRQKQRIASDNSRQVVTGILVNESIRPTRCYRKKIRSAFDHALKEQDGSQLTINKLRGYLNYLKSFETYGFKFNEKKYKETLDFLITLKQS

SEQ ID NO: 6945 - protein, 499 aa, Serratia marcescens
  source 1..499: note = Related to DACSPQ010000008.1
MEESTNYKLLLWGLSVIQPATPNEVLNYLTSTLNDNGLLPEVERMVHYFELLEQHGYMHQVSRRNNLYSLTPRGNERLTPTLKRLRDKIRLFMLDNCHSISKLGMLASTDTENMDGDSPSLQLRHNSKEVPHPSLPWAAGALPSSPRQAWVRIYEQLKIGSMSSNEASTPPKRKISSLPSIGRLGFSLNYYSFNTLDDHLFNNDGVTAIASCIGISPGLLTTMIKSPKRYYRTFNLQKKSGGFRPILAPRKFIKTIQYWINDHVLNRLKIHSSCYSYRKGVSVKDNAINHVGKAFVASIDISDYFGSINTKMIKSCFYKNNIPEHVINAISGIVTYNDVLPQGAPTSPIISNAILFEFDAEMTYLALRHNSIYTRYSDDISISSDKKENIDELIRVAEANLLSVGFKLNENKRRVVSRNNRQVVTGILVNESIRPTRTYRKKIRSAFDHALKENDNNQLTINKLRGYLNYLKSFESYGFSFNEKKYKDILDFLLTLQQR

SEQ ID NO: 6946 - protein, 717 aa, Klebsiella oxytoca
  source 1..717: note = Related to LS483483.1
MPGNKGELINIRNKGDGNTFNIIQINGGNAPDISKQLGFLGLDIIDNTKKSLVSEFSSGNNNVLLCYPNKEDKILEPIIEKIKAGLSNIGANIFEGSGKTQLPDVQGYPHIAEIDFIKNLKCDSIIIFVLDELTLSQLTLLSYYKIESNIQHVDIIAIPSDSIFNYDKFLSNGLIQYCDDNNCKVIKLSTLDDAEVERVIARVKNRKMIQARRGIMLTKADAYDFNHKLFIWALSVIQPASPYEVISYLSIILNDNGVLPAKDKINEYFKALASSEYINQVSKKNNLYSISLNGNEQLSPELKKLRDKLRIYLLDKTRVVSKVKVLASTESKKMGGASPSSQLRFVLKDAPHPSVPWALGALPNHPRNTWVRIAEQINFGSMLSEASNTETHVNQTQHTIFPLNYGSYNSIDYNLIGNTGPTILASLIGVSPHLIAIMSMNPDKYYRSFKLNKKSGGHREILAPRKFMKVIQYWITDYFLFRLKIHASCYSYRKGVSIKDNAINHLNNEFIANIDVIDFFGTINKDMVQKCLIKNKIDIKLATAITEIVTFKGFLPQGAPSSPQISNAILFDFDNKISEACYVIGCVYTRYADDITISGSNRNNVIKMVKSAMQWLNESGFSVNDKKTRISSKNSRQIVTGILVNDVIRPTRKYRKRVRAAFDHALKDNDHSKETIYKLSGHLNYLKSFQQYGYEVNTIQYELILKYLKRKNILIKI

SEQ ID NO: 6947 - protein, 496 aa, Escherichia coli
  source 1..496: note = Related to MOFU01000029.1
MLTKADSYDFNHELFLWALSVIQPASPLEVISYLSIVLKDNGLLLTKDKTSEYFKALANEGYINQVSRKNNLYSISLNGNEQLTPELKKLRDKLRIYLLDKTRVISKVKGLASTESKKMGGASPSLQLRFVLKEVPHPSVPXXRNTWVRIAEQINFGSMLGEASNADTPPQKVQHAIFPLNYGSYNSIDYNLIGNTGPTILASLIGVSPHLIAIMSMTPDKYYRSFKLNKKSGGYREILAPRKFMKVIQYWITDYFLFLLNTHASCYSYRKGVSIKDNAINHLNNDFIANIDIIDYFGTINKDMVQNCLIKNKIDIKLATAITDIVTYKGTLPQGAPSSPQISNAILFDFDNEISEACYLTGCVYTRYSDDITISGSIRKDVVKMVELATHLLNEFGFSINNKKTRIASTNSRQVVTGILVNDVIRPTRKYRKRVRSAFDHAIKDNDCSKETIYKLSGYLNYLKSFQQYGYEVNTIQYELILKYLRRKGIYNNHCI

SEQ ID NO: 6948 - protein, 498 aa, Klebsiella pneumoniae
  source 1..498: note = Related to AP021929.1
MEVNTNFRLLLWGVSIIQPSSPDEVLGYLKAVLNDDGLLPEIEVMEDYFDKLKKIGYIEQVSKRNNLFSITPQGNEKLPPRLKKLRDKIRIFLLDKCYIQSKLERLASTETEKMSGDSPFLTLRHILKEVPHPSLPWATGTLPSRPRQAWVRIYEQLKIGSTFGDEASTSITDTSPSEVKKNILSLNFYSFNNLEHNYFNNNGVTIISSCIGVSPGLLTSMIKSPEKYYRPFELTKKNGKKREILAPRKFIKVTQYWIADHLLNRLKIHSSCFSYRKGVGIKDNAYNHVGMKFVANIDITDYFGTINKTMIKKCLLDNKIPISIVEVISGLITYYGYLPQGAPTSPIISNAILHDFDESMCESALHFDCVYTRYSDDITVSGNSREKVFLLTRVAAKLLERRGFSINEEKTRILSTNNRQVVTGILVNESLRPTRKYRRNVRAAFDQAIKTMDTSDDTLNSLKGHLNYLNSFKQYGFKFDHEKYQLIINELIKNKDIN

SEQ ID NO: 6949 - protein, 486 aa, Serratia ureilytica
  source 1..486: note = Related to NZ_JADTXJ010000009.1
MLLWANSIIQPASPFEISQYLKIILADDGALPDLEYLKQYFKELQKNGYVEVVSIKNELYSLTPAGEDKLSANLKKLRDKLRIFLLDKCRESSKLETLASTETKNMGGEPPSLQLRPYIKEVPHPSLSWASGTLPSRPRQAWVRIFEQLRIGSMSSSQASAFSKNTGLFTPEKKYVAAPLFYSFKSLNNPLFDNNGVLTIASCLGLTPRLISSMIKSPERYYRFFEMKKNNGGVRKISAPRKFLKVTQYWINDYFLNRLKIHSSCFSYRKGVSIRDNAYPHQNSKFVANIDIENYFGSINKTMIKGCLLRNNISEHLVNTIAGLTTLFGTLPQGAPTSPNISNAILHDFDEIMTGHAIVRRCVYTRYSDDITISGNEKHLVEELVGLAGNKINAIGFALNNSKYRLLSYNNRQTVTGILINGHLRPTRKYRRKVRAIFDQALKSNDRNPLTLSTLMGHLNYLQSFKKYGFRFEEEKYLFIIHKLKN

SEQ ID NO: 6950 - protein, 494 aa, Enterobacter cancerogenus
  source 1..494: note = Related to NZ_CP045769.1
MSNSINFRLLLWANSIIQPASPLETLNYLKLLLADGETLPDIESIRLYFRELQKIGYLEVVSIKNELYSVTPAGEDKLTANLKKLRDKLRIFLLDKCHESTKLETLASTDTKNMGGESPSLQLRPYIKEVPHPSLSWASGTLPSRPRQAWVRIFEQLRIGSMSSSKASSFSNSIEFLNTEKKHIAAPLFYSYKSLNNPLFENNGILTIASCLGLTPRLISSMIKNPEKYYRFYEMNKKNGGVRKISAPRKFLKVTQYWINDYFLNRLKIHSSCFSYRKGVSIHDNAYPHQDSKFIANIDIENYFDSINKTMIKNCLLRCNISENLVNAISGLTTLYGTLPQGAPTSPSISNAILHDFDEAMTNQALVRNCVYTRYSDDITISGNKRYLVEELVGLARNKINNLGFTLNNSKYRLLSYNNRQAVTGILVNGPLRPTRAYRRKVRAIFDQALKSNDRNPLTLSTLKGHFNYLKSFKKFGFSFEEDKYLSILDKLSK

SEQ ID NO: 6951 - protein, 495 aa, Enterobacter sp.
  source 1..495: note = Related to NZ_CP087390.1
MSNSINFRLLLWATSIIQPAAPSEILYYLRLILTDDGALPNIDSLKQHLKELHKIGYVELVSIKNELYSITPSGDEKLSANLKKLRDKLRIFLLDKCHKSTKLGVLASTDTKNMDGAPPSLQLRPYIKEVPHPSLSWASGTLPSRPRQAWVRIFEQLRIGSMSSSQASILSKDSDSLIPEKKIIAAPIFYSYKSLNSPLFENNGILTVASCIGLTPRLISSMIKNPDRYYRIFDMRKKSGGVRKISAPRKFMKVTQYWINDYFLNRLNIHSSCFSYRKGISIHDNAYPHQNNKFIANIDIENYFGSINKTMIKNCLLRNNISEHIVNTIAGLTTLYGTLPQGAPTSPNISNAILFEFDELMTNQALVRDCVYTRYSDDITISGDNRHLIEELVSLAKNKINSMGFTLNNAKYRLLSYNNRQAVTGILINGPLRPPRAYRRRVRAIFDQAIKSNDQTSLTINALKGHLNYLQSFKKYGFSFEETKYSLIIEKLTKK

SEQ ID NO: 6952 - protein, 497 aa, Escherichia coli
  source 1..497: note = Related to NZ_NRWV01000070.1
MSNSINFRLLLWATSIIQPATSAEILYYLKLVLADDGALPDVESLKQHLKELKKHGYVEIVSVKKELYSLTPAGDEKLSANLRQLRDKLRIFLLDKCYKSTKFGLLASTDTKNTGGESPSLQLRPYIKEVPHPSLPWASGTLPSRPRQAWVRIFEQLRIGSMSSSQASTLSEDSNNHNFGDSFVAAPTFYSYKSLNHPAFENNGVLTIASCIGLTPRLISSMIKNPERYYRVFEIPKKSGGARKISAPRKFMKVTQYWINDYLLNRLKIHSSCFSYRKGTSIHDNAYQHRNNDFIANIDIENYFGSINKTMIKNCLLRNNLSEHIVNTIAGLTTLYGTLPQGAPTSPNISNAILYDFDETMANQAKARGCVYTRYSDDITISGNDRYSVEELVGIAKNKIFSLGFKINESKYRLLSYNNRQLVTGILINGPLRPPRLYRKKVRAIFDQALKSNDCRTSTLNTLKGHLNYLLSFKVYGFEFDEEKYQLIIDKLTKEVH

SEQ ID NO: 6953 - protein, 495 aa, Pantoea sp.
  source 1..495: note = Related to JACVBT010000006.1
MTISINFRLLLWATSIIQPANANEILSYLKLVLKDDDALPDEASIKKYLKELREIGYLELTSVKGELYSITPIGDEKLTANLRQLRDKLRIFMLDKCYKYSKLMLLASTDTKNMGGDSPSLQLRHDLKEVPHPGLSWASGTLPSRPRQAWVRIFEQLQIGSMSSSQASNLKDDSQNPPSSFSFTPAPTFYSYKSLNNPLFEENGVLTIASCLGLTPRLISSMIKNQEKYYREFDLSKKSGGIRKISAPRKFMKVTQYWLNDYLLNRLKVHSACFSYRKGVSIHDNALQHVDKKFVANIDIENYFGSINKTMIKSCLLRNNFSEHLVNTIAGLTTLYGTLPQGAPTSPNISNAILYEFDQTMANQAMVRKCVYTRYSDDITISGDSKSAVKELINLARLKISSLGFNLNDHKFRLLSYNNRQLVTGVLINGALRPPRKYRRKVRAIFDKALKTNDTSLLTINTLKGHFNYLSTFKEYGFKFEEEKYLSIINYLQKK

SEQ ID NO: 6954 - protein, 477 aa, Aeromonas sp.
  source 1..477: note = Related to NZ_CP038513.1
MANLVNLKTYLWALATIQPASPQEAHAFLKIVTNIEPDIYTEEDLNDAINRSMKLELIECVSKKHNIYTLTIKGGDFLGKKLRLLRDKNRLFLLKTVKDASLKIKDSPEQNKASVSSATMFRSTVKVAPWPENSLVSGPLPQNQRVFWPRVSEQLRIGSNAGGSFLNLNYYSKNKLPNINDDFSAVDLFSELIGISPRLLSSFIKAPSRHYRTFTLQKKSGRGHRTINSPRVFIKTVQYWICDYFLYKLNQHELCFSFRKNLSIKDNARIHLGSRYILCLDIDSFFDNIKTEHVHSCLIENGFSEDISSFISRVVTLDGCLPQGAPTSPIISNSYLYNFDKVISDFCGQNGMTYSRYADDLTIGSTDYTQLKSCIPLISKQLAKFELKINERKTRIISNNNAQIVTGVCINNERLRPSRKFKKEVRAAFNNAKLNNDKSSLPRLYGYLNYLSSFDNGDTPHNISEYKSIIDSIKKAL

SEQ ID NO: 6955 - protein, 477 aa, Aeromonas veronii
  source 1..477: note = Related to NZ_CP033604.1
MASLVNLKTYLWSLATIQPASPEEAHAFLKLVTKVESDIYTCEDLNEAILRAIKLNLIECVSKKHNLYSLTVKGGDFLGKTLRLLRDKNRLFLLKSVRDANLKIKESPEQNMVSASSTITFRSTLKVAPWPENSLVSGPLPQNQRVFWPRVSEQLKIGSNSGDSFLKLNYYSKNRLPEINENFSPVDLLSELIGISPRLLSSFIKAPSNHYRTFTIEKKSGRGHRKISSPRVFIKTVQYWIYDYFLYKLNQHECCFSFRKNLSIKDNAKVHLGKKYILCLDIDSFFDNIKTADVNSCLIRNGIPSDISSIISGIVTLNGSLPQGAPTSPIISNAYLYEFDQKMYEFCVRNGMTYSRYADDLTIGSTDYTQLKSCIIFISEQLTKLELTINERKTRIISNNNAQVITGVCINNEQLRPSRKFRKEVRAAFHNAKLNNDKGSLPRLYGYLNYLSSFDSGDTPHNISEYKSIIDRIKKAL

SEQ ID NO: 6956 - protein, 483 aa, Vibrio panuliri
  source 1..483: note = Related to NZ_AP019654.1
MANLVNLKTYLWALGTIQPASANEAHQFIKLMTNVTSDVYSESDLDDAIKRSLSLGYIENVSKKNELYILTAKGGEFLGKNLRLLRDKNRLFLLKSIRSATFQSKDSPEQDVAGVSPPKVFRSSLKAAPWPENSLSPGALPQTQRVFWPRVSEQLQIGSISGESLPSIKLNFYSKNKLSDINDNTTAIDALSESIGISPRLLSSFIKAPSSHYRTFSLQKKSSSGTRIINSPRAFIKTVQYWLHDYFLFRLKLHDCCFSFRQKVSIKDNAKVHLNSNFILCLDIESFFDNITTENVYSCLVRNKIDENIASVIAGITTLDNSLPQGAPTSPIISNAYLYDFDQSMLELCAKNKMTYSRYADDLTFGSNDYMSLKDLIPTIAESLRSYRLRINKKKTRIISSNNSQVITGVSINNGVLRPSRKLRKEIRVAFYQAKTNKNVDALPKLYGYINYLKSFEDGDTDYNLELYQGTIDELKGITKQSR

SEQ ID NO: 6957 - protein, 493 aa, unidentified
  source 1..493: note = Related to PIZK01000029.1; note = Alteromonadales bacterium alter-6D02
MLGENSMSSELNLKAFIWGLGVIQPATPEEVQNFILQVLLKQSNKEFDMQITAQKLLDEDYIRCVSKKNKLYSITHEGDEFLGNKLRALKDKERLYLLKSTRDVNFSGKGASERNSGGASPLKQASSSTKVSPRPEISLSPGPQPQIQRNLWPRVYLQLNIGSKPEAPLNSINLNFYSANSIPSKFDNLDHAILTTSELIGVSSYLLKDFCSNTQKYYRYFEIPKKSGKGVRVICAPRAFLKTVQYWILDYFLLRLKQHESCYSYRKNKSIKDNANAHINKKFILCMDIESFFDNISIKQVVQCFTENSISPHLAILFAKLVTLNGSLPQGAPTSPIISNSHLYEFDDYISKYCAENSLSYSRYADDLTIGSDDYDALKKMEKLITEELGSFGLIINKGKTRIISFNSCQIVTGVAINNGELRPTRKHRKEVRALFHRAEIERSVELLPKLYGHLNYLKSFRNGDSPKNIQKYQSIIDRLKLLRNIEGFGSET

SEQ ID NO: 6958 - protein, 483 aa, Alteromonas macleodii
  source 1..483: note = Related to MBSN01000054.1
MSSELNLKTFIWALGVIQPATPNEVQNFITHMLLKQSNKEFDIETTVKKLINECLIRCVSKRNKLYSITHEGDEFLGNKLRALKDKERLYLLKSVRDVTFVGKGASERNTGGASPLKQARSSTKVSPRPEIPLPSGPLPQNQRNFWPRVYWQLNIGSKPEAPLTSTHLNFYSANSIPRKFDSMADAIIKISELVGVSSYLLKDFCNNTEKYYRDFEIPKKSGKGVRVICAPRAFLKTVQYWILDYFLIRLKEHESCYSYRKNKSIKDNASVHLNRKFILCMDIESFFDNISVKQVAKCFVENKIEPHLAALFANIVTFNGTLPQGAPTSPVISNSHLYEFDELISKYCVDNNLSYSRYADDLTIGSDDYDSLKKVETLISEKLSSYTLKLNKKKTRIVSSNSCQIVTGVAINNGELRPSRKHRKAVRALFHKAEVEKSVELLPKLYGHLNYLKSFNNGDTPKNIQKYQSIIDKLNNHKNIGSF

SEQ ID NO: 6959 - protein, 484 aa, Paraglaciecola hydrolytica
  source 1..484: note = Related to NZ_LSNE01000017.1
MIDVMNSKVFVWALGVIQPAKPEEVLDYLLKVFASEKQKDFKVEIGPTLSIVLEQGLVHCVSKKNNLYSVKHAGDDFLGNKLRVLKDKERLYLLKSMRDVNFLSKGASERNMGGVSPPGRLRSSTKVSPRPEVPLSLGPLPQNQRNFWPRVYQQLGIGSKTEAPLQPINLNFYSVNTLPEIKSRSEAIFAASELIGVSSYLLRDFCNSKEKYYRKFEIAKKSSNESRVINAPRVFIKTTQYWIQDYFFYRLRQHDSCFSYRKKVSIKNNASVHLNKKFILCLDIESFFDNITKMQVISCIAKSKVNVHLAELFADIVTLNGCLPQGAPTSPIISNSHLYEFDEKIFEYCSSAGMSYSRYADDLTIGANKYDSLKTLEKVVKTELETLGLSINRKKTRIISSNSCQVITGLAINNGEIRPTRKYRKEIRALFYKADDAIDIELLPKLCGHLNYIKSFKNGDTKKNIEKYQLIIDKLKKSKNIQTF

SEQ ID NO: 6960 - protein, 479 aa, Vibrio parahaemolyticus
  source 1..479: note = Related to NZ_MISS01000101.1
MESTINLKAYLWALGVIQPANPEEVHDFLKFMNNNTNDIYSSSDIDDAVAFSLEHKLIEIVSKKNNLFVLSLNGSEFLGKKLKLLRDKNRLLLLKSLRNDSLDREESPEQKMDGVPPSSMFRLSLKDAPRPEESLSSGPLPQSQRFFWPRVSEQLQIGSNSGDSSTRIRLNYYSRNKIPANTEQSAYECLAELIGVSPRLLSSMAKSPKKHYRTFTMAKKSGGTRLISAPRAFIKTIQYWITDYFLYRLKTHERCFSYKKGLSIKDNARLHLNKKYILCLDIESFFDNINQKDVINLLINSGIENKLSIAMSFLLTLNNTLPQGAPSSPLISNAHLFDFDKKITEIANNSNVTYTRYADDLTFSCDQKSTLEKIKVIVNEKLNEIGLNIKNDKTRILSEHNSQIITGIAVNNNNLRPSRKFRKKVRVLFYQAKINNDVSQIPTLRGYLTYLKSFENGDTPENYKSYEGTINYLQKIQKA

SEQ ID NO: 6961 - protein, 487 aa, Vibrio crassostreae
  source 1..487: note = Related to VIVA01000006.1
MMASPMNSAINIKAYLWALGVIQPATPEEIHNFLKFINRSEEEIYDADTISDTIKYSIDNGLIETVSKKNELYVLSLVGGEFLGKKLRLLRDKNRLLLLKSLRNDSFKKEGFPVQEMVGVSPSETQRLSLKAAPRPEESLSPGPLPQNQRFFWPRVSEQLKIGSTSGNPSPSIRLNYYSRNKISNNSNVTTIDSLAELIGISPRLLSSIVKSPEQHYRAFSMQKKSGGLRSINAPRAFLKTIQYWINDYFLYRLKIHSNCISYRKKVSIRDNAAIHLNKDYVLCMDIDSFFDNIKTNGVYTLLVNSGIDESLSRTISFLTTLNNKLPQGAPSSPLISNAYLYDFDSKIHDLCSKMGICYSRYSDDLTFSGDNKEKLEALVPEIIEQLDCFNLKIKKSKTRIRSRNSNQMITGISINNGILRPSRKFRKKIRAAFFKARSNNNIGAISTLTGYLNYLKSFEAGDTEYNISEYQKTIEHLKALKNSIKT

SEQ ID NO: 6962 - protein, 482 aa, Vibrio parahaemolyticus
  source 1..482: note = Related to JACBTA010000009.1
MENIINVKAYLWALGVVQPASPTEVHDFLKYINRSEKEIYDESSIKEVIEYALNNHFIEKVSKKNNLFILSSYGAEFLGKRLRLLRDKNRLLLLKALRNDILKKEGLFEQNLDGDSPSPMFRSTSKVAPRPEESLSPGPLPQNQRFFWPRVSEQLKIGSFSEGPSNFHPINLNYYSKNKLDSASNLSPVNVLSELIGISPRLISSMVKSQDKHYRTFSMPKKSGGYRKINSPRAFLKTVQYWIGDYFLYRLVNHENCFSYKKGVSVKDNASVHLGKKYILCMDIDSYFDCINVHSVFKLFVRSGIDEGLSDLMSKLVTLNGTLPQGSPVSPLISNSYLYDFDVFISDFCSSYNITYSRYSDDLTFGGDDKSDLEAIIGIVKKSLSEFNLNIKDNKTRLLSENNTQIVTGVAINNGVLRPSRRFRKTVRAIFHNALVTESVGSILMLSGYLHYLKSFESGETPHNIKAYEDIIEKLKSKYVSV

SEQ ID NO: 6963 - protein, 483 aa, Aeromonas media
  source 1..483: note = Related to CP038441.1
MDENFNPRPFLWAIGMAQPTTLDYAHAFLKKVTQSESDLLTIEEINNFSKFALDAGLIEVVSKKNKLYSLTNEGGVFIGKGLRLLRDKNRLLLLKSFRRAKLTQESSPTGNLAGAAPVVRNSSALKAAPRPEVSLASGPLPQNQRNFWPRVSEQFNIGLIVGELSPSINLNFYSRNSFPEVSDSISAIDALSLCIGVSPRLIGSMCHAQSNHYRTFTLMKKSGGTRTINSPRAFLKTVQYWIKDYLIYKLPVHDACFSYRKGLSVKNNACVHLNKKYILCVDIDNYFGSIKTEFIHAMLHKFDFSMELSEVLSQLMTLDGSLPQGAPTSPDISNSFLYDFDVTVSDWCSAHNVSYSRYSDDLTFGLDSIDIIGDLKDFVINSLLRLGLRLKEEKTRVMSCNNRQMITGVVINNGTPRPSRKFRKMVRAAFFNAQDLGDVSSIKKLRGYLNYLSSFEGGDTSENIAKYSKIISSLEEIKIKMTN

SEQ ID NO: 6964 - protein, 486 aa, Marinibactrum sp.
  source 1..486: note = Related to JAJSLX010000004.1
MALTINKDIIVWGLSVIQPASISELRGFLCAVTQDENVVPDGDYLAVTVKELILIHNVLKVATKPARYSVTHKGGIRLTKKLRYLRDRMRLFLLKDSAYGRFHLSSDVLDQNLDDASSSSSIGLKYQDAQRSNSFLAADQKAIWPLVSEQFQIGSTSASDDKNTPTYADLDCYSFDSAYFEGSLKNTSDLSEAIGVSIRLITSICKKKEKHYRSFEIPKKRGGTRPIDSPRTFLKVIQKWINDYFIYDLKQSNYCYSYKKGVSIKSHAQCHEKQNYVACVDIEDFYGSLTKDHIYNLLLKNNKAHSIAKVVSDLCTFNNKLPQGAPTSPILSNAFLYDLDNYLVSECEGLNVTYSRFADDITISSDSKENLIRLISMIKNCLRSLGLSLKDSKTRILHKSQKQLVTGLVVNEIAKPARTYRRRIRAIFHKAKLYPDSFKGKEKVLQGYLSYLSSYNCLSSDTQSDYKQTILNIKNLTSSSNRDKNS

SEQ ID NO: 6965 - protein, 475 aa, Rahnella variigena
  source 1..475: note = Related to NSDJ01000001.1
MTVSIRRDILTWAVAVIQPATISDIYNFLTTVLKDKDAIPSRDAIMIEVLALIELNDIARVSQKPTRYSITAKGNNRLNKRLRHLRDRMRLFLLKNAYRGSLKKPSAIFDEETNDVSSFIRKAVEIKDAQRPNSSLVADQTAVWSLVSEQFSIGPNEVADGVLLIPTFYSFDANYFDGELRSIVDLSEAIGISIRLITSIVKNKQKHYRTFTVIKKSGGERVIDAPRTFLKVIQRWLSDFLLDKLPVHDFCFSYKKGQSIRNNAQIHVGKKFVLNIDIKDFFGSITKKMICITLIESGFEHKLAKIVSELCTYNDRLPQGAPSSPILSNSILYKMDCFLTEQGALFDYNYSRYADDITISSNDRLTMELGRETIFRCLNESGFDINGGKTRVAATNSRQIVTGLVVNKRVQPTRVYRRKVRAMFDYAKKNPDSFTDKYSMLTGCFYYLMSFGCIGHSKINEYKNTLSLLREISKR

SEQ ID NO: 6966 - protein, 498 aa, unidentified
  source 1..498: note = Related to QBMB01000082.1; note = Burkholderiales bacterium
MSVFINTRLIRLGLGCIQPASAEDVSKFLAQTLGTEGAPIPPESIQSIFDDWASQQDVVCVHQRQHLYSLTRKGDNALDLRERRLRDKTRLFLIKELRAATLKRPEAEEPEKADDSSAVAIDSATQGERPKGAAANPRAAPGVGRAFWPLLSKQLFVGSSPQASGLRFRFFSFPSILDCCKAAGGTSIPEDGVGVNEISLALGISPSLLKSFLARPEHHYRVFEIPKANGKMRQINAPRTMLKVLQYFFVDYLLDRLAVHPAATAYWRGSSVRKNAERHARQRYVANIDVTNFFPSLSTGFVIRSLCAAGLKPDTAALVARLSSYKGGLPQGAPTSAALSNIVMYGFDKKLSEACASLGVNYTRYADDMTFSGLELGAIQQSIKLANESLAEIRLKINDEKTRIYGPSTRQVVTGVVVNDWPQPSRVERRRLRAELHHAKLSPATFVAKYQQLQGRAAYVLSYAGEERPVGALSRGYVEEALFDVRRLHRLMSQTGGA

SEQ ID NO: 6967 - protein, 495 aa, Hydrogenophaga sp.
  source 1..495: note = Related to NZ_SCML01000017.1
MSVNVNTRLIRLGLGCIQPASADDVSKFLALSLEVEEEPISPEAIQIILDEWSSQKDVVCVHLRQRLYSLTRQGDGRLTPKERHLRDKTRLFLLKELRAATLRRPEAEEPEKADVSSAVFIDSATQEERPKGAAANPRVAPGAGRAFWPLLAKQLFVGSSPSASGLRFRFCSFPTISDCCKAAGDDSIPADGIGINEISLGLGISPGLLTSFLARPERYYRVFEIPKANGKSRQIQAPRTMIKVLQYFFLDYLLNWLEAHPTATAYSRGSSIRKNAQVHTEKKYVANIDVSNFFPSLTIGIVAKSLVAAGLSSNTAVLVARLSSYKGGLPQGAPTSAALSNIVMREFDASVSESCNSLGVSYTRYADDMTFSGMELDGVKQAICFAKERLTEMRLTLNDQKTRIFGPGTRQVVTGVVVNDWPQPSRVDRRRLRAELHQAKISPANSVAKYQQLLGRAAYMLSYAREERPVGAISRAYVEDALAGVKMLRHFTHNE

SEQ ID NO: 6968 - protein, 516 aa, unidentified
  source 1..516: note = Related to JAFLDL010000015.1; note = Candidatus Accumulibacter sp.
MSVGVNQSFVRLALGCIQPASAEQIAAFISSSLPTGAHPLHAEKIREVLDGWASSGDILCVHKRYLLYSLTRQGDGKLSAPERKVRDRTRMFLLKDLRSASLRASEVWGIEQADDSSAVSHGMAVQEDERPIGAAVSPRRRDGRAYWPLLSKQLLVGSSSPSSDTRFRFLSFSSVRSCSQACGYADIPEGGIGLNEISLALGVSPRIVGLLLRRPESHYRVFQIPKAGGGLREIHAPRTFMKVTQHFILDYLLRRLKVHPAATAYSIGCSIRHNAEIHVRRRYVANIDVTNFFGSLSTSVVYDRLIAVGLMKNTAAFIARISSFMGGLPQGAPTSAALSNICLYAADDVLQAESTVRQVTYSRYADDITFSGDDLGAVQACMAIARRELSALGLTLNTDKTRVFGPSSRQVVTGVVVNEHAQPARKERRRLRAMLHHAGTAPDEFVAQFDILQGKSSYMLSYSTPERGIGALPEKYVEDALAAVRAARKKGLPAADESSLSSAPFDNENRGRDAIS

SEQ ID NO: 6969 - protein, 490 aa, unidentified
  source 1..490: note = Related to PBZA01000066.1; note = Sutterellaceae bacterium
MTVRVYPQLIRLALATIQPASAETVVRFVQSALDSQEQLLDLSEVQKLIENWEELADVVCVHKRYQLYSLTKRGANKLSKTERQLRDKTRLFLLKELCVSKLKSPEVQETEKADASSAVVIEPVLQEDKRPISPAVPPRPARSSGRGYWPLLSKQLFVGSSTLTSGPRLRFLSFQSEKSCVLACGTKDSSEFGIGVNEIALSLGISPGLLTSMQHKPEKHYRTFEIPKSNGKPRLITAPRTMMKVVQYFFLDYVLRSLPVHTSATAYQRGCSIRQNALQHLRQRYVANIDVSDFFPSLTTAVVTQKLVEGGLKINTALLVAKLCSYDDGLPQGAPTSAAISNIVLFDFDTAMSEYAGLHGLTYTRYADDISISGSEKSEIEKAISVAQKLLSGIGLKLNDSKTRIFGPSSRKVVTGVVVNEWAQPSRKQRRNLRAALHQASLHPERYVDKYHQLQGKAAYMLSFATPEHSVGGLSSEFVHNAIAEIKKRI

SEQ ID NO: 6970 - protein, 506 aa, Pseudomonas stutzeri
  source 1..506: note = Related to NZ_AJXE01000028.1
MAIMINSRIVRLALGCIQPADANAVIAFLMKAFKYDTNLISESAIQEIFDQWSTDGEVACVHKKSKLYSLTRLGDSRLNREERRLRDRTRLFLLKELRSAKLHLPEAGEPEKADVSSAVIVDQPVQEDERPTGAARPPRVARRAARACWPLLAKQLFVGSSSRASGPFFRFLSFPTVKACAQANGLAEIPQDGIDISEISLAIGISPQLIGLLIHRPERHYRTFEIPKANGKVREIQSPRTMMKVVQYFLLDYLLYKLPVHVSATAYSRGCTVKANAAPHVGKKYVANIDVEDFFPSIKWQLVHKMLALGGLEDKTAYLIARMTSYQGGLPQGAPTSAHLSNVVLYPFDKEMSGFCESVDVNYTRYADDITFSGSDKNVVWSAVERARQLLTDLGLEINKEKTRVFGPSSRQVVTGVVVNKWAQPSREKRRKLRAELHQAKMNPEKYAARADEIRGMSAYMLSFASEERAVGGLSRGYVESSLAKLTEYINEMKAKESAIAPPSAP

SEQ ID NO: 6971 - protein, 506 aa, Pseudomonas sp.
  source 1..506: note = Related to JAAQXA010000034.1
MAININQRIVRLALGCIQPADAGAVIKFLSKAFNYNTGYFPEGSIQDIFDEWASDGDIINVHKRTKLYSLTRQGDSRLNREERRLRDRTRLFLLKEMRSAKLHLPEAGEPEKADVSSAVIVDPPLQEDERPTGAARPPRVARRAGRACWPPLGKQLFVGSSSRASGPYFRFLSFPTIKACAQANGLDEIPKDGIDIGEISLAMGISPQLIGLLIHKPERHYRTFEIPKANGKVRAIQSPRTMMKMVQYFILDYLLYKLPVHISATAYSRGCTVRANAEVHVRKKYVANIDVENFFPSIKWQLVQKVLVMGGLEDKTAYLISRLTSYQGGLPQGAPTSAHLSNVVLYPFDNEISNFCESVGVSYTRYADDITFSGDDKDSVRSAVEKSTKLLSLLKLEINKDKTRIFGPSSRQVVTGVVVNEWAQPSREKRRKLRAELYQAKLNPGKYASRADELQGMSAYMLSFAGENRPVGGLSQGYVESSLARLTAYINAMKEQESSTVPPSAP

SEQ ID NO: 6972 - protein, 495 aa, Pseudomonas izuensis
  source 1..495: note = Related to NZ_WTFT01000007.1
MAIIVNVQLVRLALGCIQPADANSVSKFLGASLIGDDNLLSPSVIQTVFDGWIADGDVVSVHKKSQLYSLTRQGDKKLNPKERKVRDRTRLFLLKNLRAAKLHLPEAGESEKADVSSAVIVDQPLQEDERPTGAVCPPRVARRADRACWPLLAKQLFVGSSSRASGPFFRFLSFPTIKACAQANGLDSIPSDGIGLNEISLALGISPQLIGLLIHKPERHYRTFQIPKSNGGTRNIQSPRTMMKVAQYFLLDYVLYRCPVHVSAMAYSRGCTVRNNAEVHVGRRFVANIDVENFFPSLSRKIVFRELIASGMETNMASLVSRLTSYNDGLPQGAPTSAALSNIALYRIDDEVFNYCQSIGVEYTRYADDITFSGESLEAVQGAIEKIKALLNSIGLVINKSKTRIFGPSSRKVVTGVVVNEWAQPTRKSRRKLRAELHQATLNPEKYAGQIDVMRGKAAYMLSYAGEGRPVGGLPRGYVESSLAKLAAYIKEHKG

SEQ ID NO: 6973 - protein, 334 aa, unidentified
  source 1..334: note = Related to VBQC01000296.1; note = Verrucomicrobia bacterium
MLPALYPFGTAQRWLEVAPAFFDETGVAQAQQLLEKGVIPVQLGPEIAIYLGVSPKLVSHMVIRPSRYYNTFEITKKNGSRRLITAPRVFLKTVQRYVLDCILSQVQPHDAAVGFRRGRNCGDGARRHVGRPYVWNIDLADFFPTITKQLVVGVFRDIGYPDAAALFLGGLCCLERRLPQGAPTSPALANLVAIPIDIELTAIAESAGMLYTRYADDMTFSSTTLISADFRARVTNAVESFGFSLRATKTRLMGPATRREVTGLTINQQVSIPRHRRRQLRAYFHHISRSPEQYAEQRQQALGYARWLYDYHREEGSNALRIVANIPIPPTNQF

SEQ ID NO: 6974 - protein, 333 aa, unidentified
  source 1..333: note = Related to DNJA01000297.1; note = Deltaproteobacteria bacterium
MSVHPFLYPLGTAERWISFLSSCLDLSKNDLSKAKVLLNKQLVPVIHGPELGIYLGVSPKLVSAMVIRTSRYYRGFKIKKPSGGNREIWAPRVFLKTVQRYVLDCMLAPIVPHEAATGFRRDIGIRDGAQRHVGRPFLWNIDLKDFFPSINQSQVTGLFSQLGFPHQASYFLSGLCCLRGKLPQGAPTSPAIANLILFPTDTEIGTLARRNRIIYTRYADDLTFSGTHPISDEFRREVGVLIESAGFRINKSKSRLMGPRCRREVTGLVVNRKVSIPRETRRKLRARFHRVSVHPERFTKQKGKLLGYASWVSQYRPKEGHRYRAIAEAIPSE

SEQ ID NO: 6975 - protein, 342 aa, Granulicella mallensis
  source 1..342: note = Related to NC_016631.1
MITPLVSFTSFAQFEQALRDSRVSAHSGASFSNSLEVDRLVKSARELYGRGLPPIVSSRTFSLLFGVSPRLISAMTKSPEKYWRTFEIKKRSGKGRNIAAPRVFLKTVQRFLLRFVLEKIPIHPNAFGFAPGKGIFKHAERHLKARFVLTLDIADFFPSISWTQVRDIFANIGFPDGVPSLLADLCTRNKVFPQGAPTSPYLSNLIFLKTDEALTEAANQFEMRYSRYADDLTFSCDSQPSDEARLAFEQIIRDAGFRIQHSKTRLRGPSQAREVTGLLVNEKIQPSRHTRRLLRAKFHNLLRSTSLEQETLPSLGGWASYVNSYDVVKGEEYLSIVRSKAR

SEQ ID NO: 6976 - protein, 332 aa, Dehalogenimonas sp.
  source 1..332: note = Related to CP011392.1
MNSLPLLVSLEHTPDVIAALNSEFNMTEIETRRAISLLDKGLPPLFRPEVIAYLFGVSHRLVSNMSRFSDNYYRCYKIPKKSGGFRNIETPRIVLKVIQRWINTSILSKIVVPEYITGFAEGRNIFVNGHIHIGTRNMLVIDIADFFPSVFGRKVMYIFRNLGFPVQVARLLTGLCLYQKRLPQGAPTSPALANHAFHSVDVTLEELASEWGCNYSRYADDIAFSGERFFEDSDLHKIEDILEQHKFRINHNKSHISGSGSRKMLAGLVISEKCIPPRKKRKIWRAIFHNAANNPAILRDKLPYLRGVACFVKQYDEELYQKYRIIIDSVAP

SEQ ID NO: 6977 - protein, 337 aa, unidentified
  source 1..337: note = Related to JACPQM010000002.1; note = Chloroflexi bacterium
MNPLPLLVSLPREPESIDVLAGELDLTPDERSLAVSLYSRGLPPLVHRKCLPYMFGVSPRLIAAMQKRAEHYYRRFTINKQGGGTRAIVAPRRFLKLIQTWINGHICSKERMPECVMGFVRGRSIFDNGRAHCKNKNVMVVDVKDFFPSVTLQQVEAVFASFGFPEEICRQLGGLCTLDGGLPQGAPTSPALANLVFLSVDERLSRQAAEWNCTYTRYADDIVFSGARHFISEDVACLREILRQGGFTINDRKTRIVGQGGRQTVTGLVVNGKALPPRSKRRRWRAMFHRAANHPHEFFDRARSLAGIAAFVNQYSSERATEYGRIAQEVREKSQHR

SEQ ID NO: 6978 - protein, 319 aa, unidentified
  source 1..319: note = Related to JAGQPF010000708.1; note = Planctomycetales bacterium
MQYLASELKWYDNSLESALALYRRGLPPLVTLPTLAFLFGVSPSLVASIVAAPEAHYRHFTIPKATGEPRSISTPRVVLKTIQRWIHDWILPHANLHRDAHAFRKSRSIFSNAQSHVGQVNLLAVDLADFFGSVRFEQVAAIYEDLGFPWVVAAQLASLSTLGGSLPQGAPTSPALANAVFHDIDVMLAEFANGRTASYSRYADDLAFSSTYHRFSVSDVDAVSGIVGVGGFRLNPRKTQIVGGGYRHQVAGLSVASHPQPPRWKRRRWRAMFHQASVDPSSFQNEAAKLAGVASFVNQYRPDLAESYMEIAIRASRTP

SEQ ID NO: 6979 - protein, 433 aa, Oceaniradius stylonematis
  source 1..433: note = Related to QFWV02000004.1
MPPKRLFDLGHALKAVFTSKTGSCCRCQLAPTTSLKILPTLKRYFARNKEACPKRKLQFSVNGGCRPYRPPVHCRCXLGISPKTIFSIRHRPQKHYRSFPLKKKDGSKRDIDTPRTYLKVIQWWILDNILNQVEFAEYVFGFVAGRSAVQNAEYHLGAKHVLNTDIRQFFPSITIDQVQAIFRSFGYQDDVTNMLSELCCLDGHVPQGAPTSPAIANLVLQELDMELSVLAERAGHRYSRYADDLTFSSQSWIERDFLNLVESAVQVAGFELKPEKTRFSGSEGRMEVTGVVINEKPQPTRLWRKRARATLHKLSLLPRLTRRELSYLQGVVGMAGQFPKSAQMQQLSESARLVIEKKSATIIGVGTKPTLPNGLTFRQAEALASLAPRRTNIEIALRLGASVAAVKKRLQEAYKKIGVNDRQEAMIWATRNL

SEQ ID NO: 6980 - protein, 407 aa, Pseudooceanicola sp.
  source 1..407: note = Related to JAGRMS010000295.1
MPTRSYYFPKDFLHLEEILRAEPDGFPDEQATRFRDLGLPPIPTMGALPLFLGISPKTIFSIRHLPKKHYRSFLLKKKDGSKREIDTPRTYLKVIQWWILDNILSHAEIAANVFGFVAGRSAVQNAEYHLGAKHVLNVDIRQFFPSIKLDQVRTIFRSLGYQDDVANMLSELCCLDGHVPQGAPTSPAIANLVLRELDIELSNLADAAGHRYSRYADDLTFSSQSRIESEFLNLVESAVQVAGFELKPEKTRFSGFEGRMEVTGVVINEKPQPTRVWRKRARATLHRLSLSSRMTRRELSYLQGLIGMANQFPKSPQMQQLSESARLIMEQKSQTIIGRGTKPTLPNGLTYRQAEALAGLAPRRTNIEVAVRLGTTEAAVKKRLQEAYRKIGAADRQEALIWAVKNL

SEQ ID NO: 6981 - protein, 393 aa, unidentified
  source 1..393: note = Related to JAAZTG010000053.1; note = Rhodobacteraceae bacterium R_SAG4
MEKILQAEPGGFSEEEAEQFRELGLPPMPSVGALPLFLGISPKTIFSIRHSPKKHYRSFPLTKKDGTKRDIDTPRTYLKVIQWWILDNILNHVPIAENVFGFVAGRSAPQNAEYHFGAKHVLNVDIRQFFPSITIDQVQEIFSSLGYEENVAGMLSELCCLDGRVPQGAPTSPAIANLVLRKVDTDLSALSTQAGHRYSRYADDLTFSSQSWIDRNFLNSVQKIVEGAGFELKPEKTRFSGSEGRMEVTGVVINEKLQPTRVWRKRTRAKLHRLSLSVRLTRREISYLHGVIGIAGQFPKSTQMQQLSESARIVIEQKSQTVIGIGNRPTLPNRLTIKQAEALAALAPGRTNSEIALRLETTEVAIKKRLQEAFRKVGVFERNQAFKWAQTNL

SEQ ID NO: 6982 - protein, 407 aa, Phycocomes zhengii
  source 1..407: note = Related to NZ_QDFI01000072.1
MPTRSYYFPKDFAHLEEILRAEPGNFPDDETARFRELGLPPIPTTGALPLFLGISPKTIFSIRRRPRKHYRSFPLKKKDGTKRDIDTPRTYLKVIQWWILDNILNHVEIAENVFGFVAGRSAVQNAKYHLGAKHVLNVDIRQFFPSITIDQVREIFVSLGYKEDVAEMLAELCCLDDRVPQGAPTSPAIANLVLRGLDEQLSRLADEAGHRYSRYADDLTFSSQQRIEPAFLDSVQQEVEQAGFELKPEKTRFSGFEGRMEVTGVVINDKMQPSRVWRKRTRAKLHRFSQATRLTRRELAYLQGILGMAAQFPESIQMLKLSKDAAGLIEAKSHTVVGRGESPVLPSGLTLRQAEVLAQLAPKRTNIEIAMRLGTTESAVKKRLQGAFRKIDVTERHTAERWASENL

SEQ ID NO: 6983 - protein, 393 aa, Ciceribacter selenitireducens
  source 1..393: note = Related to NZ_JAEG01000002.1
MEQILWAEQDGFSEEQAMHFRNLGLPPIPTVGSLPLFLGISPKTIFSIRGKPRKHYRSFPIRKKDGTPRYIDTPRTYLKVIQWWILDNILNHVQIADNVFGFVSGRSAVQNAEFHLGAAHMLNIDIEQFFPSITIDQIRAIYGSLGYGAEVANLLAELCCLDDRVPQGAPTSPALANLVLRDLDKELSRLALQTGHKYSRYADDLTFSSSHRIETEFLDAVQTAVEQEGFNLKPGKTRFSGLGGRMEVTGVVINEKTQPSRVWRRRTRATLHKLGNSPRLTRKNVSYLLGIKGMAKQFQNSPQMQRFSLDVEQLLEAKSQTVIGKGTRPILPNRLTIRQAETLAALAPRRTNMEIAMRLETTEAAVKKRLQEAFKKIGVVDRTEALNWATHNL

SEQ ID NO: 6984 - protein, 407 aa, Bartonella sp.
  source 1..407: note = Related to JACFOS010000001.1
MPTRSYYFPDDFQHLERILFEEYGNKYEDELSFYRKRRIPPITNTGIFPIFMGISPKIIFSILKRPEKYYRSFSIQKKDKTKRLIDTPRTYLKVIQWWILDNILNHIDVAPNVFGFVIGRNVFQNAEFHLGAKHILNVDIKQFFPSITNEQVKNIFSSAGYKEDVADMLTCLCCYKGRVPQGAPTSPALANLVLRQLDKSLSSIAEENNFKYSRYADDLTFSSLEQINVNFLNDVKEIIEREGFNLKPEKTRFVGSGGRMEITGIVINKKMQPDRIWRKKTRATLHQFKYKTRLTRRDISYLFGIKGVTKQFPDSPQMQLFLKEADNIIQEKSETIIGRSNNPILPHGLTLRQAQVLVELRPQIKNIEIAKRLNISEAAVKKRLQEAFKKIGVTNRRDAEIWAKSNL

SEQ ID NO: 6985 - protein, 407 aa, Ochrobactrum sp.
  source 1..407: note = Related to PCOI01000001.1
MPTRSYFFPPDFSHLEEILRAEPEGLPDDLQNYFRGKSIPPIPSEAALPRFLGISPKTIFSIRRNKEKHYRVFGITKRDGTRREIQTPRTYLKVIQWWLLDNILDNAKVADNVFGFVAGRSAIKNAQYHYGANHILNVDIQHFFPSITQAQVVSVFEEIGYGKDVSRYLAELCCFRERVPQGAPTSPAIANLVLAALDKELTIIAENANCRYSRYADDLSFSSTELIDARFLNEITNAVAQAGFTLKKTKTRFAGKGERMEVTGVVINEVIQPTRDWRKKVRAKLHRLSAISRLVRADVNFLYGIRGMAAQFPESPQMTALASKAEELCRSRAHTVIGHGPNPLLPNGLTLSQAEVLANLRPRNTNYDIAIKLGSSEAVIKKRLQEAFRKIGSADRTQAERWAKENL

SEQ ID NO: 6986 - protein, 407 aa, Rhodobacter capsulatus
  source 1..407: note = Related to NZ_AYPY01000034.1
MPTRSYYFPQDFKHLEEILRAEPDGLPDEVCEHFRARGLPPITSEGALPRFLGISPKTIYSIRLNSRKHYRKFDLKKRDGTVREIHSPRTYLKVIQWWLLDNLLNRVKLADNVFGFVSGRSAVQNAEYHKGSTHLLNVDIQQFFPSITQEQVEDIFGRLGYGPAVAKMLADLCCMNRRVPQGAPTSPALANLVLEDLDKALADLAARFGCRYSRYADDLTFSSHVRIDEALLVEVTATVQKAGFQLKEAKTRFAGCGDRMEVTGVVINDVLQPPRDWRKKTRATLHKMGSRGRLTRADIYYLYGIRGMAAQYEASQHMQALRVAAEGLMKAKSHTVIGFGAKPSLPNGLTLRQAEALAELGPRRTNSEIAAKLETTEAAIKKRLQEAYRKLGVADRAEAERWAKKNL

SEQ ID NO: 6987 - protein, 407 aa, Tistrella mobilis
  source 1..407: note = Related to NZ_LPZR01000055.1
MPTRSYYFPKNFTHLEAILRAEPDGFPDEQAIRFRDLGLPPIPTAGTLPIFLGISPKIIFSIRRRPRRHYRSFSLIKKDGTERTIDTPRTYLKVIQWWILDNITSQVEISRNAFGFVRGRSAVQNAGHHLGAQHILNVDIRQFFPSVKIAQVFEIFMSIGYNEEVAEMLSELCCIDGHLPQGAPTSPSIANLILRDLDENLCNLADRSGCLYSRYADDLTFSSHSRINDNFLESVRKEVENSGFKLKSEKTRFSGRGDRMEVTGVVINEKLQPPRDWRKLTRAKLHKLDSSNRLTRRQLSYLQGVMGMAPQFPDSPQIQQLSEKARLIAEQKLHTIIGHGPRPILQNGLSLRESEALAALVPSKTNLEVAIQIGINEVVLEKRLERAYKKIGAENRQQAISWADQNL

SEQ ID NO: 6988 - protein, 407 aa, Agrobacterium tumefaciens
  source 1..407: note = Related to JAAMCC010000006.1
MPTRSYYFPSDFRHLDEIIKLEVDGLSSADLDHFRNLNMPPLLRAGTIAIFLGISPKTIYSIRRNQSKHYRSFCMKKSDGSLRNIDTPRTYLKVVQWWILDNILNKVVFNSNIFGFVPGRSAIQNAQYHMGAQHLLNVDIQDFFPSISIERVRAIFSTLGFNEEVATVLSELCCLHDRLPQGAPTSPAIANLVLRDLDSDLSRIAEAEWYKYSRYADDLTFSSMTKIEDTFLDQVYEAVNRAGFALKPAKTRFSGRGGRMEVTGVVINEKLQPSRDWRKTTRSKLHRLRDAARLTRKEVAFLFGIKGMSVQFPDSPQMQSLAFEAENILKQKSHTVIGRGKQPVLPSGLTLRQAEVLIKLRPHKTNAELAYELGTTEAAVKKRLQEVFKKVSVTDRIEAKQWADENL

SEQ ID NO: 6989 - protein, 345 aa, Maribius sp.
  source 1..345: note = Related to NZ_CP045420.1
MPTRSYYFPTEFSHVEQIIRAESTADRETSFAEFRHLNIAPIFSGYELANILGIGPGLLIGILRNPHQNYRQFPVVKKGGGTRQVSSPRTYLKVIQWWILDNILTHLETPDIVFGFKRGTSINWNARHHLGSRHFLNVDIASFFDSVTEVSVYDLFSRLGYADSVSSVLCQLCCLNGSLPQGAPTSPAIGNQILKPLDNSLCELSSEHGIKYSRYADDLTFSSRDFIAQDFLDAVRLRVAEIGFELKDEKTRWRGPGARTEVTGLVVTDFVQPPLKWRKQCRATLHHLGKKERLEQKDIRYLEGILGYASSFEDARQMQALKATTARLLEEHRFPFTEVDRKNTR

SEQ ID NO: 6990 - protein, 339 aa, Pelagimonas varians
  source 1..339: note = Related to QKMF01000007.1
MPTRSYFFPPDFQHIEAILRSDDPMADELQFEKFRERGVAPLLTEFDIATVLGIGPKLIVSMLKKPNRHYRTFPLTKKDGSERQISAPRTYLKVAQWWILDNIVSRVPASENVFGFCRGRSIQDNARYHLGSTHILNVDIKSFFDSVTFSQVLLVFKELGYSQPAAKTLAGLCTLNGKLPQGAPTSPNIANMVLSKVDRELEALASSVGSKYSRYADDITFSADDYISEQFQVRVEDVVKSAGFELKASKTRYAGTGSRREVTGLICGTFVQPPIEWRKLNRARLHNLGKKPVLEKSDIAYLLGLRGYSMQFPDAVQMQALLAGADKLLLSTKKPVPET

SEQ ID NO: 6991 - protein, 334 aa, Pararhizobium sp.
  source 1..334: note = Related to VHLH01000001.1
MPSRSFFLPPDQLANAAVLAEANPPERHDEIMRLASRGIAPLVDEVSLAELVGVTPSLIFSILIRKDKHYRSFCLPKANGSTRIINSPRTYLKVIHWFILDNILSKVKNNDCVTAFISGRGPYFNAQMHSGAHHIFQTDLEEFFPSIKVQNVYRMWLSIGYNQEVAEQLSNLVTYRGELPQGAPTSPAISNIVAGNLDKRLLKLAYEYGYKYTRYADDITFSSKERIPLEFADAVNEQIVLGGFIESRRKRRFKGFGAAMNVTGLNINDFPQPPREWRKRTRALFHRAKLDAAFAKENRGKIAGSLGVLHAAGLPSQHPLILNGKEALLNSKNY

SEQ ID NO: 6992 - protein, 344 aa, Neorhizobium galegae
  source 1..344: note = Related to VZUL01000002.1
MPPRSYYNEPRPSDYVAFAKAFFPDELQAASEFAETRGLPYINSSAHIAAYLGVSASLLRQVIHKPAYHYREFPIKKASGADRIVSTPKTYLKVIQWWIADNILNKIQLSDSVHGFRRGKSYFTNASVHLNSKHILNVDVESFFDSITFAQITNVFNSLGYTEAGSLTLATLTSKNGIAPTGAPTSPMIANAILRSLDSHLEAFAAKSNLLYTRYADDLTFSSPEWIDQSVVDAVTKYVESQGFKLNAKKTKFMGPGDRMEVTGLVTNAGLNASKEWRNWARGFLHRVSREPAKHIGEIERVRGVYGVLRQLDPEKHKKLTVAAEQAMGHLADVKRALAGSKQS

SEQ ID NO: 6993 - protein, 341 aa, Rhizobium laguerreae
  source 1..341: note = Related to JACHXX010000002.1
MPPRSYYNAPRPSDYVAFATAFFPEDSDNAGKFADQFGLPYLESTRHLAGYLGIAPSLIRQIIHRPAYHFREFKLTKSTGEERLISTPKTYLKVIQWWIADNILDKIDLSDNVHGFRKNRSYISNAIIHRDSRHILNVDVKSFFSNIKIDNIFNVFSALGYGDAGSLLLSTLTSKDGMAPTGAPTSPMIANAVFRDIDTQLSKFSQQMGLLYTRYADDLTFSSMEWIEHDVLEAVSQIVESGGFNLNSAKTKFMGPGDRKEVTGVTVNAGLNTSKEWRNSVRGYLHRAFSNPADYIADAAKVRGIYGILLQFDPTKAKRLTQTAEQTMLRLLKAQRDSASS

SEQ ID NO: 6994 - protein, 344 aa, Ochrobactrum sp.
  source 1..344: note = Related to CP061772.1
MPPRSYYNSPRASDYIAFARAYFPDEQEQANSFVNTYNLPYISSSHHIAAYLGISSALVRQIMHNPNYHYRVFPIQKSSGDPRMISTPKTYLKVMQWWINDNILNKIQLSESVHGFRKGKSYITNARVHFGARHILNVDIKSFFDNITTPQIANVFSSIGYCESGSLTLAALTSKQGKAPTGAPTSPMIANAIFLKADEQLIEFARSKGLRYTRYADDLTFSSDHRIDEEVVGKVNAIVKSSGFQLNDKKTKFMGPGDRQEVTGIIINERMNLSKEWRNFARGYIHSILSNPSGNIQEMGRLLGIYGVLLQVDQNKESNLTKNAYKAIRILKDTEQTTTHAEPS

SEQ ID NO: 6995 - protein, 338 aa, Rhizobium sp.
  source 1..338: note = Related to JABBGK010000003.1
MPPRSYYKEPRVSDYIAFADAYFPEERNLAAEFAERTRLPYVESSKHLAAYVGVSPSLLRQIMHKPSYHYREFPLHKADGSERKISTPKTYLKVVQWWVLDNILARQALDECVHGFRSGRSYVTNARVHQNSRHILNVDIKSFFDSIKMSQVANVFLSLGYSEAGSLTLTALTTKDGVAPTGAPTSPMIANLIFRDADLALAEFAEANGLIYSRYADDLTFSGQHRIPDEAVAKIAEIVNAAGFELNIKKTKFMGPGDRQDVTGVVVNSGLNAPREWRNWARGYLHRVRLNPDKSAEELGRVRGVYGILRQFDPERTKSLTRAAFETLEALKQYRTEP

SEQ ID NO: 6996 - protein, 335 aa, Brucella intermedia
  source 1..335: note = Related to WBWH01000007.1
MPPRSYYVDSRISDYIAFASAYFPEEKALAVEFAERTGLPYIESSMHVAAYLGVSPSLIRQIMHKPSYHYREFTLKKTDGGERKISTPKTYLKVVQWWILDNILARQPLGECVHGFRSGRSYVTNAQTHEKSRHILNVDIKSFFDSIKISQVSNVFASLGYSESGSLALTALTTIDGIAPTGAPTSPMIANLIFRDADVSLVAFAQANGLIYTRYADDLTFSAQHRIAEEIVDQIAEIVDAAGFRLNTKKTKFMGPGDRKDVTGVVVNSRLNAPREWRNWARGYLHRIRLNPTENAGEVRRVRGIYGTLRQFDPEHATSLTRIALQTLNVLKQAR

SEQ ID NO: 6997 - protein, 364 aa, Mesorhizobium sp.
  source 1..364: note = Related to VFUS01000001.1
MAALQPRAEFSSASYKARTKQSQDWCCRMPPRSYYNSPRIDDYLAFARASFPEESEAAGAFANRTGRPYLENEIHLASYLGISPSIIRQILHRPRFHYRTFILKKADGTNRIIRTPKTYLKVMQWWINDNILITKEMAEAVHGFRKGRSYITNAAAHAGAKHLLNLDISRFFPSITAQMIVGVFRNLGYSAAGSDFLARLTSLDDEAPTGAPTSPLIGNLILDNFDQTVSELSAARNITYTRYADDLTFSARTRIDNEFLKEVTAFVESSGFDLNPKKTRFLGKGDRMDVTGVVINEGLNLPVEWRNWARGYLQRAIRNPVEFVQHHPAIAGIFGVLKSIDPDEQRHLTQKAKSALTAIRSAGA

SEQ ID NO: 6998 - protein, 336 aa, Mesorhizobium sp.
  source 1..336: note = Related to JAIUGX010000003.1
MPPRSYYNSPRVDDYLALARAFFAEDADAAAAFAEVERRPYIESETHLASYLGISPSIIRQILRHPKFHYRTFKLKKADGTNRIICTPRTYLKVIQWWISDNILYTEQPDVSVHGFCKGRSYITNASAHSGAKHLLNLDIRKFFPSITEEMIVGVFRTLGYSPAGASLLARLTSLNGEAPTGAPTSPAIGNLVLAEFDKAVSAAATANNILYTRYADDLTFSSQNRINEDFLATISTLVQSSGFELNLKKTRFLGRGARMDVTGLVINQGLNLPIEWRNWARGYLQRVVRNPAAFIDHRSTIAGILGVLKSIDPTEDRGLTQKAKSALRAIQEQAS

SEQ ID NO: 6999 - protein, 338 aa, Pseudohalocynthiibacter aestuariivivens
  source 1..338: note = Related to NZ_CP049037.1
MPPRSYYIEPKQSDYLAIAKAFFPEELNDARDFVEQTGLPYLKTSAHVSSYLGVSPKLVRQILHKPSYHYRFFEIPKSDGSLRAITTPKTYLKVVQWWICDNILNQMPLHDCVHGFRSGRSYLTNAKAHFGQKHFLNVDIESFFPSIGADLVEATFLEMGYHSDGASVLRDLVTLGGAAPTGSPTSPMIGNLVLAKFDALLTEYVADRGFVYTRYADDITISSKHWIDDEVLGDISALVQKFGFRLNERKTKFMGPGDRQEVTGIVLNSSPNIPRNWCNSVRGYLHRVKLAPHKHVDEHAKVQGILGTLLAADPEAERKITKAAREAAHLVMLERLMQ

SEQ ID NO: 7000 - protein, 333 aa, Octadecabacter sp.
  source 1..333: note = Related to DQCL01000311.1
MPPRSYYLEPQKTDYLAFAKAYLSDEYGIAKAFIDEKGLPYIRNADHLAAYLGVSPSLVRQILHKKEYHYRQFPLPKADGPPRLISTPKTYLKTIQWWIGDNILSHVALGDEVHGFRQGHSYVTNARVHLGCNHILNMDIEQFFPSITKPMTTSVFTSLGYGKEGAGVLAELCTLDGSTPTGAPTSPAIGNMVLVDFDRAMTKLAGENTLKYTRYADDLTFSSNEWISPEFALQVEEVLKGYGFAPKGTKTKFMGRSDRMEITGVTINEGTNPPREWRNWARGFLHRARMNPHQYAHEWKKIAGIYGTLKSMDPDEDKLLTKRAKQVLNLVRS

SEQ ID NO: 7001 - protein, 344 aa, Pseudochrobactrum sp.
  source 1..344: note = Related to NZ_CP080493.1
MPPRSYYHSPRHSDYLAYFTAYFPNELQVCRAFLEATNYPYIGNIHHLAAYIGVSSALLKKIISNVNYHYSDFTIPKGGGKERVIYSPKTYLKVIQWWICDNIFSNLKFNESVYGFVKGRNYIDNAKKHFGRKYILNVDVKNFFDSISTEDVKKIFLKLGYPISSSEILSKLCTLDNRLPTGAPTSPVIANLYFKDIDNILELESIKNGWIYTRYADDLTFSANTKINFDFLETLKNVLDEYHLKLNDKKTKFMGPGSRQEITGIVVNSVIGMPKYWRNKTRGFLHNVRKDPSNNLDKIQEVKGLYGVLIYLDPEKNRSITKQAYEVLGILKSHKKPLHETKHK

SEQ ID NO: 7002 - protein, 338 aa, Caulobacter sp.
  source 1..338: note = Related to NZ_QDKO01000009.1
MSPRTYDLITNPKYIDFISESVRSGCSLEDVKFPVPSVSLPALNKAEDISYYLGISPELIWTLIRSPRYKYNTFSVRKKSGGSRVISAPRTYMKVVQWWINDVILSKFPQRDNVFGFVPGVSYVDNAAYHHGAVTMMNVDIKNFFPSIKSEDVLVCFMKIGYSKQVALGLSALTTYAGFLPQGAPTSPNLSNIVFSEFDEKISNICKLYNLKYSRYADDMTFSSIGRVPKDFHRIISRELFPKFLLNDEKTQYMGAGDKKEVTGLVLGRDGPAISREKLNGLRGWLHQIIANPEQYVDDLDRLSGTLAMVRMVGGRGTGPILLQGGRAMQAIEQSLRI

SEQ ID NO: 7003 - protein, 598 aa, Brevundimonas diminuta
  source 1..598: note = Related to NZ_UIGE01000001.1
MTFPADFRRVTTREALITAIGTDEATFEAILAFDPPRTREEQIEALQRAADAASIEDIPVFLRHDIPKRNRRRGHRTVWEPLLGKPGYRTLARRLETFFRIALPGYPHDAVYGYRPGRNIRENASAHAGRSALLNADLENFFPSITTDRVAALFTKLGLVPDVAELLARFVTIGGGLPLGLPTSPVISNAVALPLDLACAALASGANATYTRYADDLTFSGDDQLPAIDALRSVVEAQGFVLAEDKTRRSKIGQAHYVTGLSISDPAQPHVPRERKRRLRQELYYAGKFGIADHFRHRGVNDARVIQQEVNRVDGLVRFVAHHEPAMAPRLRTQWRKALQDEGMKPSFAPRGQHRAPFFIFVDEAEFDRGGQKVLAIGMAVSQHGPRMAIEAGQVLEAALADMYLDGDPAALRKRGLHFVDATEDLRIAYVRRLEGMRFEGYVAFADCDDPSRYEETYLRLLGAIIERRLKAAESQLASFYIEQNEKVSAHRVKGLIQDAFDRLKARDDRRPVDFAVQFVSKPHLGISAPDFLLAVLGRYLKSKAAKPGKPEPRDRLMFERLRDKYRLILDVTTWTEYSRRRPILPWSDQTPPSDDGA

SEQ ID NO: 7004 - protein, 594 aa, Brevundimonas diminuta
  source 1..594: note = Related to NZ_CP066026.1
MTFPADFRRVTTREALITAIGTDEATFEAILAFDPPRTREEQIEALQRAADAASIEDIPVFLRHDIPKRNRRRGHRTVWEPLLGKPGYRTLARRLETFFRIALPGYPHDAVYGYRPGRNIRENASAHAGRSALLNADLENFFPSITTDRVAALFTKLGLVPDVAELLARFVTIGGGLPLGLPTSPVISNAVALPLDLACAALASGANATYTRYADDLTFSGDDQLPAIDALRSVVEAQGFVLAEDKTRRSKIGQAHYVTGLSISDPAQPHVPRERKRRLRQELYYAGKFGIADHFRHRGVNDARVIQQEVNRVDGLVRFVAHHEPAMAPRLRTQWRKALQDEGMKPSFAPRGQHRAPFFIFVDEAEFDRGGQKVLAIGMAVSQHGPRMAIEAGQVLEAALADMYLDGDPAALRKRGLHFVDATEDLRIAYVRRLEGMRFEGYVAFADCDDPSRYEETYLRLLGAIIERRLKAAESQLASFYIEQNEGLGAQGQRADPGRLRPSQGARRPSPGGLRRPVRLEAASGDQRAGFSARRSRSISQVESGETGQAGAARPADVRALARQISADPRRHDVDRVLAATSYPSLVRPDPAER

SEQ ID NO: 7005 - protein, 589 aa, unidentified
  source 1..589: note = Related to JAFLCT010000140.1; note = Caulobacterales bacterium
MAFTPDFRRLSNREAVRGALGVSEDVFQAVLTFSPEAVVGKPEMEGGFYLASSITIPVFFRHDIPKRNPARGVRTVWEPSIEVKSVYKALARRLDLFFRAHLDGFPHDAAYGFRVGRNIRENAAPHAGHRHLVATDIEDFFPSISVDRIQGLFNELGCRKDAAQALAQFVTIGGELPVGLPTSPVISNAVALPLDRDLAALAATTGSTYTRYADDIALSGDVEPPSSEEIGRVLEAQGFCLAESKTRRSKIGQAHFVTGLSISDPVRPHVPRRTKREMRQTLYYAKKFGLDDHLGYRGYSDWRTAQTEINRLDGLVKFIGHHEPTLASSLKRAWSEILRDSGNQASFEPRNQHREPFTIFVDEAEFERNGRPVLALAMAATQHPNVIHDDSDRVLQAYLSDLFADGRPEVIRKKGLHFVDATEDLRRSYVEAMRSMPFEGYVAFVEYDGAADYEAAYLCLLEAMTPRRLMAAESQMASFIFEENDKVSRTAIETCVIAVHSALVERCDRHPKCIGIDYASKPHAGIALSDFLLGVLGRYLRSEPPAPNATSRDRLRFEQLRDKYRVILDVTNGREYSRRRPIAPWADPF

SEQ ID NO: 7006 - protein, 583 aa, Sphingomonas sp.
  source 1..583: note = Related to JAHXZL010000012.1
MTNREALIAAIGTDLATFDAVLDFVPPPRRVGSEAPETEKVQVLEIPVFLRHDIPKRRRKGEFRTAWEPVLAKSEYKALARRLDSFFRLTLAGFTHDCAFGFLPGRNIRENATVHSGHRHLLGVDVQDFFPTITRARIERLFTEVGVETSVAELLARFVTIGGSLPLGLPTSPVLSNAVSLPIDVACDALAARRGAVYTRYVDDMSFSSDDELPDVEDVRRILAENGFGLSERKTRRSRIGQAHYVTGLSVSDGVGPHVPRERKRRLRQELHYARKFGLADHLRHLGVNDDRVIQQQVNRLDGMVRFVVHHEPRIAPRLRTEWRALLKDNGMSPSFVPRGQHRAPFYMFIDEAEFDRDGERILALCIAITQHGPLIAGEGAAILAAAMTDPFSDGNVDALRRRGLHFADATEDLRLAYVTRLASMRFEGFVAFADLPDPAAYEETYLRLLGAMIERRLMAAESQYAYVFCEANDKVGRGGIEECVATAQRRLKDRDDRRPVGVGVEFVNKPHLGISVPDFLLGVLGRYLRSPPVPDGRPERRERLMFERLRDKYRLILDLTDWTEYSRRRPIRPWNDAGNDAP

SEQ ID NO: 7007 - protein, 581 aa, Rhizobium dioscoreae
  source 1..581: note = Related to NZ_BLAI01000019.1
MSFNYDFSRITSRGSLLAALSIDEALFTQVLDFVPPPPAWSVPPSPPDEISKLMVPAFLRHDIPKRNTKRGHRTVWEPVLAKGTYKALGRRLDSFFRHKLDGYPHKSSFGYRPGRNIRENAAVHRGKKFLLSLDLQDFFPSISRSRIASTFEHLGIAPDIAALLARFVTISDALAMGLPTSPTISNAVALCLDQALEELALRSGAVYTRYSDDISISSDNALPDLALIAQIVSDNDFKLADEKTRLSVRGQAHYVTGLSISDPNQPHVPKAKKRRLRQELYYARKFGLGQHLHRQGINDPTVVQQEVNRLDGMIKFVGHHEPKLSSVIKQEWCEILTAADMKPSFAPRGMHRAPFVLVIDEAEFSRDGQRYLALCIVVSQQMDRVAEETGRVLSNALNDLWGDGNRNAMLARGLHFTDATKDLQLAYIKELATMPFEGYVAFCEYDGPKNYQAAYLRLLSAMIPRRLMAAESQYAAVLVEQNSKVSQTAITERISEVAADLKRTNNRRPKDTLSKLLSKPNPFLSPPDFLLGVLGQYLKSKPAAPEPRERLSFERLRDKYRLILDLDARAEYSRRRPIAPW

SEQ ID NO: 7008 - protein, 581 aa, Agrobacterium tumefaciens
  source 1..581: note = Related to NZ_CM002025.1
MAFVYDFTRITTRDALLDALAIDGALFDQILAFEPPPPAWLESKSVRDSIGTISIPAFFRHDIPKRNASRGHRTVWEPALAMGSYKALARRLDDFFRYKLVGYPHDSSFGYRPGRNIRENAAPHRGKKFLLSMDLESFFPSISGTRVAGLFETLGVQPNVANLLARFVTLGNGLAMGFPTSPVISNAVALPLDQALQQLARSTGWTYTRYSDDISVSSDNSFPEIDQISGVIFDNGFQLAEGKTRWSRQGQAHFVTGLSISDPAQPHVPKAKKQKLRQELYYAQKFGLADHIQRKGVNDPKIMQQEVNRLDGLVKFVSYHEQKLSPRLKEQWHKIITVADMKPSFEPRKMSRVPFALIIDEAEFPRGDRRYLALCIVATQHVDKVIGSTRQVLTTALNDLWADGNRQSLLARGLHFTDATKDLQLAYIKELMTIPIEGYVAFCELHSHQNYETVYLRLMAAMMPRRLMAAESQKASIMVEQNSKVSQTLVNRCIADVFAELKRTNNRRPRDLTINFVTKPNPILSPPDFLLGVLGQYLRSKPAEPEPRERLNFERLRDKFRLILDLDNDIEFSRRRPISPW

SEQ ID NO: 7009 - protein, 591 aa, Sphingobium sp.
  source 1..591: note = Related to PBXY01000014.1
MYALHFSRLKTRDDVISALTIDEALFDKIIAFEPPPPAAPRSAEPPVPKPEAAVQTIVLREPPVFFRHDIPKKNKARGHRTVWEPVNSMPAYKALARRLEAFFTMLPDYPHECAYGYRPGRNIRENASAHSGNKFLLSLDIKDFFPSITVERVRWLFEAMSIEAYVADLLARFVTIGGALPLGLPTSPVISNMIALPLDDLLRDLAGQYEAVYTRYSDDITFSGNGDLPDIEEIRPVLAAFDFAIADRKTRRSKRGQAHFVTGLSISDPAQPHVPADKKRSLRQTLYFAGKFGLAEHFQHRGINDQKVIQREVNRLDGLVKYVAHHEPRMATSLKEQWRQILADSGMKPSFTPRGQYRAPFYLLVDEAEYRRGDDKMLGLAMAVTQHPQRLADETNGILTRFLADLWSDGNDTALRKNGLHYTDATEDLRSAYVKQLATMPFEGYVAVGPLDADAGYEASYLRLLKALISRRLMAAESQFAFLIIEKNGKVAQDAIKACVQEAFDALKLADNRRPTAFGVNFVAKPNALISVPDFLLGALGKYLQSNPAAPGRPEPRERLLFERLRDKYRLIVDVDPWTEFTRRNPVKPWS

SEQ ID NO: 7010 - protein, 582 aa, Phyllobacterium sp.
  source 1..582: note = Related to JAIQWW010000020.1
MEYWHDLSRLESREQLITALGIPAALFDAILAFEPPIIGCPVSDPTITTEIGIPLFIRHDIPKKNKTRGNRTVWEPLLNKSHYKALARRLGSFFRLKLDQYPHDSVYGYMSGRNIRENAKAHTGHRVLLSIDIQDFFPSITTESVCRLFQSLGVNATVSGLLSRFLTIGTTLPLGFPTSPIISNAIALPIDLELKALADLIDATYTRYADDLSFSSNGKIPDVEEVRAILGSNGFKIADAKTRQSKIGQAHYVTGLSISDPLRPHVPRERKHSLRRELYFARKFGLADHLRHRGVNDDSVIQQEINRIDGFVKFVAHHEPRMAADLKTGWREILLANGAKPSFTPRGQYRAPFYIFIDEAEYVKTGHKILALGMTVTQHAQELISQTSEVLSSARADLWAAGNTEILLKKGLHFSDATEDLRLEYVKRLAAMPFEGYVAFAPCKSPADYEATYLRLLSALIPRRLMAAESQFVFIYCEENSKISRDEAKAKIQRAFDDLKASNNRHPKGFAVEFVSKPNLGISAPDFLLGVLGTYLRSEPSPLGKPEPRERLMFERLRDKYRLILDVETWTEYSRRRPIEPW

SEQ ID NO: 7011 - protein, 584 aa, Methylobacterium sp.
  source 1..584: note = Related to NZ_LMRE01000023.1
MKFHYDFRRLRDKQQLLDFLGITEAFFELVVSFEVPTDPPPPPVYAGGIEELSIPPFLRHKIPKKNKNRGCRVVWEPLLFKTTYKTLGRRLNNFLVNFLSNYPHPAAYGYLGGRNIKQNAAAHCGHKFLISADIVDFFPSITCERIKNLFIDLELVPDVAIALSRFMTISGALPLGLPTSPILSNAIFLPVDIELQYLASQAGATYTRYSDDLSFSSDRKLLILEQIGKSLQDNGFKIAEEKTKISRLGQAHYVTGLSITDPNGPHVPRDKKRRLRQELYYAKKFGLNDHFKHQEVTDAKAQQHNVNRLDGLVKFVSYHEPKHSARLKSQWSQILISSGSRPSYEPRRQKRVPFCICIDEAEFQFSQGVVLALGMSVSQHQDELDMAAAEVLDKWLSDFWAAGNQRVIEKRGLHFVDASEDLRLQFVTRMQALPFEGYISFGRLLSPAYYEETYLRLIESIIRRRLMAAESQLALFVIEENSKVSNQSVRAAIDRAYDELKSSNNRRPRAIIVQFRSKPDLSISFPDFLLGVLGKYLRSRDQKLGTPIPRDRLLFERLRDKYRLILDADTGFEFSRRREIQPWI

SEQ ID NO: 7012 - protein, 575 aa, Methylobacterium sp.
  source 1..575: note = Related to NZ_LMNB01000001.1
MRTKQQLLNFLGLPEEVFEFVVNFEPPPDPQPPPIVVEGVQQISVPPFYRHKIPKKNKNRGYRVVWEPQIARLEYKALGRRLGSFFKHFLTNYPHPAAYGYLGGRNIRQNAAAHCGHRFLLSTDIASFFSSISIGQIKGLFLDLGICADVAVPLSRFVTIGGVLPLGLATSPVLSNAIFLPADTQLQALADRVGATYTRYSDDLSFSSNGNLPPIEDITKCVQIHGFRLAEGKTKTSEHGQAHYVTGLSISDPSSPHAPREKKRRLRQELYYAHKFGLNSHFQRIEAATTKDQQQNVNRLDGLVKFVAYHEPRQVGRLKPVWANILASSGARPSFEPRRRNGPPFCISIDEAEFQNDQGTVLALGMVVSQHQDQLVSAASEVLNRWLADPWAVGNRLAINKRGLHFTDASEDLRAEFVIRMQTLPFEGYISFGQLSDSSEYEATYLRLVGSIIKRRLMAADSESVLFLIEENSKISQNKVLFLIDQEFNELKLSNNRRPNKITIQFRHKPDLNISFPDFILGILGKYLRSKDAKPNAPMPRDRLLFERLRDRYRLILDADTKAEFSRRRPIEPWM

SEQ ID NO: 7013 - protein, 584 aa, Mesorhizobium sp.
  source 1..584: note = Related to VFUO01000004.1
MTSLYDFSRITTREALTAVLGIDETMLDLVLTFQPPIDSPTAKNSPEAIKTITIPVFLRHRVPKKNRNRGFRTVWEPILLKSSYKGLARKLDAFFRHHLVGYPHESAFGYRPGRNIRENAQVHAGSARILSLDLADFFPNISKGHIKKLFLAMGVNATVSDLLSRFVTIEGALALGLPTSPVLSNAIALPIDLDLGILADQSNARYSRYADDITFSGNGELPTLERIEDCLRQHGFQIAEGKTRWSKRGQSHYVTGLSVSDPAQPHVPRDRKQALRQQLYYMEKFGIDDHFRRIGTNDSDVIQQALNSIDGMVKFVAHHEPCIAAPLKMQWNEILRVNGKKPSFKPKKQNREPFYIFVDEAEFKRAGTTVLALAMSVSQHEERIVQETREVLEAEMQDFWAAGNIDALRKRGLHFADATEDLRHSYVKRLASMPFEGYVAFHPCADPRNYEDTYLRLLGAMISRRLIAAESQFVCLYFEENSKVSQEAVRSLVQCAHDQLKRANNRHPKLCVVKFVSKPNFGISVPDFLLGVLGKYLHSKPAAAGGPEPRDRLMFDRLRDKYRLILDLSTWTEYSRRQPIEPWQ

SEQ ID NO: 7014 - protein, 584 aa, Rhodoblastus acidophilus
  source 1..584: note = Related to WNKS01000001.1
MAYTYNFSDIRTREALLAVLGIDETMLDLVLSFQPPIDPPTVTIIPDVISTLQIPVFLRHRVPKKNRARGFRTVWEPILLKSTYKGLSRKLDVFFRHHLAGYPHESAYGYRPGRNIRENAQVHVGSARILSLDIADFFPSISKERIEQLFLGMGMNAAISDLLSRFLTIEGTLTLGFPTSPVLSNAISLPIDLELSSVARQFDARYSRYADDITVSGNGDLPSLEAVEDCLCRHGFQLAPGKTRFSKRGQSHYVTGLSVSDPVQPHVPRDRKRALRQQLYYMTKFGVDDHFRRLGINDPKVAQQAINSIDGMVKFVAHHEPRIAAPLKSLWNEILRVNGEKPSFTPKRQDRKPFYIFVDEAEFERAGTKVLALAMSVSQHEEQIFQETNEVLEAELGDFWAAGDINALRKKGLHFADATPDLRQSYVKRLAALPFEGYVAFHPCDDPCNYQSTYLRLLGSMISRRLIAAESQLVVICFEENSKVSQKSIKELVQFAHDELKRVNNRHPISCVVQFVSKPNLGISVPDFLLGVLGKYLQSKPANAGRPEPRDRLMFDRLRDKYRLILELPSWTEYTRRHPIEPWQ

SEQ ID NO: 7015 - protein, 583 aa, Hypericibacter terrae
  source 1..583: note = Related to NZ_CP042906.1
MSFKYDLTQLQNREQLINFLGLSKDVFEDVLDFDPTGSNFSQFSEKESSLIELPLFFRHEIPKKNRQRGYRTVWEPTFLKSPYKALARRLNNFFAHKLEGFPHAQTYGYISGRNIRENAQNHCGHTHLVSIDLEDFFPSIKASRIATFLRTTGITPTVADLVSRFVTIEGSLPLGLPTSPTIANAICLPMDIELEALAQKLGATFSRYADDISFSSDGTFPSLRELMACIRQHNFEIAEAKTRTSKLGQAHYVTGLSVSDPAQPHVPRKKKRRLRQELYYADKYGLDDHLHHVGLGNSRFAQQEINRLDGLVKFTAHHEPRLSAHLKTTWAKILQTSGHRPSFAPKNQHRLPFYIYIDEAEYARPSGDRLLALAMAVSQHQEQINRATQDLLETTLSDVWAAGNLDAIAKKGVHFSDATEDMRLAYIDRMRLLPFEGYVAMARLPSAADYEVVYLRLLNAMIKRRLMAAESQFANLVFEENSKVRQEAIRKTVTDTYDALRESNNRHPEYCSVEFAGKPNFGLSIPDFLLGVLGKYLTVGPQQDGKPAARYVLLFERLRDKYRLILDVDNWVEYTRRRPIIPW

SEQ ID NO: 7016 - protein, 583 aa, unidentified
  source 1..583: note = Related to JAFKFG010000017.1; note = Alphaproteobacteria bacterium
MTFRYDLRLLNSRKSLLAFLGVDEIAFEKVLSFDPVSAQMSIGIEDDIHFLEAPLFLRHKIPKKNRARGYRIVWEPTAFKSEYKALARRLSNFLSHRLNGFPHSRTFGYIGGRNIRENARDHCGHRHLISFDLENFFPSISAARITKLLISTEIDPGIADLLSRFMTINGSLPLGLPTSPTLANAICLPMDIELQLLAQQHLATFSRYADDINFSSDTSLPPLEKFATLVKSNGFEIAKSKTRISKLGQAHYVTGLSISDLAHPHVPRHKKRRLRQELYYAQKYGLEDHLVRRGINDHQLIQHEINRLDGLVKFIAYHEPQLSAKLKTNWADILQESGRRPSFSPKNQARPPFCIYVDEAEYVRPDGTRLLAMGMAVSQHQDRVVQAAKDVLEETISDQWAAGNKPAIVKRGLHFADAHPDLRLAYIRRMRSLPFEGYVVMARLDSTASYEGTYIRLLNAIIRRRLMAAESQAALLVFEKNDKVSQVTIRQAVMQSYESLRKSNNRRPVGCYIDFVSKPDLGMSVPDFLLGILGRFLRSGPGKMEDQFDRDRKLFESLRDKYRLILDADSWVEYSRRREISPW

SEQ ID NO: 7017 - protein, 587 aa, Ahrensia sp.
  source 1..587: note = Related to NZ_JIAX01000009.1
MAFNYDLRRIKTKEQLLTYIGLEEMFFDRALTFNVAEYEALMAEPVVEMGIKELYLPTFSLHEIPKRNPKRGKRTVWEANSHINDALKGLSRRLTLFFETVVPGFPHPQNCGYVRGRNIRENAQFHIGAKYLLKADIENYFPSISIGRISTFLERLGVASEVAKLLSNFLSIDGKLPLGLPTSPIIANAISHIMDIDLNSLAEKHGAIYSRYADDLTFSSEGELPTEMAISEIVELHDFTLALDKTRLSKRGQNHYVTGLSVSATDAPHAPKRMKRSLRQELHFSKKYGLDDHLEHLGLSHHFARQSYINHLDGRVKYIAFHEPNLASKIVPLWQEILEESGDSPSFKPKNQNRKPFQFYVDEAEFELNGIKYLALGMSGTQHQDHLNDVTEKVLEDYLADPWSDGNREKIDKKGMHFTDTTEDLRKIYLSALQPLPFNGYIVFGKLTADYQDCYLELLRFVLKRRLMAAESRAAYFHFEQTSKVSKDAITKTVDDVWKELLRENNRCPEYVVIDIVDKKYFGVAVPDFMLATFCRYLTTNLSENDYRRKANMFEMLRDKIRLIVNADTGEEFGRRNPLVNPDIENL

SEQ ID NO: 7018 - protein, 587 aa, Celeribacter halophilus
  source 1..587: note = Related to NZ_QKZJ01000005.1
MAFDYDLRRIKTKGQLLTYIGLEEYFFDKALDFSVTEYEARMAEYSNKTDIGSLFLPLFWKHEIPKRNPKRGNRVVWEADSHINNALKGLARRLTLFFGTVIPDFPHPQNCGYVRGRNIRENAQFHIGAKFLVKADIEDYFPSISFERVSKFLENLGVNAGIARQISNFLCIDGKLPLGLPTSPIIANAISHLMDFNLNSLAQTHGSVYSRYADDLTFSSDDTLPSEDDISKVVEHHGFALAADKTRHSKRGQNHYVTGLSVSESDAPHVPRRMKRSLRQELHFSKKYGLNDHLGHLGLRGQPERQSYINHVDGRVKYIAFHEPGLAATIVPLWQSILEESGEGPSFKPKNQNRVPFQFYVDETEFTLDGVKYLALGMSASQHQDHLNDTTQNLWEDYLANPWSDGALDQIYAKGMHFTDTTEDLRRTYLSALQPLPFNGYIVFGKLTSDYQETYLTLLKFILRRRLMAAESRAAHFYFEQTSKVSKDSLTRTVNAVWQELRNENNRRPEYVVTEIVDKKYFGIAVPDFMLAVFRRYLTTTPSEKDYRRKANMFEMMRDKIRLIVNADTGEEFGRRNQLANPNIEDL

SEQ ID NO: 7019 - protein, 587 aa, Phaeobacter sp.
  source 1..587: note = Related to LIKT01000008.1
MAFDYDLRRVKTKDQLLTYIGLEDIFFTNASDFDVHKYEARLAEPLVEMGIAQLHFSPFYKHEIPKRNPKRGSRVVWEASGHLNNALKSLARRLTLFFEMIISNFPHPHNCGYVRGRNTRDNAQFHIGAKYILKSDIENYFPSISLRRLISFFESLGVNSGIAMQLSHFLCIDQKLPLGLPTSPIIANAISHFMDIDLNGLADKYKAVYSRYADDLTFSSNGNLPQVSEVSEIVARHKFQLSSDKTKYSTRGQNHYVTGLSVSEENAPHAPRKMKLALRQELYFSKKYGLNDHLDHLGISDSYQRQSYINHLDGRVKYVAFQEPRLASKIGPLWQEVLEDSGEAVNYSPKNQHQTSFQFYVDETEFTLDGEKYLALGISASQHQEQLNNVTKRIWEDYIANPWSDGDLDAITKNGIHFTDTTEDLRRTYLTALQPLPFTGYIVFGKLGVDYQGCYLSLLKTVLKRRLMAAESRGAYFYFEQTSKVTKSAITETVKAAWSELKNDNNRHPEFVATEIVDKSYFGIAVPDFMLAVFRRYLMADSKDKQYRRKVNMFEMLRDKIRVIVNADTGEEFGRRNPIRNLDIENT

SEQ ID NO: 7020 - protein, 589 aa, Epibacterium sp.
  source 1..589: note = Related to JAKRFC010000017.1
MAHDYDLRLISTKAQLLTYIGVEEEWFDVACGFDVAAYDQALCQDTESEIGIYHHHPFTRHEIPKRNPARGKRVVWEAERYLNNTYKGLARRLTRFLETAITGFPHPQCFGYVRGRNIRDNAGRHVGATLLLKADIKDFFPSIDKARVEKLFVDLGVNSEVATQLTSFLTIEGKLPLGLPTSPIIANAICHGMDGDLSKLATNSDSTYSRYADDISFSTNVTLPKAEAISVIVARYGFELAKDKTRVSKRGQNHYVTGLSISDPRAPHAPRSMKRNLRQELYFARKFGLDDHIRSLGITEGDEIQRYINHLDGSVRYVAFHEPTKARDLLVQWYAILEESGSSPSFEPKNQHDAQFCFFVDETEFEWNDKKYLALCLSATQQQDVINTTTERILKDYLANPFSDGDREAISRHGMHFYHATEDLKSLYFRALQKLPFQGYIVFGEQSGTYEADYTKLLSQIIKRRLMAAESKAAFLCFEQNSKVSKHAIEEVVRRSWEELDRTNNRRPKYATVEMVDKSYYGVGVPDFLLGVFRKYVSGVPAASPPQRQHNMFEGLRDKIRVIVNADTGEEFTRRHPFDNFSINDLRER

SEQ ID NO: 7021 - protein, 571 aa, Thalassospira sp.
  source 1..571: note = Related to JAGHQQ010000003.1
MERFIGVKSDLLDLVLDFDSESSNSFSEQNSRIYMLSMPLFICHKIPKKNPNRGERVVWEALMDLRDVYKSFSRKLDIFFQKQIETYPHSCSYGYLGGRNTRGNAEKHVGKKYLLNADLCNFFDSISADKVRLLFVSCGVDEKISQILSRFLTISSRLPMGLSTSPVIANVLAHKMDCELSDLAEKFNCQYSRYVDDLTFSSDEILPEISHIEEIVARHNFSLAHEKIKFSKSGQAHYVTGLSVSDTEAPHVPRKIKKDLRKSLYYMDKFGIYDHFGRLGIHEHENVQREVNRIDGLVHYVSYHEPRKSFEINAIWQKILRDSGFRPYFSAHKQEYEVFNIIIDEAEFSHNGTNYLALAASVTNKQREIDNSIFEILDNFLSNPWSDGKVDLIKERGLHYVDCTEDLKKEFIQCLQILPFNGYISINAVGESNYRDRYIENFKNIIMRNYYKIDRSIVFVSIERNSKISNDDIYGVVDYVNSYHLNDKRVILPKGNVSFVGKECLGVSVPDFLLGCFAGYIKDNQTVSGGAKSRKFLQFEMLRDKIKVVSDLTTNQHFTRRNPFSKSKLKI

SEQ ID NO: 7022 - protein, 583 aa, unidentified
  source 1..583: note = Related to JADGCJ010000180.1; note = Magnetococcales bacterium
MNQKDMPRGFDRNRIKFDFRVLKDLNTLKLFIGVDNITESFINTKHEVHRWFIQHRIPKKNTTSHDKYRIVWQPINGAERLYKTLNRRFEIFIRDIDRRYPHPCSYGYVRGRNTLDNAKLHIGASVILHADISNFFHSIKIDRIKKLFISYGIDATIANYLSEIVTLNGSLPLGVHTSPMLANVCCLDLDDKLYKLSQRYSCAYSRYADDISISGSDLPSKDEVEMIFSEEGFVLSQNKFSISKLGQKHFVTGLSVSDPLTPHVPRQIKKSLRQELYYCNKFGVIGHLERIYDGSFDFIQKNINRIDGFVRYVSFIERKPNFKADWMAMLSQENLRINYRNKSNEQSNECVIYIDETKFEFNGASYLAIALVQTSNFDLIESESRRIYEEYIADPFAAGRKDNIAKNKIHFTDVHPDLQGRYIDWLYGIAFDAYIAFCKEESANYQSLYLSLLSRILPDRLRHLRNHNVKLILEQNPEVSSESIKNKVFGIDNYLKLQQIRSAKTSVIVGSKQEYYGFSVPDFVLGLSARYAISNSGKQQNDSSNPPARDTLLFEKMRDKIRVVYDVDAKRKYTRHRPFVPFQ

SEQ ID NO: 7023 - protein, 581 aa, unidentified
  source 1..581: note = Related to JADJEE010000002.1; note = Deltaproteobacteria bacterium
MLDLRNMRDASDLAKYLGISEGRARQLLVASPEEVFKTYEIPKRGNRGVREIWEVTETWAADMYKGLARRLNALFVGALAGFPHPSAHGYVAGRSTWTNALAHLGQRRVLCTDIRAFFKSIQHERVRQLLLRCGLNNEAAAALSRILSWDDHVPLGLHTSPIVANAVCHDLDARLRALAPAGRYTRYADDLFFSGPELPTRNDVAAALAADGFEIAPRKWGLAKAGRGLYVTGLSLEHGDRPRAPRSMKRRLRQDLHHADRYGLRQHLGRRGYPSFQSGINKIHGTIQYLRGIERDLGDRLNKEWMELLGREGVAVAYPTQERLAGRTVLFLLDESVPPDRDVLLLCLTVVEDVEWVSAEVQRFLDDRIADTMTAESERAVLKQRGLHWNELTPDNRTRATELLRTLPFRSFVAYAALPKQDKASYAETYARTLAQLLRDRMIRYDGCTLKIVGEENPRVGRRLLSEIANSIFSELECLGARRPAAVPSCEVLSKGSNPALPLPDLVLGVLGDFALSIVRSEREEVGDGKKKRRSGDQASIRFEQISHKVKAIYDLQSGVVYSRRNPFTAWPLDNASTGGE

SEQ ID NO: 7024 - protein, 595 aa, Pseudoxanthomonas mexicana
  source 1..595: note = Related to NZ_CP060731.1
MSLDDYIPQLARPANVEQLAKALGVATQIFTFIADNSEPERIYRRHLIPKRAVRALPSVPVEDARGIVTLSLDSFDLSKYRVVWEAHSPVIKHAHKSAARVLERYLSRPGALFPHEAAFGYVKGRSTRHNARRHVGAKRLLSADIQDFFPSITLARVELALEAAGLQPAVTNALGRFLTIEGSLPLGLNASPMIANLVATPLDHDLSALAKEWGLTYTRYADDITLSGDGELPTREIIETVLKRHFFRLNKSKFRTSKLGQKHYVTGLSVADKAAPHAPRAMKHKLRQELYYIEKFGFLEHLSRGGEGGTEQHNVNRLDGTVNYVSSIEPRLAHRLRAAWKKVCDENDIAKSFEPRPVIQLRPASWFVDEAEIVHPDGTRLLALCLADVLEPGRLDTELRTLFAEEAGDAFGTADPLSIIQKGLHWSDATWSQREAVVKLIAASPVRVMVAMAPLTSPSEYTTTYTDLLCEILETALKIADDAEIAIHVEENRSKVSKADVQGAVTRAYTELETKNQRRPLQAPEVNIVSKGATPCCCVPDTVLGALHRYAVSRKDGKEGSLAVTLFERLRNHYSVIFDHHANKIYHHRSPFKRW

SEQ ID NO: 7025 - protein, 371 aa, Pseudoxanthomonas sp.
  source 1..371: note = Related to CP059266.1
MGSAQPGHQACPQVCRTGTGALPLPARLPVSHEAAFGYVKGRSTRHNARRHVGAKRLLSADIQDFFPSITLARVELALEAAGLQPAVTNALGRFLTIEGTLPLGLNASPMIANLVATPLDHDLNALAKEWGLTYTRYADDITLSGDGELPTREIIETVLKRHFFRLNKSKFRTSKLGQKHYVTGLSVADKAAPHAPRAMKHKLRQELYYIEKFGFLEHLSRGGEGAPNSTTSIVWMARSTMYPASNRVWRIDCALPGRRYATRMTSPNHLSLGPSSSCDLLRGSLMRPRSSIRMAHGFSRSALPTFWSLAGWIQNYGRCSPKRPEMRSGQPIRCLSSRRGCIGVMRHGPSVRPWSSLSPPHLSGSWSPWRR

SEQ ID NO: 7026 - protein, 595 aa, Xanthomonas translucens
  source 1..595: note = Related to NZ_MADO01000098.1
MSLDNYVPQLSRPSSVEQLAKALGVATQIFTFIVENDDPERIYRRHLIPKRAPRRLPLVPVEDAGGIVEVSLDSFDFSRYRIVWEAQNPVIKVAHRSAARVLERYLSRPGSQYPHEAAFGYIKGRSTRHNARRHSGAKHLLSADIKDFFPSITLARIELALEQAGLNSTVCNALARFLTIKGSLPLGLSASPMIANLVATSLDHDISALAKEWGLSYTRYADDITLSGDGPLPAREIIENILKRHFFRLNKAKFRTSKKGQKHYVTGLSVADKVAPHVPRVMKRKLRQELYYIRKFGFLDHLSRSGGRGTEQHNVNRLDGTVNYVSSIEASFGYKLRSDWKGICEDNGISRSFEPRPVINLRHASWFIDEAEIIHPDGTRLLALCLADVLEHDRLNVELVTLFAEEAGDAFGTADSLSIIRKGLHWAEATWSQREAVVKLLAVSPFRAIVAVAPLPNPQEYSRVYTDLLKQILATALKTSDDAAVNMYVEENRSKVAESEVQIAVKTAYFDLEEKNQRRPLKLPCVNIVPKGATPCCCVPDILLGALHRYAISKKVDAESGLAVTLFERLRNRYSVIFDGHAEKIYHHRSPFKRW

SEQ ID NO: 7027 - protein, 571 aa, Stenotrophomonas maltophilia
  source 1..571: note = Related to JALBDV010000008.1
MARQIFEFIADNENPELIYRRHLIPKRAARPLPSVPIESMDGGVEFSLSGFDLSRFRVVWEAENPVIKHAHKSAARVVERFLTRPGTGFPHSASFGYVKGRSTRHNASQHIGRKYLLSADIKDFFPSITAARVQLALEEAGLKAVAAEALSRFLTVQGSLPLGLNASPVVANLVALPLDKELDEFARKLGLSYSRYADDVTLSGDQMLPSKDEVDQIFKRHFFRMNRVKFRTSKRGQKHYITGLSVADKFTPHAPRAMKQKLRQELYYIDKYGFSDHISRSRCGGTEQHNVNRVDGMVSYISSVEPRHSYRLRLMWKRLRTANNIERSFEPRPVIRFRQASWFVDEAEFTHPSGVPLLAVCLADVLDSARLDEVLASFIEEEAGDAFGSVDEVSIVRKGIHWVDATWSQREGLVKILAEAPIRAMVAFAPLRNGEDYSKVYLALLRKILGTALKVADDAIVKIYAEENRSKVRKSDVVDAVSSVHSMLADKNERRPLKVPEVNVVPKAFLPSCCVPDALLGALARYATSRSESDRGGLSVTLFERLRSRYSLIFDEYNSKVFHSRSPFVRW

SEQ ID NO: 7028 - protein, 595 aa, Xanthomonas hortorum
  source 1..595: note = Related to VCME01000027.1
MSLDNFYPDLTRPSTVPQLAKALGVPLDIFQMIMDCSDPSLIYRQHFIPKKVCSIMPGTPVANSDGTIEIVLPNHDLSRYRVVWEPTNNVVKFAHRSAAGVLERFVSRPNSQAVHPCAFGYVKGKSTRKNAQQHLGKYFLLSADIKNFFPSVSVARIEVALRVIGIKDEVVESLAKFFAIENSLPLGLNASPIIANLVAKPLDEDLLSLAEGFNCSYTRYADDLTFSGNESLPKKEDIEFILRKHRFKANQSKFRYSKRGQRHYVTGLSVADVHSPHAPRKMKKRLRQELRFIEKFSLDDHFSKIKKSGERQHEINRIDGTVSYVASIERKLGADIRIQWKAICDKEQVGRSFEPRPTTLLRSAVWFIDETEFDARDGTKLLALCLADVLDPQRLNIDLLTLFSDESGDAFGLGAAAGKMIHDGLHWVDSNLTQREKVVNVLSISPIRVMVAMDSVEGATYQNVYLDLLRRLINVNLRGADDARVHIVIESNKSKVPRQLVIQAVRDECALLEAANQRRPLEIPSINVEGKDWTPAMCVPDVFLGVLAQYANSKQKGQGEFIVSLMERLRNRFAVVFDEHEGAIYHSGNPFRRWS

SEQ ID NO: 7029 - protein, 503 aa, Lysobacter sp.
  source 1..503: note = Related to NZ_FNPT01000014.1
MNIDRFIHAHAPSFIHENAYGYIKYRSTRANASRHKGAKIIVSADIKEFFPSISIGHVEHALRKTGMKKETASLLAKFLTINNSLPLGLNASPTIANLVANPIDIEFTNLAKRINCTYTRYADDLTFSGDNTLPSHDEINGILGKFGFRSNERKFRASKRGQKHYVTGLSVADPKQPHVPRGLKRKLRQELYYIQKYGLKNHVEKSDSESTQRIINRLDGTISYVTSVESQLTRKLRSAWTSICQTEKVGRSFEPRPLHILRDAYWFIDESEIPRPDGSTCLALCCVELSANTIQADEASLTSLIEKETSDAYQTAKSSLHWAESTLSQRERIVDTLMPRLFSTFVVLENLSDEPYKDTYIRALKLVIDPILRRSDDAIVEIMIEANPSKISQQSVTSSIKDSYLRLVELNERRPVEMPKIRVEKKGARPALLLPDIMLGALSTYAKFQPGSNSTLEYSFFEKLRTKYTIIIDTAEKKLYHRKNPFTPWHTRNNTKIQPSKAE

SEQ ID NO: 7030 - protein, 573 aa, Dyella sp.
  source 1..573: note = Related to NZ_JAKWJS010000001.1
MNTAPPGSQQLFRLADVRTIDQLARALGVPLQIFQDVIACEDPQQIYALHAIPKRHPRNPEDYRIAWECRQEPVARSHKAVARRLDDFARRRPISYPHAAVHGYVRGGSTRSNAQPHCGARVAIRADIENFFPTITLERIEAMLRTIGMQAAPAKALARFVTIKGALPLGLAESPVISNLVCLGLDKDLQSLAEERGVRYTRYADDITFSGDANLPSREQLRATLAKHGFRLSERKFRKSKRGQAHFVTGLSISERDYPHVPRKLKRMLRMELHFCERFGIGFHAEKINEDFRKTYLRLEGMVKYVAYIERRKSKEINDQWQRVLAVHRGPTSHAKIESRKRDDRFVIADETEFTVDGVKYLAFCCVRIANLERVEEAIQILLGDYLTKPGAKGDLDVLQAVGIHYTDAHFDLRTKTLDLMTDFLSWSASIHFARLDSSSKYKDTYLKLFADSIRQELITSDEWTLHILVERNDKVKLPSLTRVMEAEYQRAATDGARRPSSLPSVQRVEKASTSSLTLPDFVLATFRNYAQLVPDDRVLDFERIRDRVRYIHDADRGVYYTRKKPFVGIGSA

SEQ ID NO: 7031 - protein, 574 aa, Thermomonas sp.
  source 1..574: note = Related to NZ_CP049872.1
MTTVSMQPCAHFRLADVRTVDQLARALGVPLQVFHEVIACQDPGLIYAMHSIPKRSQRNPDGFRVVWESRTEAVARSHKAAARRLDDFARRQEIGYPNPAVHGYVRGGSTRSNALPHCGARVVVRADIEDFFQTITLERVESAFRAIGIAPETAHSLALFSTINGKLPLGLPESPVVSNLVCLDLDRDLKALADRHGVKYTRYADDMTFSGNENLPSREEIRTVLLRHGFRLSDRKFKKSKRGQAHFVTGLSVSERDYPHVPRKLKRMLRLELHFCEKYGLATHAENRRESERKTYLRIDGMVNYVSFIERRKSAAIKGQWDRIRKKHLGSTLYARLAGKEIGDRFVVADETEFEVDGIGYLAICFVRLSNLEDVEKSLDLLLGDYLTKPGAKGNLDVLKKVGIHYADAHFDLRTMTLDLMTEYLQWSASICFSRLRTSDDYKEAYLRMFAELVKQEFVTSDGLRVEMLVENNDKIKLPALTQVCEAEYRRSESEDGRRPISLPSIRSVKKSEIRSLTLADFVLAAFRAYVLRAHDDRVLDFERIRDRVRYVRDSDSDNFYTRKKPFLGIGDVT

SEQ ID NO: 7032 - protein, 422 aa, Dyella terrae
  source 1..422: note = Related to CP089414.1
MLPARLLAKFVTINGLLPLGLPESPIISNLVCLDMDRELQAMADERDLRYTRYADDITFSGYANLPSKEDIRHLLTGQGFRLSDRKFRISKRGQAHFVTGLSVSERDYPHVPREMKRKLRQELYFCERFGLDVHAIEQGETSQKTFNRLYGLVNYVSYVERRQADRLHQKWGRIVRRELGEAAYATVQGREYRDIHLIVDESEFKIGEQKYLAICVVRLSELDRKQRVVRKLLLDYVTTLGAKGEIDALKDVGVHFTEVHYDLRTKTLDLMLEMLWSASVHFAKYESGEDYEFTWLKLFKEAMHQELVTADGIGLEVLVEENDKVSSSALKSIVDAQYQHMELAGSRRPRVKPDVKRVGKSDTPILTLPDFVLAAFRHNVLQVADERVLDFERIRDKVRYIHDHDLDAFYTRKKPFVEVGSA

SEQ ID NO: 7033 - protein, 589 aa, unidentified
  source 1..589: note = Related to CAADFF010000009.1; note = Candidatus Kentron sp. LFY
MARDPVAPFIVDFRKAKDTNHLATLIGCHAEMLDRIRNSATHQEFYREHRIPKRNRRRRGEYRVVWQAVSELAQIQKALLRKFENFARDTVDDYPHSAVHGYVTGRSTLTNARCHAGAKIIARADIKDFFPSISRARLEALLTELGIYQSVAEVIGGLATIDDGLGQGIHTSPFFANLVCIPLDQELSDLAGKYQAIYTRYADDLTFSSDTRVPDRIAIETVLQTHGFPLAKDKFRTTKIGQAHFVTGLSVSELDRPRIPYKFKHKLRQELYYSDRFGIMNHAERAGYRFPHHCINSIDGRISYLQGIEPELGVEMRQLWKSLLKRDGLFSTYLPTYKEGMRQIFKEVEGVSYFIDETETHFRGDVYLGLALVAVATGDVSTIEEAIAQTLDRFLHDPYASGRKEKLQKKGLHFTDDSEEIRTDFIKTIARFPIRAFVAYRKLSGITRKDAYLSLLRILVTDRLSDPLLTLNSTIIYEQLSEVPHKYFELTIHEVMGKIKERGGKFYQEPRIVCCGKRDQPCIAIADYLLGVFSHYATSEPPNETPRKRFERLRDKIRLIVDADEKRRFWRNNPFPGFSAMDGTENNLA

SEQ ID NO: 7034 - protein, 325 aa, Burkholderia stagnalis
  source 1..325: note = Related to NZ_LPLT01000066.1
MTTAKLRDLKSIDDVARACGVEADFIAEYAQSEYQSHFYNFLKLPKRGKRRKGEFRVVFAAKEERLRALHRSISMVVTNSAKFGNHVQGFMKKRSTRTNAEQHLGAKVLLHADIKGFFDSITTKHVRDAFISDGTDVSVAELLASACTIDGLLRQGTRCSPTIANLVCHDMDQAFLRLARAHDCVYTRYADDITFSGESVPSDDAVQQILESRGFELRDGKCYRQYRGRSQFVTGLTIADKSAPRLPKALKRRLRMIMHYIEKFGIADHFKHAGVFDPYREEAWLRGILIYARSIEPELVEKWQEILDRSIYDRSDYDEPIDDDY

SEQ ID NO: 7035 - protein, 316 aa, Burkholderia vietnamiensis
  source 1..316: note = Related to NZ_JAIZQK010000007.1
MKSIDDVARACGVEADFISEYAQSKYQKDYYNALKLAKRGKRRKGEFRIVFAAKEKRLRALHRSISMIVTNSTEFGNHVQGFMKKRSTRTNAKQHLAAKILLHADIKGFFDAITTQHVREALISEGAAVPVAELLANVCTIDGLLRQGTRCSPTIANLVGHDMDQALLRLARAFDCVYTRYADDITFSGASVPSDDSVREVLESRGFELRDAKCFRQYRGRTQFVTGLTVVDETAPRLPKGLKRRLRLIMHYIEKFGIVDHFKRVGVSDPYREEAWLKGILMYARSIEPQLVEKWQKVLDDAISEHPPYDDLIDDD

SEQ ID NO: 7036 - protein, 330 aa, Aquabacterium sp.
  source 1..330: note = Related to NZ_CAKKNB010000001.1
MTISKLRELKTIDDVARACGVEADFITEYAESPEQSTYYEALKLSKKGKRRSNEFRIVFAAHEQRLKQLHRGLSMVVANSANFGWHVQGFVKGRSTLSNAKQHLGAKVLLHADIKSFFDAITVDQVQAAFVEHGVLAPMAEVLAKLCTIDGLLRQGTRCSPMIANLVCFDMDQAFLRLAGATNSNYTRYADDITFSGDSVPSDDSVRTILKNRSFELRDGRCFRQHRGRVQFVTGLSVADTTAPRLPKRLKHQLRLVMYFIKKHGLDDHNNWVKQGYKSHPEITWLWGILNYAKSIEPTLVNQWQQVYQTAWEEQQAKRKERIKVKDWNP

SEQ ID NO: 7037 - protein, 346 aa, unidentified
  source 1..346: note = Related to NZ_CAKMLL010000115.1; note = Candidatus Nitrotoga sp. BS
MSSNPYIKTLLYPSRRCRPYMTIAKLKELKSLDDVARACGVEFDFIEAYSSSQNQKSFFNVLKLPKHGRRRKGEYRIVFEAREQRLAAFHRSISMIVTNSAVFGEHVQGFMKKRSTRTNAEKHLAAKVLLHADIKGFFDAITTEQVRNAFVTEGAAVRMADVLAKACTIDGLLRQGTRCSPTIANLICFDMDQSFLRLAHSHNCVYTRYADDLTFSGDQVPSDDSVKEILESRGFKLRDDQCYRQYRGRSQYVTGLTIADPNQPRLPTRLKRRLRLMMYYIDKHGLADHWRKVGVNDVIQEEAWLRGMLKYAGSIEPKLVNQWWQIFGEAWSNRTSYEPIPGNEEH

SEQ ID NO: 7038 - protein, 328 aa, Dechloromonas sp.
  source 1..328: note = Related to JADKBR010000003.1
MTTAILKNLKSLDDVARACGIERDFIEAYSNSLDQKSFYNVLKIRKRGRRRKGEFRIVFEAREGRLASFHRALSMIVTNSTVFGDHVQGFLKKRSTRTNAEKHLAANVLLHADIKGFFDAITTEQVRNALVAEGTALPMADVLSKACTIDGLLRQGTRCSPTIANLVCFGMDQAFLRLSRSHNCAYTRYADDLSFSGDEVPSDDSVREILESCGFKLRHDQCYRQYKGRSQYVTGLTVADPNRPRLPKRLKHRLRLVMYHIEKHGLTDHWNKVGVDEALRAEAWLSGMLRYAGSIEPHLVRQWQQIFDKARSNRDPYKPLPDCDEGQG

SEQ ID NO: 7039 - protein, 327 aa, Janthinobacterium sp.
  source 1..327: note = Related to PDZJ01000001.1
MTKAKLKDLTTLDDVARACGIEPDFILGFVKNTIQKDYFYVVKMAKRGRRRKGEYRVVFQAREKRLSDFHRSISMIVSNSACFGDHVQGFRKKHSARTNAEHHLGAAILLHADIKGFFDAITTAQVKTALISEGSPPPVAELIAKACTIDGFLRQGTRCSPVLANLVCVAMDQSFLRLARSHTCNYTRYADDLTFSGERVPCDEAVREILAADGFALRDGKCYRQFRGKTQYVTGLTVADPNRPRLPKQLKHDLRTTMYFIERHGLADHWERIGEEHPMKKEAWLQGMLRYAWSIEPNLVRRWQYILDRAFTERAPYIIDITDEDYG

SEQ ID NO: 7040 - protein, 367 aa, Burkholderia pseudomultivorans
  source 1..367: note = Related to NZ_LPJO01000032.1
MIQSALATVVDFSGYVRGRDSAVRSLENFLYPSTVATDMTQSRLSEIRDIGDLARATGIPKDFIAAYANSQAQSDAYSVVLIPKKGRKRRGHFRATFSANQEWLSQLHRGVAMIVLNSVDFGEHVQGFIKKRSIRTNAEHHLGAKQLLHADISNFFDSITTNQITQNLITVGAAPEAASLIAKSCTIDGLLRQGTRCSPILANLVCRSLDADMISLAQSIGAKYTRYADDLTFSGDQTPSSDSVDAIITQHGFTLRDGRCYLQQKGHRQYVTGLTVADTAQPHLPKRLKSRLRLVMHYIERNGVRAHFAHDCKRPIARNANELWGMLRFAKSIEPDLASTWLDQWKAGERIDSSKERRRLKKLARWL

SEQ ID NO: 7041 - protein, 323 aa, Burkholderia cepacia
  source 1..323: note = Related to JAIZRF010000030.1
MTQSRLSELHDIVDLARATGVPAEYIDSYANEATQADAYHVLRIPKKGRGRRGQFRVAFSAKEEWLAQLHRGIAMIVVNSVEFGEHVQGFLKKRSIKTNAAQHLGAKQILHADISNFFDAITTELVSESLVTVGVPPKMAVLIAKSCTIDGLLRQGTRCGPALANLVCRPLDADMLSLAAATGAKFTRYADDITFSGALLPTGDSVRAILNKHGFALRDDRCYIQRKGRSQYVTGLTVVDTVQPHLPKRLKARLRLVMHYVAKNGLQALFAQHHDRPIAQSESELWGMLRFANSVEPALAAKWFAQWEAGELVDAQRGPKQAA

SEQ ID NO: 7042 - protein, 332 aa, Undibacterium sp.
  source 1..332: note = Related to JAKZHX010000030.1
MTKTKLVDLKTLEHVAQACGVSAEFIVQYANDQRQRDYYFRIKIPKRGKNRNRQFRIVFQAKEYQLASLHRSVAMIIANSVQFGEQVQGFRKKRSSRSNAQQHLAKAVILHADIKSFFDSITTEQVHVAFVSQGVSNEIAQLLAKACTIEGLLRQGTRCSPILANLVCAGLDNKLLALAHSCHSVFTRYADDLTFSGDQVPSSAAVKTIVESEGFTLRDDKCKLQRQGRCQYVTGLTVSDGNMPRLPRRLKSRLRLIFHYIEKNGLTEHWQKTGQKNGRRKEQWLDGMLQYAASIEPDLANKWQDILTTAKVQKAATARQKYFVDCGIDDID

SEQ ID NO: 7043 - protein, 308 aa, Pseudomonas shirazica
  source 1..308: note = Related to NZ_JAJSLV010000001.1
MTTTKLLDIHDLAELSYAVGVRAELIEEYLTAPRQVDYYEVIRIAKRGRNRKGEYRQVYKAKSNWLSQLHRSISMIVTNSVEFGEHVQGFLNGRSTVSNAKLHMRKDIVVHADIKDFFNAITEAQVCQSIMSLGCAQFIASIIARACTIDGRLLQGTRCSPVISNVVCRNLDLDMLELARATKSTFSRYADNITFSGKAPPNKENIEAVVNARGFILQPKGCYVQYRGSRQFVTGLSVVDGVMPRLPKQVKKKLRLIAYYVKKYGDGHFEFSSGNHSIAPTRTQLEGFIAYAHSVEPEFAKKLWSMVS

SEQ ID NO: 7044 - protein, 308 aa, Pseudomonas sp.
  source 1..308: note = Related to NZ_CP027729.1
MTTTRIEDVHDLAELSFAVGVKAELIESYLNAPWQAHHYQIIKIAKRGRNRQGEYRQVYKAKNKWLAQLHRSIAMIISNSVEFGEHVQGFLAGRSTVSNAKLHMKKDVIVHADIKDFFNAITEVQVCQSILALGGNLLIAQILARACTIDGYLLQGTRCSPVLSNIVCRRLDSDMLELARTTKSTFSRYADNITFSGITPPAPENIEAVINGNGFQLQAKGCYVQYRGARQFVTGLSVVDHERPRLPKKMKKKLRLIAYYIKKHGDGHFEFPSRSHSIAPTRAQFEGFIAYAHSVEPQFAKKLWSMLN

SEQ ID NO: 7045 - protein, 308 aa, Pseudomonas sp.
  source 1..308: note = Related to FMUZ01000023.1
MTATKIDDIHTLDDLSLVVGVKAQLIQQYVHAPCQADYYQIIRIAKRGKGRRGEYREVYKAKEFWLAQLHRSIAMIIANSVQHGQHVQGFVYGRSTLTNAQYHLLKKIIVHADIKNFFNAITESQVEQAFLTIGGHSSVAHILARVSTIDGRLLQGTRCSPAVSNIVCRNLDLQMLEVARVTSSVYTRYADNITFSGDKPPSSSNIEAVVKGCGFELQGKGCYTQHRGARQFVTGLSVVDDERPRLPKQMKKKLRLIAHFVKKYGDEHFEFSADSSSIAPTRTQLEGLVAYAYSIEPQFAKKIWSMIN

SEQ ID NO: 7046 - protein, 308 aa, Pseudomonas syringae
  source 1..308: note = Related to FOTU01000012.1
MTTTKINQIHSLEELGCAVGVPVSDIKTYLNSNRQVSFYRKLRIPKRGKARKGEYREVYKASEAWVAQLHRLMALIIRNSVEFGLHVQGFVDGRSTISNARQHMKKEVIMHADLKDFFNTITEVQVAEYFLAIGAHPEMAPVFARLCTIDGYLLQGTRCSPAVSNIVCDRLDSDMLRLARSTSSVFTRYADNLTFSGDNPPSAKQIEGLVEANGFKIRGTGCYSQHRGSRLFVTGLSVVDQERPRLPKQMKKRLRLIAYYVGKYGEDHFEHSEHARSIAPSLTQLEGLLAYAYSVEPQFARKIWAMLN

SEQ ID NO: 7047 - protein, 309 aa, Pseudomonas sp.
  source 1..309: note = Related to PPYB02000023.1
MTSVKIADIQTIDELCLAIGANREEVLQYLQSPRQVDYYELICIPKRGKRRRGEYREVYKAKYQWIAQVHRSVAMIIKNSASFQECVQGFLDGRSTLSNALLHMGQEVIVHADIKDFFNAITELQVKDAFSVMGASLIIADILARMCTIDGFLRQGTRCSPGISNLVCRRLDLDMLGLANSKSSVYSRYADNITFSGCSPPSYNLIKAVVENNGFELRGSGCYTQYRGARQFVTGLSVVDDKMPRLPKKMKKKLRLIVYYVSKYGEEHFEASAGAHTITPTMTQLLGMIAYAYSVEPVFAKKLWAKLAP

SEQ ID NO: 7048 - protein, 311 aa, Pseudomonas aeruginosa
  source 1..311: note = Related to NZ_LR134308.1
MTTRRLKDIHSAHELAQAVGVSESKILDYAVSDCQEGFYEKLEIPKRGRNRKGEFREVYKANHKWVTQLHRSVSMLVANSASFGTHVQGFLKGRSTLTNAELHLRKSLILHADIRNFFNVITEPQVAKAFLTIGATPEISKLLARISTIDGFLRQGTRCSPIISNLVCKGLDQAMLDLASTHDCMYSRYADNMTISGAEIPDISAISTIVTNNGFELRGSGCYIQRRGSRQFVTGLSVVDRERPRLPKKLKSRLRLAVYYASKYGKEHFERSRHVDTVTPSWAQMKGMIAYAHSIEPDFAEKLWKLLRHSR

SEQ ID NO: 7049 - protein, 311 aa, Pseudomonas aeruginosa
  source 1..311: note = Related to NZ_RAFS01000009.1
MTTRRLKDIHSVEELAQAVGVSVAKILEYAVSGSQEGFYEKLEIPKRGRNRKGEFREVYKASYKWIAQLHRSVSMLVTNSVSFEGHVQGFLKGRSTLTNAELHLRKSIILHADIRNFFNVITECQVAKAFLTIGVKSEVAQLLARVCTIDGFLRQGTRCSPIISNLVCKSLDQAMLDLASTHDCIYSRYADNMTISGEQMPDIRVVAQIVKDNGFELRDTGCYTQLRGARQFVTGLSVVDREKPRLPKQLKRRLRLIVYYASKYGREHFDRSRQVDTIAPSWTQMEGMIAYAHSIEPEFANKLWKILRKSR

SEQ ID NO: 7050 - protein, 334 aa, Archangium violaceum
  source 1..334: note = Related to NZ_JPMI01000298.1
MALTPFSRIRHVGDLALHLGCSPEELLHFANTQPQRQFYDLLRIPKRRGRDKVRIVYRANEESLARMHKTLAGELAPQEGEDFDECVQGFVRDRSIVTNARKHLGCKVLLHADIQNFFESITLAQVMSVFETLGCNSGVAALLGRLCTLDGFLPQGAHASPALANRVCLHLDTDLKQLAARHGCVYTRYADDIAFSGDEVPEPQRVEAILNKHGFKLRAEKCRIQRRGHSQFVTGLSVADTQGPRYSRQAKRWLRLVLHYASRYGLENHLKRTGRGSANPKLAYAELEGMVRFLRSVEPRTTERMNPLLAEIGFRLHADAREEAHEGEDENGEP

SEQ ID NO: 7051 - protein, 328 aa, Myxococcus sp.
  source 1..328: note = Related to NZ_CP071091.1
MTGVEFPFKTIRDERDLAQHLECEANTLLFLADPSRQHEFYAELRIPKRKRGGFRLVYRSREDVLSRIHKALAVAVADAARFRPCVQGFVKKRSIVTNARQHLGKQLLLHADIEHFFESIRLPSVISCFQSLGCRPQVAELLGRLCTRKEVLPQGAHASPVLANIACRHLDQDFEQLAEVHGCTYTRYADDLTFSGDEVPEEGNIQSILAGYGFKLRDGKCRRQQRGRGQFVTGLSVGDPVGPRIPKKMKRQLRRDLHYATRYGLEDHLRHVGRPTVDPWEEYSVLEGRTRYLASVEPKIASAMWKQLVRIRAQLDKSADTGSEEAPS

SEQ ID NO: 7052 - protein, 325 aa, Polyangium fumosum
  source 1..325: note = Related to SSMQ01000014.1
MWMSLRNFAFVRNIQDLSRELGCERAQLEEYISSRQREFYKEMRIPKKGRRRREFRTVYKPCRELAVLQKNIATLLQRNPLPEYVQGFVSDRSIYKNAKIHIGQKILLHADIHEFFESITLERVRDAFETCGSNREVATLLAKLCTLDGFLPQGSSASPVLANLVCRHLDTDINALAISYGCRYSRYADDITLSGDRVPPAESVENLLKRHAFELRPGSCRTQRRGHGQYVTGLSVEDAVPRIPRRMKRRLRLVLRLARSAMQHADLLLSETKIDGWLAFFHSVEPNLASKLSAEWDPIRARLNNRHTGSPDDPSEEVTEEEPSD

SEQ ID NO: 7053 - protein, 307 aa, unidentified
  source 1..307: note = Related to SECP01000091.1; note = Myxococcales bacterium
MLPLRFSDLRSVQLVCAHLQTTPRALQSFLREPERYYTPIDLPQAPGRRPRRVFEVGAPLRRIHRVLAVALAPHVDAQPSYIQGFRSGRSIRSNAAMHVDAEVVVTADIRGFFDEIDVERVTSLFQSLGATFQAATLLARLTTFQGHLPQGGRASPAISNLAVPDLDKALVRLGGRCAYTRYADDLTFSGSAAACPTEEQIRRVLESSGFQLRPRSFRRQLKGSGQIVTGLSVVSGSPTLTRRTRREIERALYFGARFGLSYHASRAGSERSPQREFARLCGHIAAAGGVDKTLHAKWVKLLESVNL

SEQ ID NO: 7054 - protein, 322 aa, unidentified
  source 1..322: note = Related to VBKH01000045.1; note = Deltaproteobacteria bacterium
MEHVKFDQIRNDEDLARNFGCKVNDLRRLTEGDQRLLYLTIRIPKRGAARRGQYRIVYKALDQTLRLLQKNLASSIAARVTFADHVQGFVARRSIVTNARRHLARKYVLTADIENFFESITIERVAAAFRGLGCHEGVAQTLATLATLNGHLVQGSSASPVLANLVCEGMDADLLALGGSYDCTFTRYADDITLSGDERVPSGEEIADVLARHAFVLRDGRVRVLRRGRRQYVTGLSVFDAERPRIPRVHKRRLRLLLHYASKHGLEKHFERIGIEPENRYRELRRMEGWIQFMRSVEPRRAAEFAAQLDDARAADARGLPK

SEQ ID NO: 7055 - protein, 334 aa, Nostoc sp.
  source 1..334: note = Related to JAIVFX010000002.1
MIELNFKALENIDHIARAVNCFPSFINIVLERPSLFYTLKKIPKRGKRQKGQYRIIYEVESELNIIQKNISTAVTSKQQFPEYVQGFVSKRSIATNASLHLSQKYVLNLDVKNFFNSITQKQVSDVFKELGCTEKSAEIFTKLCTFNGHLVQGASTSPVLANLVCKELDQDFAGLAQQYNCSYSRYADDITFSGDLTPRKKDIEKCLNKYKFELNPAKWKHQRRGRSQYVTGLTVFDNTKPRIPKFIKKQLRQILYYASKYGWDNHQYKVNSHNHKNMYYDIKRIDGLIAFMYSVEPDRAFEFDLQWQKILKEEGIVDEQERDPYAIFARHSPV

SEQ ID NO: 7056 - protein, 340 aa, Sphaerospermopsis kisseleviana
  source 1..340: note = Related to AP018314.1
MIQLDFQSLEDIDTVAMVLGCFPSFINTVIDTPSRFYTLKKIPKKGKGQKGQYRLVYEVDSELNVIQKNIATAIASKIQFPEYVQGFVNKRSIATNAALHLSQKYVLNLDIKNFFDSINQKQIIEVFKEIGCTETIAEIFARLCTFNGHLVQGASTSPILANLVCKELDQNFVELAKKYNCSYSRYADDITFSGDITPRKKEIEKCLKKYGFELNPVKWKGQPRGKSQYVTGLTVFDNTKPRIPRVIKKQLRQILYYASKYGWSNHKYKVSICIQKNMYYDIKQIDGMIAFMYSVEPEQALKFDLQWQKILKEQDIDYVKGRDPNVIFARRSQVQTDISE

SEQ ID NO: 7057 - protein, 340 aa, Nostoc sp.
  source 1..340: note = Related to VJOX01000264.1
MINIDFTTIEEISQIEIAFGCSIGFIQTVLDKPSLFYDQLQIPKKGRGQKGKYRIVYKVEDELNLLQKNIATVINSKISFPEYVQGFVSKRSIATNASLHLSKKYVLNIDIKDFFDTIHQQQVCEVFKNLGCVDKIADVFAQLCTFNQHLVQGSSTSPVLANLVCQELDEAFVDLAKQYNCSYSRYADDITFSGEKTPGKKEIKRCLKNYGFELNSNKWKSQSRGRSQYVTGLTVFDTTMPRISKSLKRILRQILYYASKYGLENHLNRVHDFNHKNMRYDIKTIDGLIAFMYSVEPNRALQLDMEWQRILNAQEAEQAESSSRKGKRNPEVIFARRSKL

SEQ ID NO: 7058 - protein, 330 aa, unidentified
  source 1..330: note = Related to SCQE01000079.1; note = Nitrospirae bacterium
MRRIEFSEIRNIDDLAKCLSCTNEDLRRLAFDATSAKHCRKMLIPKKNKSGHRIVYKSFDKSLSLIQKNLETTINHNEIFPECVQGFVRKGCIAKNAGKHLAKRYVLNADIEDFFESIGMLQIVNAFKRIGCNDDIAIMLSRLCTLDEQLVQGFSTSPVISNLVCHGMDEDFVTLSKQYNCTYTRYADDMSFSGNAVPTQGDIEDILSNHGFKLNKKKFFLQKRGDKQYVTGLTVFDDKYPRIPKRIKKKLRLTLYYADKYGLLNHFEKIGIDWSFVDWEINKIDGWIAFMFSVEPALAKNFKAKWNIILDEHKKSMSSESGAYNVFPEN

SEQ ID NO: 7059 - protein, 318 aa, unidentified
  source 1..318: note = Related to JADLDG010000084.1; note = Nitrospirae bacterium
MKKIKFSKIRDVNDLARSFGCSKDDFKIIESPSEAVSHYSRMLIPKKNRKNAGSYRVVYKVLNPKLRLLQKNISTALEYACFFPEYVQGFVRGRSIATNARHHLAKKCILNLDIKDFFESISQDRVIRVFEHIGCNSEIASILAKVCTINGYLPQGTSSSPIIANLVCKDMDEELNSLAMSYSINYSRYADDITFSGDACPQREEIEVILGRNNFRMNNEKFVMMKRGQNQYVTGLTVFDAESPRVPRKIKKQLRLILYYSKKYGIEDHLERIFADKVGCPYKKEFEKRKIEGWIGFLCSVEPPLGYKLKEQWLEIVK

SEQ ID NO: 7060 - protein, 366 aa, Chryseobacterium sp.
  source 1..366: note = Related to NZ_LT545989.1
MKHTELSTKKDLANYLRCDLLFLEKAIEDDYFIRNIDTFNQEDVLLASLTSLNNNIISVDQFKLRKKGHNGGFRTVHKIWTLQLKNSLKILNNHLIQIFTPLDIVHGFVKGKNIRSNAECHLAKKLVLSVDIKDYFETITEKMVEEALISIGYNENIALWIAKIVTIDNHLVQGFCTSPTLANIVTNQLDKELKKLCGKKITYTRYADDLYFSSNTEEIPLESIKLTIEKHNFLLNDKKTKFMKRGQKQYVTGLTIFDSYIPRISKKRKKNIRLEINYIERVGYRSHTVHKLIKEGEDPDSLDFYSKLGEEIKLTRNRLYGWLHFIQSIEPQFAKKYYKKLNDIDQKYILMAKLNALKKNARNSDI

SEQ ID NO: 7061 - protein, 361 aa, Elizabethkingia meningoseptica
  source 1..361: note = Related to CP016378.1
MKHTELSTKQDLANYLRCDVAFLEKAIEEDYFIRNMDTFDPEEILLSSLKSNISVYRFKLKKKGQNGGYRTVHRIWTAQLNNSLKILNAYLTQIFQPLEIVHGFVKGKNIKSNAQSHLAKKIILSVDIKDYFETITEEMVKNGLMSLGYREDISLWIAKITTINNQLVQGFCTSPTLANIVTHKLDKDLKKLCAKDVTYTRYADDLYFSSDTKEIPLENIASLIEKHSFVLNNKKTKFMKRGQKQYVTGLTTFDSNIPRISKQRKKNIRLEINYIKKFGYTAHAKHRLIKRGEDPNGLDFFNKVGDEITLTRNRLYGWLHFIQSIEPQFTKKYYRKLNDVDKNSVLNSSLKEILKQFRQNM

SEQ ID NO: 7062 - protein, 365 aa, Chryseobacterium indoltheticum
  source 1..365: note = Related to CP033929.1
MKHSELITKQDLANYLRCDLEFIEKIIEDDYFIRNLDRRNIEELRSALTSNKILVDRFNLRKKGQNGGFRTVHRVWTAKLNNTLKILNHYLVKIHQPSEMVHGFVKGKNIRSNAECHLEKKIVLSVDIKDYFETITESMVTNSLKKLGFKDNVALWIAKITTIENQLVQGFCTSPTLANIVTHSLDEELKSLCGSNIRYSRYADDLYFSSNTDILPLDDIQLAVEKYGFLLNEKKTKFMKRGQKQFVTGLTIFDSHSPRISKNRKKNIRLEINCITKFGYTAHAKHRLIARGEDPKDLGFLSKLGDEVTNTRNRLYGWLHFIQSIEPQFAKKYYKKLNDVGENSVLRSTQALEILLQIRAGQKES

SEQ ID NO: 7063 - protein, 342 aa, Flavobacterium sp.
  source 1..342: note = Related to JAJQXA010000019.1
MKHTEIETRQQLANYLRCNIHFLEKAINNEFFIRDTKISEDVIPTISIPPSEITVSKYYIKKKGKNGGFRIVHHIWTYQLENSLKILNNYLNEIFIPFDFIHGFVKGKNIKTNADTHLAKKIILSVDIENYFESISKEMIILGLCKIGFKEEIAESIASIVTINGFLPQGFCTSPTIANIVTHDLDQQLKKICGTNIQYTRYADDLYFSSDIENIPLLEITKIIEIYGFILNENKTKWMKRGQLQYVTGLTTFDSNTSRISKKRKKNIRLEIYYLTKFGFRKHIKNKLIKSGENINAEDFEYKLIDEIDKTRNNLFGWLHFIKSIEPEFSAKYYSRLKKAKR

SEQ ID NO: 7064 - protein, 336 aa, Flavobacterium sp.
  source 1..336: note = Related to SEBM01000517.1
MEHNEIDTLKDLANYLRCDIEFLESAVSYEYYVKDAGVDFKDSISKIIVSKFNIAKKGKTGGFRTVYQCWSHFLSSSLKILNTNLNEIFIPNQFSHGFVKGKNIQTNASCHLGKKLLLSVDIKNYFESISKDRICKSLEKLGFKKHVAEWISNITTLNNHLPQGFATSPTLANIVTQELDNELSLLCGDLITYSRYADDLYFSTNLDEISLAEITSIIENYGFNLNSKKTKFMSRGKKQYVTGLTVFDVKYPRISKRRKKNIRLEIYYLSKFGYKRHIRKKLIKSGMNPKDPDFKSHVSVEADITRDKLYGWLHFINAIEPDFAKKYYPKLKKAKQ

SEQ ID NO: 7065 - protein, 345 aa, Flavobacterium sp.
  source 1..345: note = Related to PRDM01000001.1
MKHSDLRTINDLANYLRCDVAFLERATSNEFDVLDLANGDKLKLSPSGVTVTIARIKKKGKKTGFRKVHKIWTDEFKNSLKILNNYLREIYIPKDCVQGFIKNRSIKTNANLHLGKRLVLSVDIKNFFESIKIKMIVSGLTELGFQKSIAEFISEFVTIEGSLVQGFSTSPVLANIVSSKLDLELIKFCGNSLIYSRYADDLYFSTDDNEIELDAIEKIISSHGFSLNHDKTKLMKRGQLQYVTGLTVFDSDRARISKQIKRNLRLEIYYITKFGYRRHIRVKLKKEGFDSSLEHFRLFVNEEIEATISRIFGWLNFIHSVEPDFTAKYYKTLIKIKPNYYRKLN

SEQ ID NO: 7066 - protein, 361 aa, Myroides odoratimimus
  source 1..361: note = Related to UGQP01000001.1
MSSYPIIRINYYLPYPNAHLYIFDMNLLEINTKKQFLYLLRCRESFLNLINSREYVIIDYTKNENVDVEISEGTIVIERFYIEKRNPTLGYRTIFKSLNFELDSCQKILNSLLLDVYTPLDCVQGFVQKKNIKTNASVHLAKKQILRLDIKDFFETITKEQIIESLIKLGVNIQISEWISNIACVEERLVQGFSSSPILANIVAREMDLDILKNIDSTINYTRYADDLYFSSNLSKPNLELIVDSVIKFGFKINYAKTKVMKRGQKQYVTGLTVFDGLFPRIPKKIKRELRLEAYYIGKYGYEEHIIHKLKIKKHQLKDKETQRLVVNEIDITRHRIYGWLHFINSIEPEFSKKILTELKK

SEQ ID NO: 7067 - protein, 342 aa, Flavobacterium gillisiae
  source 1..342: note = Related to NZ_FNRD01000015.1
MDLLQIETKKEFLYFLRCRESFLDSVNLREYVIIDNKKNKNVDFEILENTIAIERFYIEKRNPTLGYRTIHNSLNHELEHCQKTLNTGLSNIYKPLGCVQGFVLKKNIKTNAFVHLAKKQILTLDIKDFFETITQKQIIESLTKLGINIQVSEWISNIACVNGYLVQGFSTSPILANIVAIEMDLEIFKNIDETINYTRYADDLYFSSDSTQMSLELITKIITKYGFEINNSKTKLMKRGQKQYVTGLSVFDHNYPRIPKKIKRELRLEAYYIGKYGYEEHIMRKLKIKKHQLKHQEIKGLIINEIDKTRDRIFGWLHFINSIEPNYSKKITQELKKTSANR

SEQ ID NO: 7068 - protein, 328 aa, Flavobacterium akiainvivens
  source 1..328: note = Related to NZ_LIYD01000005.1
MENRDYYIFEEYSEAVVSTAINIKRFHIPKKNPALGHRTIHKPFTGNLEFCLKLLNSEISKLFVPGIAVHGFVAKRNIRSNAYSHLSRKYLLSVDIKNFFESISSPQIVESLVKIGVNRDIAESVTSVVTINGLLVQGFSTSPTLANLVAKEFDDDIQMFVGADITYTRYADDLYFSSDTSLPEVDKIEAILTQYGFSLNHSKTKYMPRGKAQYVTGLSVFDKAYPRIPKKIKRNVRLEIHYIKKDGFKVHIIKKHKIDEDQVPKDILDAIIEFETYNIKQNLFGWLRFINSIEPAYAQKYLAELSEIERANSLDKVELNEINPNITL

SEQ ID NO: 7069 - protein, 359 aa, Zhouia spongiae
  source 1..359: note = Related to NZ_CP094326.1
MEKHKLVTLVTASFYMKVSDINNLNLLANYLKLDKNLLKTICENDYIGLSAREILKYRADNSDLTLVIKKIKIYKKNGGIRTVYSPVSDSVINCLKVLNKKLSKIYVPSKNVFGFIKGRSVQSNASQHLGKKYVYKVDLKDYFECINSDMLEKAFMRLGFNKAVLDCLCKIVTINNTLAQGFHTSPTLANIVFIDLDNVFSNISKNITYTRYADDLYFSSDEEFEIHDFIVENLKKFGFEVNESKTRMMKRGSKQYVTGLTVFDPDYPRIAKRIKKKIRQEIYYIKKYGYKGHVMHKLKVKNKDYKTNEDVKNKVDLAISELQSKINGWLLYINSIEPKFSKKYSEFLYKKSFKPISNN

SEQ ID NO: 7070 - protein, 336 aa, unidentified
  source 1..336: note = Related to NZTP01000094.1; note = Proposed Altibacter sp.
MKPTEINTTKRLVNYLKLDEMSFKLMTNNDYVVINDVENEIEIPDALKIRKLNISKKNGGKRVVYSCQSDVLSNTLKILNSNLNSLYKPPTSVHGYVKGRNIKTNATKHLTKKYVLVLDIENYFDTVKSSLVEQSFKDLGFTTDTAAYLTKLVTFQSALVQGFNTSPTIANIVFYPLDKKMEKLDKNITYSRYADDLYFSSDKEFNIEAKVQEIISEFGFRINKPKSKLMKRGWHQYVTGLTVFDKESPRISKKTKRKLRQQIYYINKFGYRSYVLYDLEKTPQDYFSSSSLRDEVDSKIEYLQRKLNGWLLFINSIEPRFAKKYSDLLTHRKIEP

SEQ ID NO: 7071 - protein, 344 aa, unidentified
  source 1..344: note = Related to DNSL01000055.1; note = Bacteroidales bacterium
MKQINSSYLNHCYFIMSHKKIDTVKKLSNFLNIEKEILSELSKNDYIIIERNNSSTDILNNVLTVEKIEIPKKSGGFRVVYSPSSDNLTNCLKVLNSKLRKIYVPSSCVHGYIKGRGIKTNASEHLGKQYILKVDIENYFEKITKERIIKSLNNLGFQNEISSLIAKITTHNNVLVQGFHTSPTLANIIFHELDLIFSKFTNASYTRYADDLYFSSKEEIDILSKVEEQLLKFGFTINKSKIKLMKRGQKQYVTGLTVFDNKKPRISKNKKKEIRQQMHYINRYGYKGHIMHEFGISNEEYLNNDEIKENVDYKIHELKTKIKGWLLFINSIEPEFSKKYITLK

SEQ ID NO: 7072 - protein, 334 aa, Salegentibacter sp.
  source 1..334: note = Related to NZ_JQNQ01000001.1
MKLEEIVNIQLLANHLKIEKESLQFIVDNDYITEITSKKDFKKGCLINEIKIKKRSNGYRYVYSPVSDILVNTLKILSGKIKELYKPTEYVHGFVPGRNTKTNAQEHLAKRVVYCVDIDKYFENIDIEKVKSAILSIGYNEYCSDKISKIVTHKNQLVQGFHTSPVIANIVFHEIDLKLSRLGDENVSYTRYADDLYFSTSGRINFEKDIEDILNSYGFKVNSKKTKFMIRGRSQFVTGLTVFDEMYPRIPKKIKRSIRQKIHFISLFGYRGHVLHKLNIEKQLYDQNEEIQKHVDSKIYLEKLNIEGWLNYINSIEPDFSKKCYSKLSKKDNP

SEQ ID NO: 7073 - protein, 341 aa, Chryseobacterium ureilyticum
  source 1..341: note = Related to NZ_FTOL01000001.1
MNPQIITDTKQLSNALRINEESLNELSQNEYLIDDTCAKTFNLHPDSILNLKKFCIPKRNKKFGEREVYEPIAETLKNLLKVTNSGLNKVYVAPTSVHGFVKGKNIRTNATPHLEKKYLLSIDIENFFESINKEMVINCFKEYEFIESIAKVLANITTVDNKLIQGFHTSPTIANMYFKKIDLIFETVFPNLTYSRYADDLSFSSNEEITVTQVTDIIKIINDFGFSINHDKTKIMKRGRNQYVTGLTIFDGTLPRVPKRIKRKLRLQIFYINKYGYRNHILKKLGRKPHEYFKNSRVKESVDSYEDYLHNNIVGWLMYIKSIEPQFAALHLELLNNRRRD

SEQ ID NO: 7074 - protein, 324 aa, Flavobacterium sp.
  source 1..324: note = Related to NZ_CP089096.1
MDLKLLNTLIDNEYIINDYCSGEVTLKFDFTILDVDRFCIPKRNKELGHRVIYKPMSESLKNCLKILNINLNGIYSPPISATGFIKGRGIKSNAEKHLKKKYILSIDINNFFETINKEMVIEVLKDYGFIEEIALKISKIVTINDKLVQGFHTSPTLANMIFKKIDLIFEKLDENIEYSRYADDLTFSSDSEITYLSKITEIIESFGFEINNKKTKIMKRGQNQYVTGLTVFDEQYPRIPKRIKKKLRLEVYYINKYGLRNHTLKKMKVNWKDFFGDELIKKKVENMEGLVHDYIYGWLVFINGIEPVFSEKCFELMRTRKIDV

SEQ ID NO: 7075 - protein, 362 aa, Butyricimonas sp.
  source 1..362: note = Related to DPHQ01000053.1
MYIPSEINNVNKLAGVLRCEISQIDNLVNKVVPRSEFGELFEKVHFDGLPFHFEVSMPEDFILEIKLPKRKVHLGYRTVYSVLPHFASSALKVLKFYLNDLYVPNDCVHGFIKKRNIVTNARMHLNKKLILNVDIKNFFESINLDMVRGVYEKLGFQKDIAEILSNITTLNGRLVAGFSTSPVIANLYCNEMDEELMHVCSQNNITYTRYADDITFSGDKIDILSDVGEILRRYGFEINKSKTRYYYRGNGQYVTGLSVEDTVKPRVPKYVKKRLRAEIYSICKYGLKSNVARILGIDEGGVDETMLKKRAAKIIGWLSFISSIEYKFAKDCFDHLLRIDNARDSYYIMNALEHVSSKIKRF

SEQ ID NO: 7076 - protein, 337 aa, Alistipes sp.
  source 1..337: note = Related to JAFWXU010000033.1
MYKPQDISSPLLFSGFLRCAEKAIPILKSKSEGVLEMNIPKHNPKYGYRKVYKATSQLLSYTLKQLHFELSNLYKPQSCIGGFTRGRGILYNASPHINKKVVLNIDIKDFFESIPFELIVSTFVRYGFTSEFANDLAEIVTYNKVLVAGFNTSPIVANMCCEDMDAKLLALCSAHQISYTRYADDLSFSGESIECVEDIKAIIVQYGFIINDKKTRIYRKGGPQYVTGLTVVDEKCPRIPRRIKRELRSDIYYIVKYGLESHIRYKYHLDIHIFDRYYMGDLCLNEARKIVGWIHFINSVEPMVAKRLNEMLFNKRHEDLGYFINAYGYIENLTDLK

SEQ ID NO: 7077 - protein, 363 aa, Flavobacterium cupreum
  source 1..363: note = Related to NZ_QWDM01000016.1
MYSPSAIENFEMLSSYLRTTPDQLSKLAHGQRLIFDFKSESLLVNPPEIIIRENVTVFRKFYIPKKNKKLGYRVVYKAHKQFVKDIHKTLKFNLTNIYTPHTCVHGFIPGKNIRSNALVHLEKKHLLSLDIKNFFESIDKKSVSAAFISLGFNKSIASDLSVICTLEDKLVQGFPTSPIIANIVCTKMDEEIQNLCWVYGATYSRYADDLSISSNFDMPPVEEIELILKSFNFELNAIKTKRFLRGQNQYVTGLSISDSAYPRIPKAIKKRIRQQLYYIRKYGYHSHICKIKGLDKETDLSITKQYVREIENKLKGWISYIHSIEPLLAEKYFDIFNEIQSIEYAEVIKLLKRDPQIRRFKSK

SEQ ID NO: 7078 - protein, 355 aa, unidentified
  source 1..355: note = Related to JAIPBW010000053.1; note = Bacteroidales bacterium
MYQPKEIANLDLLSGYLRTHKHDLNNFVSGVRAVYQQKSGKICVYNHIKSWKDIDVQYDKYHIPKKNPKLGYRIVYEIRTLSALNILKVLKFNLSTLYKPHVSVHGFVLGRGVFSNAKQHLANYYLLRTDIKNFFESINIDMVYEVFIDLGFIPEIAEVLSKITTLDNHLVQGLPTSPIIANLVLKNMDTELKSLCKKYNAVYTRYADDISISSNSDLPPLKEIENIVNKSKFKLNTKKTKTFKRGQNQFVTGLSICDNLYPRIPKKIKRKIRQELYYIKKFGYESHICKKFDFDEENYNEDFVSEEKRKLEYRIKGWVDYIHSIEPKVAENFYNDLKVIQDNEIKKMDEYGDAF

SEQ ID NO: 7079 - protein, 579 aa, Sulfurovum sp.
  source 1..579: note = Related to JAIZPA010000026.1
MNLNQLNSLDIISKSFNIPLKFLQSISKNEKNIKYIELFDIPKKNPKRTKKYREVIKINSPYNLFYKELLHIIEQEIEQNKAFFISNIAHGFIKERGVLTNAKQHLNKKYLFKIDIKNYFKSITKASIKSVFLKLRFSENGAEIFSDLCTFEDVLYEGFNTSPILANLYCLNLDLELKSLADEYKVGISRYSDDITFSSNNNNFPPLKAIQDIFDKYNFKINEEKTISFKYGQPQYVTGLSISNNKYPRVPKRMKRKIRQELYYLNKYPENYFNIEDGYARLRAIYGKIVYIIGIEKILGKRYQSDFINILENNNIYLENLYMDAPQKKSGMCTYHYIDESETPDKKTLILSLVSINGNFLKNTIFNKLTLLQNDLVSDLRNGLTDNQKSKLFHYCEDNITVKERYISILRELNIEAQIMFKSEQESMDKLGKEVYQNNYYALFNSLMKNILRRYKNNTNMITVEENSKISLEKLKEIVLSKGSFFPNTIIEKSGKDDILLSIPDYILGIVRDCMENNFSEKLNKLKTGQTLKENIKLNEISDKIRLIADLTNNQFFTQQNNNKMDCLKLNDYIHNKTE

SEQ ID NO: 7080 - protein, 582 aa, unidentified
  source 1..582: note = Related to JAHJEY010000048.1; note = unidentified bacterium
MNLYYLNSLDIISKSFNTPLEFLNSIFNSEVNSTYIELFNIPKKNPKHSKKYREVINIKSSYNLFYKELLCVIEQIIGQNEKNFVSDIAHGFIKNRGVFTNAKQHLNKKYLFKIDIKDFFKSIPQDGISNTFLKLGCSQDGANLLSTLSTFNGILYEGFNTSPILANLYCYNLDLELIKLADSYDVIVTRYSDDITFSSDTNSFPSIDEIEKILKQYFFNINHEKTLYLKYGQPQYVTGLSISNDKYPRVPKRLKKKIRQNLYYMNKYPENYFYKEDNYAVLRAIYGHIVYLLGIEKSLGKKYQSEFINIIENYLNLEDIYINSPQKKSTLSTYHYIDESEFIDSKTNKYYLILSLISINGEFQKNMISDKINALKNDLASDFRNGLNDEQRSKLFHYCEDNISVKEKYISILRELNIEAHIIFKYEDKPMKKQDYQDNYYALFNSLMKNILRRYKNNTNVIVVEENSKISINTLEKSILNRRFFFPNIEIAKASKDDVLLSIPDYILGIVRDCLKKDFLETLEKLKAGQRLKEDIKFDEISNKIRLIANLNNSNFFTRQNNSQLTCIKLNQYIHHKRILGS

SEQ ID NO: 7081 - protein, 572 aa, Campylobacter sp.
  source 1..572: note = Related to NZ_LIWS01000003.1
MDIRKLNSLEAIAKSFNTDIGFLEFMKEPENTKTQSDYFKLLKLKKKNKKFSTSFREVLKINEPFNVFYKELLNELEKIIYSDYNKYISEYAHGFLRGKNIVSNSKEHLNKYYLCKFDIEDFFVSIKKESIEKVFIKIGCEKQAAELFSNLCTYDNALKEGLNTSPLLANLFCHKLDADIRSSIAKNIVYTRYGDDITFSSDKNNFIKTDDLQKILNKYNLKLNKQKTLFAKQGQPQYVTGLSISNREYPRVPKKLKRKVRQKLYYMNKFFESNSEEELLKRLYGEIAYIIGIEKDLGEKYKKTFLEILKNNNCTIDNASAKTFKVTTAKRIFHYIDESEIIISTDADKQYLAICVVSIISDSDKQKNIQKLGELKNSFLIDARDEFIKKEGLFHYTSDNPEVKIKVQDLLRELEYEAFIIFGKFNKKITKEEYQELYYGLFSKIFNNILLNRFGDANNYICYEENSKISTNKLSSYLCNKKHSTKFKIEKISKKDILSTLPDYVLGTFCSLAKEEKLLEKIENQKYPFALRNLNKISSKIRLIVDNNNKIYYSRQNKNKNDFLEINKNIMN

SEQ ID NO: 7082 - protein, 303 aa, Leptospira mtsangambouensis
  source 1..303: note = Related to JAIZBM010000014.1
MESLNFNKIRNIDDLALYFQCTIDTLKNIIENKENYSSRRQIPKKNGGKRRIIIINNFDWSRFLKQIHFSIEKQYPYLDCIEGFLKSKSIKTNASKHINNQYLLTLDIKDFYFSIKYEDIINSFKALGANDTVSEILGQICTYNNLLYPGFNTSPLISNIAFESLDRKICDLCKEKGINYSRYADDLSFSSTNPIEILPIIKQYLSEKAFEINEYKLRFSKHGQAQYVTGLSISDKTMPRLPRKFKRNIRLLLHYAKMNGIENYHKHPKSRHLLTIYGQIMYSYSIEPHFAFKCLKIFNDIKK

SEQ ID NO: 7083 - protein, 302 aa, Leptospira hartskeerlii
  source 1..302: note = Related to NZ_NPDN01000013.1
MLLLDFPNIRHKGDLIKYFQTNTETFDSVLVSKNKFAHVINIPKKKGGNREVIKLTNEDWKRFLKQINFSLHQLYTFPNCVQGFIPGRGIKSNSYFHLKNRQLLVCDIKDFYYSIKESDISNIFKYFKASDEIANLLAKLCTFEGILFPGLNTSPTLANLYCEKMDEKLSILMTSHQGVYTRYADDLTFSSNQTLPNLKDISELLENYNFKLQERKTRYSSPGQRQYVTGLSISDKRVPRLPRNFKRNIRLLVHLAEKLGVKEYHENLNSRNLFTLKGQLVFAMHIEPIFAKKYLVRLNRLI

SEQ ID NO: 7084 - protein, 312 aa, Aliarcobacter butzleri
  source 1..312: note = Related to JAKKPI010000005.1
MIKLDFSKFQDETTISTNFHILKKNLDDLLTGNQEDFYEVLHIPKANKSLGYRKVYKPNWKIDGLHKYILEQINFKSKPLIHDCAHGFIKGKSILTNAQQHLNKKYLLQVDIKSFFSSISQDEVKRVFIKLGCNDYVAELFSILCTINNSLAEGLNTSPTIANIYFFELDEILNEISRRYSCTYTRYADDLTFSSNNYFDYTELLKEIEDALEKKNLTLNNKKTRFSKYGQAQYVTGLSISNEVRPRIPKKIKKRLRQEFYFIKKYGFNAHFSRCNQNIKNGHNRLNGWLLYALNVEPDYFRKLYAEYKGLK

SEQ ID NO: 7085 - protein, 555 aa, unidentified
  source 1..555: note = Related to JAGDMU010000005.1; note = Proteobacteria bacterium
MNQVVDFSGLSNLRSIASTFNTKLEFLESILKSPTRSEFYQKMFILKKNGKGYRLVYKAINKSLSLFHKNLSTSLQKLEKEFVHDCAYGFVKGKSTFDNAKIHLNRQILVQFDIENFFKSINYENIKKIFFQLCKNDDIASILTSLTTVNTSLVEGLHTSPVLANLFFYDLDIQLFELAQKHDCLYTRYADDITFSTNFKDINVKKLEKEVSAILKESNLSLNNEKTRISKKGQPQYVTGLSVSNPEFPRIPRLMKKKIRQELYYIKKYGAEDHFMNKKEKLYDGMQRLNGWIIYCHAIEKELAKKFQDQILMTDAYTDIHEYNKRLRKKEKRKEELHLYFDETLYENYFGMSCVLIQDENHQDISNDLNTFYDQLSGDQLIPKKGRIFHYCEDSHDVRGQIVDRLRKCDFQAYIVFSKLETNSYTKDDYLKIFYKVLFDRIHKNYDCTVHIYYEENNKIKTADIDDLVEDIKDKLNNQTSMVISINIQKITKQNHLSVIPDYVLGLFKDAYLKKERKDFEIRYCQKLSNKIRLVIDLDTNKYYSRHQTLSLSNE

SEQ ID NO: 7086 - protein, 327 aa, unidentified
  source 1..327: note = Related to MVRP01000128.1; note = Syntrophorhabdaceae bacterium PtaU1.Bin034
MLIKFSEIENLTMLSQFLYIKEDNLLTLLKEGAVSSCCEKMAIPKKNRALGYRVVYKVNSHLLKNVHKVLCGHLNAVYDAPAFVHGFVLGGCTRRNAAQHLNKKKILGLDIDRFFDSISENAIKEVFCGLGCRMNIAANLSKLTTINGRLPQGFNTSPVLANIMFGHLDAQLNSICNDYGCIYTRYADDITISTDDQLPPVARINDVLFTGGFRLNSSKERVMFRGKKQYVTGLTVFDPEYPRVPKRFKRRIRLQLYYLVKFGAKSYVMRELGLSEEDVRNDYEKLQLVSGRKVQLQYQIKGWIDYVNSIEPLLSEKYYESYNAIAW

SEQ ID NO: 7087 - protein, 323 aa, Streptomyces muensis
  source 1..323: note = Related to JAKEIP010000017.1
MSFSVDQLAEQVGTSVENLEFLSEHLPAGEGLLYVQRRHRKKHGGIREVFEPKPPFNAVSKNLHRSFTSQFSYEAPDHVHGFVRGRSTISNASQHLAKKCVLRMDLEDFFPSIGAATIRASLREQGFDEKAAELAVSLVTIGGKLPIGLSTSPLLSNLAFLDTDRSLAAYARSEGLSFTRYVDDLTFSGDVTDRHSTDIARILDDAGWSVNTRKTAFMRRGGPQYVTGLYVGESDGPHIPRALKRKMRWILHVISKFGYEAYMTDFGGENEGMYRCRLLGWACYIAAVERDVGFSLLREFDRLVPEGSDEELHGYDEDLYDLL

SEQ ID NO: 7088 - protein, 320 aa, Streptomyces poriferorum
  source 1..320: note = Related to JAELVG010000016.1
MAFSVDHLAEQAFLSVKDLEWLSAHLPAGEGTFYVQRRHRKKHGGIREVFELKPPFDTVSKNLHRSFTSRFSYEAPAHVHGFVRGRSTISNASQHLAKRCVLRMDLEDFFPSIGAAAIHDLLREQGYEEKAAELAVNLVTIGGKLPIGLSTSPLLSNLAFLSTDRSLAEYARSEGLSFTRYVDDLTFSGDVTDRHSMDIARILDDAGWSVNTRKTVFMRRGGPQYVTGLYVGESSGPRIPRKVKRKMRWILHVISKFGYAAYMTDFGGEGDEMFRRRLLGWACYIAAVEPDVGYPLLRAFDELVDEEDLEGDEEGLYDLP

SEQ ID NO: 7089 - protein, 307 aa, Streptomyces rimosus
  source 1..307: note = Related to NZ_JOBP01000002.1
MPYSVHDLAQQAGVSVEVLERLSSMLPAGAGQLYVQRIYRKKHGGIREIFKPKPPFDAIGKNLHRSFTSLFSYEAPDHVHGFVRGRSTISNASQHLAKGCVLRMDLEDFFPSIDAATIKASLQERGYEEKAADFAVNLVTIGGKLPIGLSTSPLLSNLIFLSTDRSLAEYAQSEGLSFTRYVDDLAFSGDVTDRHSADIARILDDAGWSVNTRKTAFMRRGGPQYVTGLYVGESDGPRIPRKVKRKMRWILHAISKFGYETYMTEFGGEDEGMRRRRLLGWACYIAEVEPDVGYPLLRGCVGWPWAG

SEQ ID NO: 7090 - protein, 336 aa, Streptomyces sp.
  source 1..336: note = Related to CP043956.1
MIALTWECDPISRRPAAEGPVEFSVNNLAEQAGVSVRNLEWLCSNLPTGAGRLYVRRTNRKKHGGVREVFEPQFPFDVVSKNLNRSFTSLFSYEAPSHVHGFVRERSTISNASQHLAKKCVLRMDLEDFFPSIDAATLKASLRGQGYEEKAAEFAVKLVTIGGKLPVGLSTSPLLSNLVFLGTDRSLAEYAQSESLSFTRYVDDLIFSGDVTDRHSADIARILDDAGWSVNTRKTVFMRRGGPQYVTGLYVGESDGPRIPRKVKRKMRWILHVISEFGYDVYMEEFGGEDEGMHRRRLLGWACYIAAVEPGVGFPLLQAFDELVPERAEEDLYDLP

SEQ ID NO: 7091 - protein, 312 aa, Streptomyces venezuelae
  source 1..312: note = Related to NZ_CP029192.1
MVDDLAEQAGVSVEILEALSSALPAGAGRLYDQRIYRKKHGGIREVFNPRQPLATISKNLHRSFLHLFSYDPPNHVHGFVRGRSTVSNAGQHLAKPCVLRMDLEDFFPSIGAATIKATLGEQGYEEKAADIAVNLVTIGGKLPIGLSTSPLLSNLAFLSTDRSLAEYAQSEGLSFTRYVDDLTFSGDVTDRHSVDIAQILDDAGWSVNTRKTAFMRRGGPQYVTGLYVGESGGPRIPRQVKRKMRWILHVISKFGYYTYMSEFGGANEVMLRRRLLGWACYIAAVEPDVGYPLLRAFDELVPEPDEDIYDLL

SEQ ID NO: 7092 - protein, 319 aa, Streptomyces sp.
  source 1..319: note = Related to NZ_LIPG01000002.1
MPYSIDNLAEQAGVSVELLEHLSSSLPAGAGRLYVQRVHRKRHGGVREIFKPRMDFQFVNKNLHRSFIGLLPYEAPDHVHGFVRERSAVSNARQHLAKACVLRMDLEDFFPSIRAETVKVSLMEQGYEDKAAGVAVNLVTIGGKLPIGLSTSPFLSNLAFLDTDRSLAEYAKSEGLSFTRYVDDLAFSGDVTDRHAVDVARILDDAGWSVNTRKTAFMRRGGPQYVTGLYVGESDGPRIPRRVKRKMRWVLHVISKFGYDAYMMEFGGSGEGMTRRRLMGWACYIAAVEPEVGFPLLRELDALVPDEDEEDLDYLEITT

SEQ ID NO: 7093 - protein, 316 aa, Streptomyces sp.
  source 1..316: note = Related to NZ_CP094918.1
MPYSVEDLAQQADVSTEILEWLSSEIPTGFGRLYEQRIYRKRHGGVREVFKPKRPFDTVSKNLYRSFTRLFSYTAPDHVHGFVRERSTITNASQHLAKKCVLRMDLEDFFPSIGAATVQTILREQGYEGKVADLTTSLVTIGGKLPIGLSTSPLMSNLAFLTTDHSLAEYAQSEGLSFTRYVDDLTFSGDVTDRHATDIARILDEAGWSVNTRKTVFMRRGGPQYVTGLYVGESDGPRIPRKLKRKMRWILHVISTFGYDTYMAEFGGREEGMRRRRLLGWACYIAAVEPDVGFPLLRKFDELVSEGDAEYWDEEY

SEQ ID NO: 7094 - protein, 320 aa, Streptomyces sp.
  source 1..320: note = Related to JAJNOJ010000002.1
MPYSVDDLAEQAGVSVEMLERLSSTLPAGAGRLYFQRRFRKKHGGVREVFKPMSPFDAVSKNLHRSFTGLFSYKAPDHVHGFVRGRSVISNASQHLAKGCVLRMDLEDFFPSIGAAAVKSALCEEGYEEKAADLAVNLVTIGGKLPIGLSTSPLLSNLAFLATDRSLAEYARSEGLSFTRYVDDLTFSGDDVTDHHAVNIARILDDAGWSVNTRKTAFMRRGGPQYVTGLYVGESDGPRIPRNLKRKMRWILHVVSNFGYDVYMAEFGGRREGMRRRRLLGWACYIAAVEPDVGYPLLRAFDELVPEDEEEEEEGLYGLQ

SEQ ID NO: 7095 - protein, 317 aa, Herbidospora sakaeratensis
  source 1..317: note = Related to NZ_BBXC01000017.1
MPFSVDDLAEHAGVSAEALQKLSSSLPTGAGRLYFQRTFRKKHGGIREVIKPASPFDAISKNLNRSFTTLLPYKAPEHVHGFVRGRSVVSNASQHLAKECVLRMDLEDFFPSISATTVKALLQDQGYEEKAADIAVSLVTIGGRLPIGLSTSPFLSNLAFLSTDRSLSDYARSEDLSFTRYVDDLTFSGEITDRHSENIGRILDDTGWSVNTRKTAFMRRGGPQYVTGLYVGESGRPRIPRKIKRRMRWILHMISKFGYDTYMSDFGGENEEMYRNRLMGWACYIAAVEPDLGYPLLRAFDELVPEGYYETAVWDLG

SEQ ID NO: 7096 - protein, 330 aa, Micromonospora noduli
  source 1..330: note = Related to NZ_PYAC01000003.1
MPFSVEDLAQHAGVSAEVLEVLSSALPLGEGPLYRAWTSRKKHGGIREVFKPLSPFDAITKNLHRSFTDLLPYKAPDHVHGFVRGRSTITNASQHLGKACVLRVDLEDFYPSIRAAMVKASLQAQGYGEKAADVAVGIVTIAGKLPVGISTSPFLSNLVFWDTDRSLAEYAQREGLSFTRYVDDLTFSGMVVDRHLAEITRILDDAGWSVNTRKTAFMRRGGPQYVTGLYVGEADGPRIPRKAKRRMRWILHKISKFGYETYMEDFGGEDQVMYRNRLLGWACYIAAVEPDLGFDLLRKFDDLIPEGYYSNGYADMAGLLHVINDIDDLP

SEQ ID NO: 7097 - protein, 342 aa, Actinoplanes sp.
  source 1..342: note = Related to NZ_LOJP01000002.1
MTLVLTADILIGAIGYPTRVLEELALMLRGGGLQVFSLQSHRKRRGGVREIVKPRPLLDSVSKNLYRSLLELLPYRPPDHVHGFVRGRSTLTNARAHLGKPCVLRVDLEDFFPSISSTTLQGALDQQGCDEKAAELVVSLATVFQRLPIGLSTSPFLSNVVFLSTDYALSEYARANNLSFTRYVDDLAFSGDVNDQHFEAISEILNNSGWSINVDKTAFMRRGGRQYVTGLYVGMADRPRVPRSLRREMRRTFHLIEKFGYECYMEDFGGEAAAMFPQRLRGWARYIASIEPDLGYPLLRRIDELVPDQYVSARDLEAYYDYGEYQVIESAEDLYGSEGPDY

SEQ ID NO: 7098 - protein, 319 aa, Catenuloplanes japonicus
  source 1..319: note = Related to NZ_JNXY01000031.1
MATFSVDDLAQHAGTDVERLEELSRGVLLGNGLLFESRSHRKRRGGIREIVKPNPWLDSITKSLNRSFLQVLPYLPPDHVHGFVRSRSTITNATAHLGKKCVLRVDLEDFFPSIGSRWVNSLLQQQGYDEKAASLCVGLTTIAGKLPIGLSTSPFLSNLAFQETDSALAEFSATEGLSFTRYVDDLVFSGDVTDEHLSAIEGIISNDGWLINLRKTAFMRRGGPQYVTGLYVGGSDMPRIPREMKRYMRWTLHIIRKFGYESYMADFGGEASDMRPQRLLGWARYITAVEPEFGRPLLGAFFELIPLDYCGPDDCEDIY

SEQ ID NO: 7099 - protein, 322 aa, Phytohabitans rumicis
  source 1..322: note = Related to NZ_BLPG01000001.1
MSFSVEDLGQHSGVSVRILESLSEDLPAGAGKLFRAQSFRKKRGGLREIIKPNPWLDLITKNLRRSFLAVLPYRPPDHVHGFVNGRSTVTNASAHLGRACVLRVDLEDFFPSIGSAQLKAALQEQGYDDKAASLAVSIVTIGGKLPIGLSTSPFLSNLAFQHTDHILAEYAEAAGLSFTRYVDDLVFSGEVSDQHLAAIERILNDSGWSINQHKTAFMRRGGPQYVTGLYVGATDHPRIPRKTKRHMRWVLHIITKFGYDEYMAEFGGENADMLPQRLLGWACYIAAAEPDVGYPLLRALNEQLPPAYVPPNGWLIGIEDLD

SEQ ID NO: 7100 - protein, 332 aa, Dactylosporangium vinaceum
  source 1..332: note = Related to CP061913.1
MAIFSVEDLAQHAGVSTQTLEELAESLPSGAGTLYSRLTFPKKRGGFREVVSPRKTLDVVTKNLHRSFLDVFRYRPPEHVHGFVKGRSTISNASEHLGRTCVLRVDLKSFFPSIDSTRLKAAFLERVYDEKAAELCVRVVTISDKLPVGVSTSPFLSNLVFRATDYALLDYARAEGLGLTRYVDDLSFSGEVEDRHLSDITRILEDLGWRVNTRKTAFMRRGGPQYVTGLYVGAPDRPRIPRKTKRRMRWILHVISRFGYETYMTEFGGLEAGMIPQRLLGWSCYVASVEPDVGFPLFRAFREILPESYTPPSYYAGEIAGIRIIHELDDLR

SEQ ID NO: 7101 - protein, 332 aa, unidentified
  source 1..332: note = Related to QHBZ01000345.1; note = Pseudonocardiales bacterium
MVTIEDLSEYAGTSVAKLEKLADRLRERVDFSTHVYTTYNRGRREIVAPATALDTVTKNLHRSFVAELPYNPPLHVHGFVKGRSPLTNAAQHLDKACVLRVDLREFFPSINSDRVGTALQTQGFQTDALELCTRIVTINGRLPIGLSTSPLISNIVFEPTDYTLASYCEYEGLEFTRYVDDMIFSGDVADRNLGDIKEILLADGWLVNDRKTVFMRRGGPQYVTGLFVGCADRPRIPRRIKRQMRRVCYLIEQFGYQSYMEDFGGDDARMIPNRLYGWARYIASIEPSVGYPMLRLLSEHVPEKNAHSLDQTRFDHIGITVPRIVESLDDLL

SEQ ID NO: 7102 - protein, 337 aa, unidentified
  source 1..337: note = Related to nan
MLVSLKRIASVAGSSESELRQLADEVEEGQHFHVYRARLRRRDRSIYWPDTPYDTALKQIRPALERLLSYEAPQHVYGFVKRRSTRQNAANHLDADCVLTIDLADFFASIKREAVIGALGDSGADKDASEVIGRLTTPRGVLGMGLSTSPYLSNLVFLRTDDELASLATSLDIRFTRYVDDLTFSGAIDDKKAEHIKAVLISNGWTVNDRKTRFMRRGRAQYVTGLSVSDAVAPRAPRRLKRRMRWRLNMIERYGFYTYVTRFSGGSVDSMLHEAERLRGLAQYIASVEPNLRSGWLERWYRAVPTTSHRFDNEGDTTRLIKLDEDDIRRLLEDEAQ

SEQ ID NO: 7103 - protein, 320 aa, Leifsonia sp.
  source 1..320: note = Related to PBTR01000101.1
MIPVTPTVLAKRLGHSVPTLENLAQIVQSGPSDDSYRLVRGDRELRVPTPQLKVELLPVAEYLRASLPRPAEHVHGFVKKKSILTNAKEHLGAPVVLRLDLRNFFASIQSDMVHAALTKHASFTDDAAHLLVAVCVPEGRLPLGFSTSPALSNLVFDETDRALETWASANHVALTRYVDDIAVSGHVDDRHLEDLTGILNEHHWVLNETKTLFMRRGRSQYVTGLSVSDPLQARVPRALKRRMRAKLFLMEKHGFDAYMKSFGGDDRGECPQQLLGHARYIAMVEPKLGGMLLRRFSLAIEESAYAGDPEEGWEAWALDL

SEQ ID NO: 7104 - protein, 324 aa, Naasia sp.
  source 1..324: note = Related to NZ_JAFMTA010000001.1
MNISRRALAARLLVSNRYLDEAASRVTVGDAYILLSLHRRRGETPRQIFVPDAATAFLVKKFHEWITSVGPRPPDHVYGFVRGRSPLENARQHLAKQAVLRIDLRDFFPSISAQKVREALLSVGLDASAAEVATRILTVNDQLPTGFASSPALSNLVFRDSDIAISSWAKDHGLTFTRYVDDLVFSGEIGTEAVSAAVAMVEKTGWRVNTDKTRLMKRGGKQYVTGLAVSDPVRPRIPPSRKRSMRMKLHLIERFGYERYMREFQGEERGDTPGHLRGTARYMAGIEQPFGSNLLARLNAVLPEYWSMEDRSDPDWLEWLGDFH

SEQ ID NO: 7105 - protein, 587 aa, Cellulosimicrobium cellulans
  source 1..587: note = Related to JAAMSM010000030.1
MVGAVAFESSFERTENLIADLYEGLVSESYLDGLDSYERFKTEGFHAWNDTAEVSTAFVRFLSRNRGYKSYIYFTDRTTRPDLGADQMHAILYRDLLRNLFQEYGSRRLRLIFEQNHKLDFELIATEAAEISAVRPPYSIEVGQKRAPHSLSIVDYAMAIFSRWRDTAYSTSPTTNKFRSWCAIRRWVAIVRSVEQGALYRRGHPVVSEERGVETLTSELNARDSRTQDGTLSSQPPSVAGPSPALEPLGRTEFVRSLGVDSQILESVGAAVREGQLYRVQQIRKRRGGLRKIYSPSIELKLIQKLIREELESALVYEDHPNVFGYISGRSIIDNARVHVGASVVLRVDLRDFFASITSDRVARALIDHGATQDLVSLLVPVLTADGILPAGFPTSPFISNLAFRHMDEALLELSNSHGLAYSRYGDDLNFSGEIDRDDAFLKLVERTLELDGWTVNQKKTRFMRRGGSQYVTGLYVGDSVPRAPRRTKRAIRAQSHFVSKHGFDDIAQARGHRVNTPARLAGWLGYLQRFEPDFVDNILGVGVLTLEDDRAGSRAAVDSSARGWDEYLSRGVLRHGKGSLHRADPS

SEQ ID NO: 7106 - protein, 326 aa, Tessaracoccus sp.
  source 1..326: note = Related to CP072596.1
MDIRAFLRPIGLTEPQLRSLGDEIRAGARYSKRRVRKRHGGYRDIAVPDVELKAALKLLRIRLECVLPYEAPDMVFGYVAGRSIVDNASQHLGQACVVCVDLVDFFGAINGRRLESALLSQGLAEDLVQLLLPILVVDDSTPPGFSTSPMLSNVVFEATDRALEELAGEQRVRYSRYADDLTFSGQHVDDSLVARVDAVLLRQGWVLNPRKTRFMRRGGPQYVTGLYVGDAARPHVPRRIKRRLRAWFHYIGEFGYSDCEARVALPSGRQLEGWLRHVNQVNPEVVRSIVNDLGHSDLHVAFGAMGLELKGPPRDDWDELLGELGL

SEQ ID NO: 7107 - protein, 326 aa, Marmoricola pocheonensis
  source 1..326: note = Related to NZ_RJSF01000003.1
MIDLADLGSASALDADEFIRWSNLIAAGSGYSRMSIPQRRRRPRVVLRPEVALDRFLKQLTIGLSRISGYMPPAAVHGFVTGRDIATNAAVHLDQDVVLRVDLKDFFGTINEQRLVRALGDYEFDEDAADAVAGVALVNDALAQGFSTSPFLSNIVFTESDAELTSFAARAGVSYTRYVDDLTFSGPYESVNDELLEAASALLADLGWSVNTGKTRFMRRGKPQYVTGLYVGDSAGPHIPRSMKRLLRREVYFASKYGLRDARLSSPTPMLHDRLNGWVHYAAHVDPVFGKKLLVAWNDVASRRYADRESAEWDAILEDINFPEDW

SEQ ID NO: 7108 - protein, 325 aa, Georgenia sp.
  source 1..325: note = Related to VDFS01000037.1
MVSIRAVAHASALDVGELLHWQQLISSGAGYTRITIPQRRRRPREVLRPSVGLDRVLKQLNIGLARVSNYSPPHAVHGFIRGRDIRTNAAQHLDKDIVLRVDLRDFFGSIDAYRLTDTLTGFGFDQNAASAVLGVTIVNGSLAQGFSTSPLLSNMTFADADLALMKLAADVGVSYSRYVDDLTFSGSFGEVDDRLLLRITDVLESAGWIVNSNKTRFMRRGKAQYVTGLYVGDAVGPHIPRSMKRLLRREVYFASKFGIDNARLRSPTPMEHDRLNGWVHYAAHADPHFGQNLRDAWATVDSRRPASRSSAHRVQILDEIDFPES

SEQ ID NO: 7109 - protein, 329 aa, Nocardioides iriomotensis
  source 1..329: note = Related to NZ_SDPU01000011.1
MFEVDVETLASASYMKSADVLVRWGEMLLIEGLGYTRIAVPQKRRRPREVLRPNIGLDRVLKHLRLGLASTSGYEAPDEVHGFVQGRGTVTNAACHLAQDVVLKVDIKDFFDSIGSEEVCSALTRFGFTDECAELVASVTLVDGKLAQGFSTSPLLSNIAFHATDEALAGFAHTRGVTFTRYVDDLAFSGTKDAIDDEFLESLDVQLGNVGWRINPAKTRFMRRGGPQFVTGLYVGDHAGAHIPRPMKERLRRELYFAERFGVSDARQRSPRPMSIERLAGWVHYAAHADPAFGLPLRDRWQRIAPALDSYVPGPDWDLLDDIEFPDDW

SEQ ID NO: 7110 - protein, 325 aa, Pimelobacter simplex
  source 1..325: note = Related to JADCLI010000002.1
MIDADSLAQASGMTAGYLAHLGDLVQNGTGYSHVVIPQKRRRPREVLIPSVALDRALKQLRIGLEGRSSYEPHDAVHGFVAGRDIVTNASQHLGQDVVLRVDLADFFGSIDRDRLKSSLGSAGFAPSSAEMIANVALVNGALAQGFSTSPLLSNMSFQNTDKMISDLANQKSVTYTRYVDDLVFSGDMYAVTDDLSNAIETLLQEEGWKVNIRKTRFMRRGKSQYVTGLYVGDADRPHIPRGMKKRLRREVYFASRYGLTDARQHSPTPMDPKRLGGWVHFAAYADPVFGLPLRETWRAAVRSDPPPESRTWDSVLADIGFPEDW

SEQ ID NO: 7111 - protein, 326 aa, Aeromicrobium yanjiei
  source 1..326: note = Related to NZ_WJWW01000001.1
MTTTRDLATHGGPSPQQYPFWAAVLAAGHGYSTLAISKRKRREPRVVLRPNVGLDRFLKQVSTALVAGLDFAPHDAVHGFVAGRGIVSNAAQHLSQDVVLKLDLRDFFGSVRREPLTTALVQAGLDEPTASEVAAVVTVNGSLPQGFSTSPLLSNVAFDPTDDAIQAIAASRGATYSRYADDLTFSGTNGAVDDTLLSDVVSALEHQGWIVNPGKTRFMRRGRAQYVTGLSVDTADGPHVPRVFKQNLRREIYFATRYGISDARVRSPQPLRESQLHGWVEFLAHVEPHRRAELREAWKIIAPRPSARRVELWDELLDDIDFPANW

SEQ ID NO: 7112 - protein, 328 aa, Pseudarthrobacter sp.
  source 1..328: note = Related to QEHL01000037.1
MTVVQQKLVWRSLKWQLQVVGSMNGRLPTTSESSEWRQWAMEHARPVRFRGRDGWRSVGPLDSLLKRMTAALQSLYVAPDSVFGFVSGKSTYSAAQVHVGAPSALVVDLKDFFGQISEQRVRDALNPLLDEEALDVFVGCCLRSNTLPLGFRTSPLISNLVFRETDRDIERLCAARAVKYTRWVDDLVFSGSAVDDSFLHDLLAVLDSHAWLPNEKKTRFMSTRRVVLGLNVAQSLTRPHVPRGMKKELRKQVYYLSKFGMAHFSHAGAWPLPRILGMIAYVKSVDPNLAALLEQQLHALPKSSRLVAYSSAVGGGRWQMAMLEEVGL

SEQ ID NO: 7113 - protein, 303 aa, Arthrobacter oryzae
  source 1..303: note = Related to RBIR01000012.1
MLPASASLSEWDNWAGENSRPVRFRGRDGWRSVGPLDSLLKRMAGTLQSEYSAPDSVFGFVPGRSTFSAAQVHIGAESALTVDLKDFFGQITEQRVRAGLGHVLDAEAMDVFLGCCLRSSTLPLGFRTSPVISNLVFAETDYKIEELCARLSVKYTRWVDDLVFSGPSVDDAFLAEVLDILTSFGWVCNEKKTRFMSTRRFVLGLNIAKGLDRPHVPRGIKRELRKQVYYLRKFGVAHFSNDRAWPLPRILGMIAYVKSVDPNLALRLEQQLVQLPKDPLLAAYSSAVGGGKWQLAMLSDIGM

SEQ ID NO: 7114 - protein, 308 aa, Microbacterium sp.
  source 1..308: note = Related to VFNL01000001.1
MVYMLPRRALLISWEIFSVRIQLADLPPRSAPEWDAWARKNERVVSFRTKHRWRQARRATGRLDSAHKQARALLAAGWAPSAAVHGFVRTKSTKSAAMVHSGARAALTLDLADFFGQVTFNRVVDNLRMRFDDRSCDWIEGACFRDGAIPLGYRTSPALSNLAFSLTDDEIADVARRHGVAYTRWVDDLTFSGAGVSDQLLADVQRTLAGQGWAVNDRKTRFMRRSPYVLGLYVGHDVDRPRLPRRMKQRLLVETYHFSRLGFEHFSHEGVMSPSRLFGRVAYASVIEPELAELLNERVDAGHRVGRS

SEQ ID NO: 7115 - protein, 301 aa, Microbacterium oxydans
  source 1..301: note = Related to CAKKLT010000065.1
MITWLHFSARLGLYDLEPRSASDWATWASRYRVPVSFPVRGGRRVTVRSVGRLDLSLRAFKSLIAEVSFPHASAHGYVRGRSTVSAATPHVGSSLVLSVDLKNFFGQIDFARVSPVLEASFDAQVCQWIEGVCFVSGSLPLGYRSSPALSNIAFASADLEIFNFAAKAGVEYTRWVDDLSFSGEGVGDGFLEGLQALLADEGWLVNARKTRFMRRAPYVLGLYVGRDATEPRLPRRIKQRLLLESYYFAKYGMSHFDRPYVLPPLTLFGYMSYAYSVEPRLATVLGERIVKGIGKSGGRLR

SEQ ID NO: 7116 - protein, 323 aa, Microlunatus phosphovorus
  source 1..323: note = Related to AP012204.1
MTLSRVRELELKMGYAPGSLDRLARIFDAGAGHSVIRISSGKSKTRHVVRPTVALDGMLKSLRRVLEAELGFEPMDCVHGCVRGRSILTNASMHLARPVVLRVDLKDFFDSISTSDISDAFKVLDVDDETAELLARCTTIHGRMRAGLSTSPLLANLVFNSTDRDLQEIAARLDLTYTRYVDDLVFSGETITDDTLATIAEQIVARGWTINARKTRFMRSGGAQYVTGLSVDVESGPHLPRRMKRFLRLEVHYATLHGFGSGSTGKRRLIGLINYAKCVEPWLGAELHDSIREAGLLVGRSESEDAFEDAEDFWDELGLRDEY

SEQ ID NO: 7117 - protein, 320 aa, Microlunatus parietis
  source 1..320: note = Related to NZ_JACCBU010000001.1
MAVTVDQIERMMGVPPGTLDKTARILEAETGFTILRIPSRRGRFRRVVRLTTTLDSIIKGIRRSLEAQLSFVPRDCVHGCVKQRGILTNARAHVGKKVVLRIDIRRFFESISVSQVEDALRTSEADPESSALVARCTTLGGFLPVGFSTSPLLANMIFDGTDALLGDCAKSYSLSYTRYVDDLSFSGEHLDDQIRLEIEGVLRSQGWEIQDRKTRFMRAGHAQYVTGLSVNDPNGPHIPRNMKRFLRLEVHHVVRSGFGASVLGKRKLLGHINHVKHVDYDLGLELHDAIRSAGLLVGRPDDESPEDGLELFWEDIGIDF

SEQ ID NO: 7118 - protein, 325 aa, Microlunatus panaciterrae
  source 1..325: note = Related to JAFBCF010000001.1
MRSAARLGFVAGVRASALQQMALTFDRGLGYSTLEVPKRGGGSRTVLRPVSELDHNLKLLRRGIDTLSSYSPPEWVHGFVPKRSIVTNAQAHLSKEIVLRLDLSAFFESIKKSAVREAMLRFGFSDDASTLISDCCCIHGSLPAGFSTSPTLSNMVFLPTDDALHEWAGSRTLTYTRYADDLTFSGTDITDDDCAEIARMLSSAGYAVNARKTRFMRRGGPQYVTGLYVGESDQPHVPRRMKRLLRQQAYYIAQYGYSEAQTRSSRQFTPYQLRGWINYMGTLHPELAARLRCAIFARLPQAPERPDPSDYWDDLLDELHIPDDF

SEQ ID NO: 7119 - protein, 330 aa, Nesterenkonia alkaliphila
  source 1..330: note = Related to WRPM01000031.1
MRESAPRTFSHREEAPMTILSDTLTLDDLVIAATLPDTARDLMEEPVRPWQLNTITVRKSPGKFRRVVEPRDNSLARVQKKLKEFLDRDVLEPHPCVHGFTRDRGPYTNALAHLNARAALTIDISDFFSSVSSDDVQSTLVSFGASTAVARGITNVSVFENVLATGFSTSPVLSNMYFRDTDDVLATFAEEFNLTYTRYADDLTFSGEDVDDTHLAEITRVLESKGLRVNQKKVRFQRSGHPQFVTGYVIAHRDHPRVGRYFKRQLRLDLHYVMKHGLVHQAQLRGLSPQVLAKQLAGRINYLMCSERDLAVHLRQKYGHLLDDVDENPY

SEQ ID NO: 7120 - protein, 306 aa, Arthrobacter sp.
  source 1..306: note = Related to NZ_CP071516.1
MTVLSRIRNLEELTVAASLPRTAIDWLAKPIAPSEVTVHTTRKSNGGYRVVCQANDEKLVRLQKRFKEFIDRQVLVAHPSVHGFTRRRGTVTNASAHLGAAALLTVDISNXFPSISRQQVEFALQEHGASETIAAAIANIATFDSALATGFPASPVLSNLVFRPLDDEFEHFANVNGLTYTRYADDLTXSGESVNDAHLEAISATLSLHGFRTNTKXVRFQRRGHRQIVTGFTVAHADHVRLPKPKKKILRQDLYYSSKIGLAAQASFRNLDEEDFRNQILGRINYFMSVEPKLARVLRHEFDLLD

SEQ ID NO: 7121 - protein, 335 aa, Neomicrococcus aestuarii
  source 1..335: note = Related to NZ_CP018135.1
MRFARVSYLVGIVVIGDFRAPHPRKEEVSILKDLRTAEELQIAAALPDSALLWLCRPLSAEDIYVHEIRKSKGRFRRVYEPRDNSLARLLKQLKEFLDRQVFQPHANVHGFIRDRSIFTNATAHLGARAILAVDISDFFSSISRDQITGALISLGASDQVAVSIANVCTFRNELVTGLSTSPVLSNLVFLPLDKNFESLAVERGLTYSRYADDLTFSGDAVDDQLLAVVAERLSEHGFKINLKKVRFMRKGHRQVVTGVSVACGDKLRLPRNFKKRIRQDLYFSEKNGISLQALHRGFSNDEDFRESLKGKINHLNSVDSSAAKLFMSQLNNISS

SEQ ID NO: 7122 - protein, 328 aa, unidentified
  source 1..328: note = Related to JACOVQ010000014.1; note = Candidatus Zambryskibacteria bacterium
MHPVGINIERIKTLIELASLFDVSEEMLQGFIDNHDELVARVLMLKNRSGEYRKIVFTKSDPYRIFLRTLSAFLYEWYSHRIPDSVHGFVKRRSIITNAQQHTQKKSVTNIDIKHFFESITFKEVHGIFIKVGFQDKIAGKLTELVTVDGVLAAGFATSPVLSNIACLDLDEDFKNLANEHGLIYTRYADDITLSSNKEIPSKEEIKNILIKYGFEINENKYRIYRRGGPQYVTGLSVVDKRPRLSKKFKRRLRLELYYIKKYGFMDHWAKAIKRAIDKNTYPSRFSQVAYGGWGLEGFAAFIHSVEPKLGSKIFKTLLKRGEDEMYW

SEQ ID NO: 7123 - protein, 326 aa, unidentified
  source 1..326: note = Related to MHXK01000022.1; note = Parcubacteria group bacterium RIFOXYD2_FULL_52_8
MFPTNIDIGKIKTLSELAPILSVSESQLRYFLESKESLIKRGLILKRSGTFRRIMMAKDDSFRHFLLKLSSLFYSKYELHIPAAVHGFVRGRSIVTNAQQHTQKKIVLNVDIENFFDSISFEQVVALLISFGFQENIAKVLAELTTVNGILATGFSTSPVLSNMACIVMDGVFKSWSKKRNFTYTRYADDLTFSSEQYVPAQKEIAEILGHFGFKINLDKYRVYRRGGPQYVTGLTVVDKRPRLGRKRKRSMRLELYYIKKHGFLNHFYHALDRATKRHELPSKFTRTVFFGYGVDGFRAFMHSIEPRLACNMQQVLKKEAPKARN

SEQ ID NO: 7124 - protein, 442 aa, Kribbella speibonae
  source 1..442: note = Related to SJJY01000010.1
MPGGDGLRSWRHASAPFRRCLRLPRGALRRIGQKLRLPHRLRRRPTPRRQKAPYTVDAGGAAALGTSRPRDHVMCENPAMAPPVPLFEFTCHQSVASLEVPLGKPTHALEHLATTCDSGGAYQLNYFWIRNKLRSVSAPNHQLDLVHRRINSLIFPVDLAMRREVNGFIARRSTITNARPHAGARYLQKFDIKDFFINIRTLQVRAALRNIGFGPGAATMLSRLVSCNDRIPLGARTSPRISNLVLMSFDDAMIALADERDLAYTRYADDLSFSAQAMFDVSSEVRAALTSSGFELNASKTKSFKHGQPMFVTGLAISDASRPRLRKRLKSRLRREFYFVERFGLAGHANKIGAHPERTASRLLGQFHYARSVEPEFATRLEAKYPTAFGELIPQRTDDRVERAQRSRREFLTDVENAPQQTLPFYTPTASLPFVPAHRAVE

SEQ ID NO: 7125 - protein, 357 aa, Microbacterium maritypicum
  source 1..357: note = Related to WAAQ01000003.1
MAPLTRQLEFTFHETAASLESVLGKPSSAIEALASSCDAGTAYEVGVLSIRRKLRVIRVPERELDAVHRRINMFLFPVDLSMNPHAHGYVARRSTLSNASPHVGATFLQKFDVKDFFSSVSREQIAGALTRIGLGQDAAQLLSRLVTCQGELPLGARTSPRISNLVLADFDESIGAVASDAGLTYTRYADDLTFSSQSAFDVSHEVRTQLELRGFELNLAKSKSFRYGQPMFVTGLSISDKTRARVRKRFKSRLRKEFYFVEKFGIEGHAEAIDEDEHHASARIMGQFHYVRAIEPDFAAKLAATYPTAFQTLIPERYDDRIARVQRKRDEFLTDVARQPGLHLPVYLPTTPLTVGR

SEQ ID NO: 7126 - protein, 356 aa, Microbacterium radiodurans
  source 1..356: note = Related to VYRZ01000003.1
MAPLDPLFEYRVHPTRASLEAPLGRDSMTLEGLAARCDEGDAYVTGFMTIRGKSRFIAAPRPELDAVQRRINLLLYPIDLSLGASPHGYVARRSTLTNARPHVGARFLQKFDVKDYFASITASRIATALTELGFGSEAATLISRLTSHRLRLPLGARTSPRISNILLIDFDDQMENLAREQGLRYTRYADDLAFSSQIAFDVSDRVEQAIRAAGFELNPMKTKQFKHGQPMFVTGLSIQDATRPRVRRRLKARLRQEFYYIEKFGIEDHAAAVGESWRGVLHRLTGQFHYCRTIEPQFTAQLTLDFPAASSSVAPVHEDSRVERAQRHRREFVAEVMRQLPTAIPFYVPQADLFEN

SEQ ID NO: 7127 - protein, 360 aa, unidentified
  source 1..360: note = Related to JADLEH010000111.1; note = Propionibacteriaceae bacterium
MSTPAGPFDYILSEQHLARALGVPVALFEYVGNLAEMGKAYEYRRKSIHGKIRELGVPVDSVMSLQRRITDFLWPLSLELHPACHGYTPGRSATTNAAPHCGARWVQRLDIKDFFPRTTPNIVTKALVERGAHQTVAELLTKLTTDRGSLPLGAPCSPLLSNLILTPVDNRVADQAASIGVSYTRYADDLTFSADAEFDMTGVVQSALQPLGYTLNLEKSRLRRRGQSIAVTGLRVAEMDHPRLPKRFKRELRQEFYFIEKFGFADHCNTRYFWHWIDEEDDEKQLDHSTRHLQGKVRYALGVEPDWMRALLDAHPVAASELTPPKRHQADQRLAALTALAAEIVGRRHVSLSREPTRLG

SEQ ID NO: 7128 - protein, 366 aa, Propionibacterium sp.
  source 1..366: note = Related to JAAYZP010000360.1
TGPFQFRGTNALFATALGLTAEQLEEAIKLAGERSSYQFRTVRKRGKERTFISPRAPLLNLAQRRVADFLRPFNELLHPGCVGYVPGRRTLDAATPHSGKPWVQKLDITDFYSSAQDTIIHDTFVSLGATQEVSETLTSLVTWEGVLPTGTRTSPVVSNLVLADFDFECAAEAERRNLAYTRYADDLIFSGDDPFDMSGWVDHHLQAIGFKLNPRKSVLCRRGQPIRVAGLTIFEKDRPRLPKALKRRLRLEIYLVSKDLAAGHFESPGDEDDYPPEVEEARARFFHAQGMLRYSAGIEPAFVQSALDKHGEELRDLLLPARRRHRDELELRRLLAKILGTRAPGLGRTPSPIPSAPPISRVSSVG

SEQ ID NO: 7129 - protein, 355 aa, Plantibacter flavus
  source 1..355: note = Related to NZ_RKHL01000001.1
MTPRTSPASTLRSPRHLELYLGAPLSALEAIAADLAAGVGVEVVTLRSKGKAREITCPTDETVRNVHRRILSMMTPVQMDLPDMVTGYVRGRSSVSNAQAHAGGAFLQKFDLRDFFHHISSDAVATGLRDVGFQAEVAALLAGLTTCRGLLPAGFSTSPAMANLACRALDEDIAALADSLGLIVTRYADDLTFSGAQFFDVRSDIGVMVKAHSHVLNEEKTRTLKRGQPMYVTGLSVSENDRPRLPRPFKRKLRQELHYISVFGLAEHADRHGVKVEGLRFRLGGQLAYASAVEPDLVKYFEAHFPAAYRDVARARSPISDDKRRTRLAQLAARVAARSDPLAEMYEPTVTIAAL

SEQ ID NO: 7130 - protein, 353 aa, Microbacterium pseudoresistens
  source 1..353: note = Related to NZ_JACCBH010000001.1
MTPRTSSVSILRTPRHLEVYLGAPLAALESIARNLDVGIGVEVVTLRSKGKARVIACPTDEAVRNVHRRILSLLTPVQMDLPDMVTGYVRGRSSVTNAIVHAGAAHLQKFDLRDFFPHIGVDAVDEGLHAAGFQEEVARLLSRLTTCRGYLPAGFSTSPAIANLACQSMDAELAALAEQEMLNLTRYADDIAFSGMEPFDVLDEVRQIAIAHGHALNDEKTRTLKRGQPMYVTGLSVSEQERPRLPRPFKRGLRQELYYVQTRGLAEHASWRGAKAEAVRYRLGGQLAYASAVEPGWVEALTTAFPTAFQEVARRRSSQSDAKRGERLAQLAARVIARNDAAAELYEPSATIS

SEQ ID NO: 7131 - protein, 358 aa, Microbacterium sp.
  source 1..358: note = Related to NZ_JAGXJI010000001.1
MEIDRRVPSFADWLNEADVANAVGMQLESLAQTARRLAEDEGVVHSRILTIRGKQRLVHTPRDEGVRQALIALMASIELPIATVLRRDEIAHGYIAGRSAYSNASSHAGAFWLQQFDIKDFFPSISATRLESALLEAGMGARAAQFVTSLTTYGGSLPLGFVPSPLLSNLVATGIDVGLNDLAQQHGLTATRYADDITLSGPHEFDCTEEIEAIAQASGFALNPAKTKAGEARHGARVTGFVVSTGSPRLPQHVKRQTRQDLFSIQRIGIEGQASMRGRTPQSLVRRLLARLGTLRKCEPVVYERLKRDYPHAFVDLESYRTDALAARARRADALEQQLLLSSSPAPAYYIPTHPAGR

SEQ ID NO: 7132 - protein, 334 aa, Microbacterium azadirachtae
  source 1..334: note = Related to FOYR01000002.1
MRLSALQEIAQRLRAHPAAVHSRHLLIRGKKRLVHTPRDEGLRQALVALVGCIELPIATTMRRDEIAHGYIPGRSAYTNARCHVGATWVQRLDIKNFFPSISAAHVEAALTEAGMGEDAARFIVAFTTFGGSLPLGFIPSPLLSNLVATNIDIGLLRLARERGLCVTRYADDITLSGEELFDCHDDVATIVGESGFALNLAKMSAGTPRNGFRVTGYVLSTGDPRLPRHVKRETRQDLYSVERIGITQQAKHRGRTPQSFGRRLLARLGSIRQSEPLVYERMRSDFPLAFERLDALRESARVTREQKSAMLERELLSMPSAAPAYYTPLHPAGR

SEQ ID NO: 7133 - protein, 361 aa, unidentified
  source 1..361: note = Related to JAHJKW010000011.1; note = Actinomycetia bacterium
MTPPTHLEYSVVDSVGVLAGQLGRTAEDLFQMAEEIASNVRYETQAVRIRGKVRILTVPDDRLKYLQRDICEFLIPANDRLSPEVHGFARGRSNRSNAISHAGRIYIQRFDLKDFFGSVTSAQVLAAFRELGLSDPAAHLLTELTTYRRALPQGAPTSPILSNLVMREVDDRMRELAHSRSLSFSRYADDMAFGGNERFDLSSEVEDIIDAYGFRLNDSKTAFAGPGQPRFVTGLYIDEDRVRLRKSFKRKLTQTLHYVEKFGIDDHADRVGKAPSKAQEQLRGRIHYARQVEPAWLDKQRSSFPRTLNELVPMNYEATRGEYLLARRQGFLSGMAGMTAASALRYVPAVSYAEVKSPVVV

SEQ ID NO: 7134 - protein, 554 aa, unidentified
  source 1..554: note = Related to SDNX01000008.1; note = Candidatus Lokiarchaeota archaeon
MEDYWYIVIGMVALLVIFCLCIGFSGGKWNYAAYIKEKNERVQRKRWNKYVKFLDPVKETELLNIIKLSSDADFEAFLKEIQPLLTKKYNPYNLNEQTLLKRTIYNVINRYTTQFKYDRVKKIEAILPMLKRVFLGPRLTNQVYSKKTLKRRFKFPLKSGVEIPKLDTIIDVAFFFNISVNKILGLCYMQEKNPGAYYVKREIIYDQMGEKGIILHQKDPAMVQLDSSYAIAEPNILKKKKSNQNEGKNSEDIQEKLEEIKPSFKEYSSPFYKRKMLTKPDGRKRLIACPVSYLKKYQRKILGDILEKVALPTNCTGFVKNRSIISNAANHVGSQTLVKIDLKNFFNSMKFYHTFEVFRGFGYNRPVSGILACICTDWYTKGGRYVPQGAPSSPMIGNLYALHLDKRLEGLWTKAGFVYSRYADDLAFSSSDPKVRVRGLIFASYQFIKDEKLSPNPAKTKVLRKQHKKKVTGITVNEKINIDRRWMNAFRGELHRYSKFGLPSDGVQRSKIFSQLKGKMSFLQMIDQNKAQKYDLYFEKIRTEYAKLLGNSSQ

SEQ ID NO: 7135 - protein, 538 aa, unidentified
  source 1..538: note = Related to JAFGBS010000004.1; note = Candidatus Lokiarchaeota archaeon
MDAFRYSLYISVGFGLLVFICCLLSSKKRADYEDYRREKWNKYVSFQDPELRKSLEHDIIVSTDEEFEAFLVSLRSSVKYRRDKNGLRIRKNICMFINNIWMNSYSEKGRKIYKRLKKLEEIVPLLKRVYFGPKYTPIIYRERKYEKSYQRRKFNFPLQPDSTAPKLDTIIDVAYHLQTSIRLILAIIYTQSHSRDRNYVKITQIDKALHQKGNSYLRVVGSPIARHVDIDQSFILKDKRGKVPKNAKTTDPQDAYLEYKELDSNFYTRKTLVKPNGRKRLIAVPNEKLRSFQRIILKTILEKAALPDVCTGFTKTRSTVTNAEFHVGAQTLVKVDLHNFFNNLSLDHVFEVFRGFGYNRPVSGILANLCTDYYRSRRYLPQGASTSPMIANLYALHLDRRLEGLANKYDLIYSRYADDLTFSSKDPKIRVRTFIQAVYKIIKSEKLYPNYQKTKVYRKQHKKSVTGITVNEKVNIDRKWVNAFRGELYRYSKFGVPEEDRFRIVHQMHGKFAFLKMVNPEVAKKYETQISKFIAENS

SEQ ID NO: 7136 - protein, 524 aa, unidentified
  source 1..524: note = Related to NZ_CP042905.1; note = Candidatus Prometheoarchaeum syntrophicum
MLLEGLSGEAAGLIIIAFMIFVFCLCLAKLLGYSGYLHGDYRWNKYIKSNEPSIEKEIYYNIQSLSDEYFKTYLQSIRKTINYKFRTGDKSLKNTILKRSMLNIINKHTNELPNERIKQIEEIFPLLRRVYFGPGLNKEVYDKKHFKKKFHFKLKPEHTIPQFNSIIDLALYFKIRVNALLGYSYNQKTKRTAYYIKRKKMFENFGQNTIPDDYRYIKKSYSELKEEKKKKSKKQPEIEIPSFKELESPFYTHKFIEFPNKKRRLISNPNYWLKQLQLKILRDILEKVEIPDYCYGFVPGKSTVDNARIHLKANTLIKIDLLNFFPSLKFWHVLHVFRGIGYNRPVSGVLACLCTDWYHSKRFVPQGAPTSPMIGNLYASRMDVRINGLANKYGLKYTRYADDLTFSSINEKIQVRKFIASVYHIIRDEKLYPNLKKTKVFRKGNRKAVTGIIVNEKLNVDRKWVNSLRGELYRYQKFGLPQGEEGDIIYNQLQGKIAYLHMVNPEKANKFSLLFQKLRELNRK

SEQ ID NO: 7137 - protein, 487 aa, unidentified
  source 1..487: note = Related to WJKO01000714.1; note = Candidatus Lokiarchaeota archaeon
MASELTLILVFVGLVYFLIFVCAAAASKRMRSRYPKPKPGHRYRKLKRVRDPKIQAKVRERLTKWEGAQYEEWYKDTIKKINYKYRTNQRQKKWTVLKRAVLDIINKYTYEIPEERLKKFSQDFPLLRRVYFGPKLNKQVYNKKNLARKFKFKIKDGTEIPHLDNIVDIALFFNTSVNVLLGYAYTQDLSNKSYYIKKNYTKKRKRKDYYEQKSRFYNRTTLIKPDGRKRLISSPKYNLKNLQLKILHDILEKAELPDCCTGFKPGNSIVDNAKPHIGKSTMVQIDLYNFFPSLKFDHVFEVFRGFGYSRPVSGVLAGICTDFCNSPRFVPQGAPTSPMISNLYASHLDKRLKGLWTKRGFTYTRYADDLTFSSDADDIKVGNLIHATYEIIKDENLKPNYKKTKVYRKGHRHEVTGIVVNDKLSVNRDWIRELRAELHNYNKNGLPDGIEGQQILNKLQGKISFLNMVDPEKAARYRAQFAVLTKD

SEQ ID NO: 7138 - protein, 349 aa, unidentified
  source 1..349: note = Related to SDNE01000165.1; note = Candidatus Lokiarchaeota archaeon
MLESQEKLDLNMHDSNRSKLKIKELPLVLNLRDLINFLEISHSLLENYFTFKSSLLIYKTFFIAKKSGGHREIFIPVPKLKSIQSKILVEILEKINISKFAHGFIKKRSIVSNAQEHLESQVIYKIDLVDFFPSIKFDKVHEVFKKIGYSEYISYLFGLLCTHLRGYNEMSQEKSSLNLNKLRFLPQGAITSPIISNLVCSKLDKDLNKIARIYGFRYTRYADDIAFSSQYRKDITNKFRKKIHSIIKKHGFSINRKKECLSYNRNFQRVTGINVQNSELSLPRKWIKNLRSALHHLENDYNQIDEECIEIMKNIEGRCAYALMVNKKKYNHYYQDFISIKNNISKRSE

SEQ ID NO: 7139 - protein, 358 aa, unidentified
  source 1..358: note = Related to SEDY01000002.1; note = Proteobacteria bacterium
MFKLCLCGVIIMLKPLGSPATLLRRRELSHRELNRHLGSQPGLISSIIEKGVARHYHKKTILSGNRFMRRSHDLQKMREILEPQDDLKEIQRAISRVLSRYFVPHEIAHAYVKNRGIVTNATRHIGARSMLHIDLADFFGSITQEAVLNGLYHVLEDFYASDIETIAELCCYDGFLPQGSPASPILSNLVCFPLDMELSELARSFGCALTRYSDDIVFSTATRSLPSKLARVSDREAAYTVKLGQPLRSLFELHGFELNMKKLRFQRWPGPLKVTGVLVGERLHVPREFRHNIGAALSQWKRHGIVVAARNHPKGSAEAFAGSLKGCIDHVGHVEGRDSTHYRRLLIDLETLIARDLN

SEQ ID NO: 7140 - protein, 360 aa, Sphingopyxis granuli
  source 1..360: note = Related to CP012199.1
MQYKSLERRLGLATGAVSTVMNADAGTRYTRFPVSPKRGIIRKPGWTPKKRMILAPSKDLKAIQRAIARHISSKFTAHPIAHAYENGRSIFANARQHVGARSILKIDLVNFFGSIGRQSIIDALRLLLDDFGDRDIEVIADLCCCDGYLPQGSPASPVLSNLVCYPLDVELDRLARRHGCKVTRFSDDITFSTSAEVFPPVLARTWRSGLAHGVALERPICSLLQQRGFEINIGKLMFRTRPMPLKITGLIVTDSLSVPRAFWHNLRASLHNWDRRGLDTCARTHANGCVVAFVNSLRSSIEYIGQVQGRDCKRYQRALAAFEELRSRDKEPLSAAIQRIAAARKAKKAKDENVIIPGTG

SEQ ID NO: 7141 - protein, 356 aa, unidentified
  source 1..356: note = Related to QMND01000158.1; note = Candidatus Shapirobacteria bacterium
MFKAGVSNFDLKQVLGAGLETVDEIIANKENHIERISIPKKNGGKRNIIAPDPQLKYIQKSIYWRVFRRYKADPSAHGFVLKRGIVTNADCHVGAKCLGKIDIKDFFDSISIDHLKNCLFGNKHICRYCKYYERMLDGRCNPSLYHNKTHNFDFKCEEIKAVHIPAYCEETGYISLFNRIIELCTFEGFTAQGFPTSPMLANIVMRGFDKSMKEFCATEGIAYTRYADDLAFSSKNLTKFELKKKIKQKAYQLLWAYGFAPNKKKTIWKSSAGRLKICGVVVNVKKSVQRKDVHKFRAEVHHATVKNADKTTKGDLRKLKGWASFLMSIDPVKGKKYMNQLLKFEADKFSIKSKGI

SEQ ID NO: 7142 - protein, 305 aa, unidentified
  source 1..305: note = Related to JACNHT010000021.1; note = unidentified bacterium
MNIYELLNTTSKEVSSIILELDQHYLSYPIAKRNRKTMRWIDAPQGKLKELQETFLHRYLYRFSAHPSCVGFVKGKSVRTGAERHIGTEQLLNMDLKNFFSTIKIYKVAKLLTFLTSRHSTITGKQVTFVNTDDKEKLARLLTYKNTLPQGAPSSPAIANLCAYQMDVQLTALAKNNGCIYTRYADDLTFSTKKTKDKFNIIGMIPQIRETIEKNMFSVNYKKTRVQKQNNRMTVTGVVVNKKLSTPKWYWRNFRAKLHNLEKSGVPITEEEYQEIRGTAEWIKSLHPVRGEKFLETLGKLNLTI

SEQ ID NO: 7143 - protein, 304 aa, unidentified
  source 1..304: note = Related to JACNIW010000301.1; note = Rhodobacteraceae bacterium
MNIYDMLATDKQTLKTLQTDIDNQYLSYPIAKKKGKAIRWIDAPQPELKTFQEAFLNSFLYKFTVHPCCVGFVRGKNVASGAKQHLGSKQLLNMDFQNFFGAIHIGKVRQLVKFLFSRYKKITDNVFTFTSYDVELFAALLTFKSRLPQGAPTSPAISNLCTLPLDKELAALAAQSDCIYTRYADDLSFSTKQEKAVFDVKDLIKPVSKKITRAQLTVNYKKTRVQRPHNRMTVTGVVVNEKLSTPKWYWRNFRAKLHNLQMSQVPVTPEEYQEIRGTAEWIKMLHPIRGQQFLNTIGKLNLML

SEQ ID NO: 7144 - protein, 327 aa, unidentified
  source 1..327: note = Related to WVYK01000372.1; note = Anaerolineae bacterium
MFLPLTTDEFLDRILVVKNQWKRSTIYYHAKVQHYKKHVREKKPVKNILVMGDAPVPKLREINEPCPALKWIQGYILRMVLDPATDQLMKCAHGCVPGRSTVTNAAPHVKSRWKIHMDLKDFFPTVTVQRVYGLFHKVFKYGPDLSWLLANLTQYEGKLPQGAPTSPAIANHVATPMDRHLVKLISKMGGYYTRYVDDLTFSFPRQMSDKNKTRFIKTVREIVERNGFVVNEDKTSIIGRGSKMTVTGIVVNAKTSTPRWFRRNIRAALHQRALGVPSADNDHVIGGKIAYVNMVCPEQANAFHLKTCQVDDCKKCYGLAMKSKNAS

SEQ ID NO: 7145 - protein, 517 aa, unidentified
  source 1..517: note = Related to JABHAL010000007.1; note = Candidatus Falkowbacteria bacterium
MPTEKKKKVNPLDEYTDFGTILVLSERLAQYLRLLFKLDKASWNFALDKIRQGKAYREWRKFKGRGKGYRYFAAPCAELKTVQRSIKAQFLDQIPIHFSRYGCQGGTGIVEHAAAHMGNKVAFGVDIINAYPTVLRSRIRKCLQKPFRFMLRQFGDVTWLEDDVKNMLEAVVDLLCLHDRLPQGPPTSPRILGIVCYKMDTAIFSYLHESSSPLQGFNMTSWFDDITVSSDKEIPEEMRAKILALIKEHGFIPHTRPDKTKYYSPETGEVPIVTGIVICPDGRLTMAPRKVNQLRAAFNNWLKIEVWDEHILGKVNGTLGAVRQLYPEKLPSKLRVLVGKIEDRLHAGKVAKSLQYLDNALLPSGLQDLAKQLSMVVIDGQGDVSSQLLGDNLLFVDGAARKSYQAGIGAVLIKDRTEVSTISQLIGKATSNQAEYQAIIVGLTAAKELGIAELDCFTDSMLVVNQLNGKFAVSKPHLRTLVAQVKALVKEIGTVRFHHVPRELNTSAHSLAHMALK

SEQ ID NO: 7146 - protein, 374 aa, unidentified
  source 1..374: note = Related to MFGM01000084.1; note = Candidatus Falkowbacteria bacterium RIFOXYC2_FULL_48_21
MAKRGKRKNKKPFVFKDFETVLALPERLAEFLRLLLKLDKATWSFALDKIRQGAAYREWSKSKGPGKGRRDFAAPCAELKAVQRAIKQQMLDVIPIHFTRYGCSTGVGIKENAAAHVVPGVSVCVKEFDIMNAFPTVLRSRIRKVLQKPFRFLLDQFAGMEFGDDDVKLMLESIVDLVCLHDRLPQGPPTSPRLFGIVAYRLDCALFRFLHENSTEFQSYKMTSWFDDVSISSRDEIPEEVGVKAAKIIEEHGFTAHHRKDKSKYYSPATGTVPVITGLVLCADGHLTMTPNKVNQLRAALHKWSGEKSWDEATLGQINGTLGCIKQVYGDKPPSKLRKSVREIEARLAMMKIEKLQADVARARVMPKKKSKKK

SEQ ID NO: 7147 - protein, 454 aa, unidentified
  source 1..454: note = Related to SICH01000034.1; note = Candidatus Taylorbacteria bacterium
MMGTSRFMVSLPCIMASSFKREMGKMAKTKRRKKRKRAEWTWVDFRVILDLPERLSRYLRELLHLDKPSWDFALERIRRYKQWQNEKKEKPDLGRLPRTQVAYFEWSKSKGRGKGRRYFAAPCAELKLVQKAVLNRLLASIPVHFCRHGNQPGSSILSNAARHMGFAKSVFSIDIVNAFPTVFRSRVFANLKKPFKFVLRQFAGVEFSEDDIKQMLEVLCDLICLHDRLPQGPPTSPRILDIVCAKMDQELYALLEKNSTPFQSYRITAWADDITISCDGEIPEELREQCLKVIKDNGFIPHTREDKTKYYSPETGEVPVVTGLVLTSDGRMTMAPRKVNQFRATLHQALKRSEWDAQIRGQIAGTMGYIRQIYPDKLPSALRELVPQTEARMQEECKKALQLNGEATPTVPPNSLPKKKGKAKTKPAKTPKSRTSDEAEESSATETVLCEMQS

SEQ ID NO: 7148 - protein, 437 aa, unidentified
  source 1..437: note = Related to MGKZ01000009.1; note = Candidatus Yanofskybacteria bacterium RIFCSPLOWO2_12_FULL_44_13b
MAKKAKKPRGTAPEEQKKRRRRRKEWTFTNFQNVLALPERLATYLRLLLHLDKTSWDFCLDKLRQHVKWEAEVEDKRPKVQINVKGRERTSRSGPAYLAWSKSKGRGKGRRYFAAPCDELGRVQKSILHRFISQVFVHFARYGGQVGSSIMANAGHHAGFAKSVFSLDIVNAYPTVYRSRVRATLRKPFEFALRQFKGVTFSEEDVLKMLDSITDLIVFKDRLPQGPPTSPRVFDIVCGKMDQEIFQWLESNATPFQGYRYSAWTDNLTISSDGEIPLEVRQKVIEIVRENGFFPHMREDKMKYFSPETGERPIVTGLVVLPDGRITMAPRKVNQLRARLHQLMLRKAWDKEAMMLIDGTIGFVREIYPKNLPSKLRDVVLAVEARRASMRVPVVHDESIEDEDAIMLDEDPETKVPSPSKKKDEGPTETVSEVVLM

SEQ ID NO: 7149 - protein, 436 aa, unidentified
  source 1..436: note = Related to MHXB01000023.1; note = Parcubacteria group bacterium RIFCSPHIGHO2_01_FULL_45_26
MAEKPEKRRQRRRKEWKYDNFAAVLALPERLAHFLRLWLHLDKSTWDFCLDKLRQHRAWDEQVAQFRAQEGKKRKKGEAEVPKPPRCGPAYLEWSKSKGRGKGRRYFAAPCEELKVVQKAINNRILAHITVHFARHGGQIGSSILTNAGHHAGFAKTVFSLDIVNAFPSVYRSRVKAVLGKPIRFGLQQFAGVAFSPEDEEAICASIADLLVFKERLPQGPPTSPRVFDICCGKLDQEIFALLQGHSTPFQSYRYTAWTDNLTFSSDGEIPEPVREQLVELVRKNGFFPHTRPDKMRYYSRETGEVPIVTGLVLGAEGMLTMAPRKVNQLRARLHRFERLANWDDQIQGEVAGTLGYIRQVYPKRLPSKLRDVVAAIDSRLAANKAVTTEVATAPTPAPSTRPKTSKAPGKSKGKARAKSAGKPKVKEELLAEAVS

SEQ ID NO: 7150 - protein, 412 aa, unidentified
  source 1..412: note = Related to JACRNX010000027.1; note = Candidatus Falkowbacteria bacterium
MAKGKKVKKQKLQKTDVKDFEAILQIPERLAQLLRLLFHLSKPEWDFCVAKIRQKEAYREWRESKGPGKGFRQFGAPCAELKLVQKRILQNFLANVTAHFIRHGNQPGSSMMTNVQHHAGFAKAVFGIDLVNAFPSVFRSRIRGNLRVPLERKISEFGEEVNKSLSDEDKKIMLEAVVDFLCLHDRLPQGPPTSPRVLDIVCFALDRSLAGIAAKHSTPFQQYRLTAYADNFTLSSNDEIPEEVKTEVLEEIKKHGFIAHTRPDKTEYYSPFTGKVPVVTGIVLPTTADGHMTMAPRKVNQLRARLHQYAEKSTCTDEERGVVMGTIGYIRQVYPKKVPSKLRALVEQIETRARIERLPAPAVPIEAVPKKVGTDIDLSVIPSADTAKPKRKKPTPKKSKLTKDYCGESLPF

SEQ ID NO: 7151 - protein, 426 aa, unidentified
  source 1..426: note = Related to MGFG01000027.1; note = Candidatus Uhrbacteria bacterium RIFOXYC2_FULL_47_19
MKIAKLCRWLWLVNGLQLNKKRRPGVAKKGKNKRGKRQKIVGDDFRVVLDVPERLVLLLLQFLHLTRANWSFLMDRIRQYKTDGTPVYTEWSKSKGRNKGRRYFAAPCDELKLVQKAILNRFLLSVPVHFIRHGGQRGSSILTNAETHAGFAKSMFVVDIINAFPTVFRSRIKANLRRAWLDHCRMFEGVELSEADKEMMLEAIVDLVAWRDRLPQGPPTSPRVLDIVCLRMDEQLYELFYSHSTPFQSYRSTAYVDDLTFSCNADSIPEELRSEALEIVRQNGFLPHTREDKTVYYSPETGRVPVALGLVIGRDGRITMAPYKVNQLRSRIYTLLTKKGELDDVSRGQLQGTIGFIRQVYPRKLPAKLRQIVEQAEWRLSAEKSGATVTIVVEALPELETPTSESSSEGVTSSPTQVKEAMELSA

SEQ ID NO: 7152 - protein, 407 aa, unidentified
  source 1..407: note = Related to MNWN01000009.1; note = Parcubacteria group bacterium CG1_02_58_44
MAKKGKNRRGKRQKIVGNDFRVVLDLPERLVLLLLQFLHVSRADWTFLMDRIRQHKTDGTPIYTEWSESKGRGRGRRYFAAPCEELKLVQRAILHRFLSTVQVHFVRHGNQPGSSILTSAETHAGAKSMFAVDIVNAFPSVFRSRIEANLKGPWEHACRMFQGVELSEADKEMMLETIVDLVAWRDRLPQGPPTSPRILDIVCLRMDKQLYELFISNGTVQSYRSTAYVDDLTFSCNTDSIPEELREKALEIIRKNGFIPHKRADKTVYYSPETGRVPIVLGLVICHGGRITMTPRKVNQLRARLHTLLTKEGELDDVSRGQLQGTIGFIRQVYPKKLPAKLCQIVEQVERRLTAEKSGATVTIVIEALPELETSNADPELKDAAVPQQDVGESMVSPASVQEVAAP

SEQ ID NO: 7153 - protein, 414 aa, unidentified
  source 1..414: note = Related to JACPMJ010000005.1; note = Candidatus Uhrbacteria bacterium
MATSTRRRRRHTPKEWVYKDFESVLELPERLARILRLLLHLSTQEWDFCLDKLRQKAAYREWAESKGPGRGVRRYAAPCDELKSVQRKILNRFLISIPVHFCRHGNQRGCSVKTNAEHHAGNERAFSIDIVNAFPSVYRSRIRANLRKPFTFALKQFSGQTFEAEEIKQMLESLVDLVCLHDRLPQGPPTSPRILDIVCCKMDQDIWKLISENSTPLQEYRITVWCDDLTISFEEEIPGELRKRILAVMKKNGFFPHERKDKTKYFTPKTGAVPVITGIVLAPDGRITLAPNKLNQFRARINKLLAVIKAEPTKQVYGEIAGTIGYLRHIYSDKLPSKVRAITEKAETELKTIKFNELAGELGKKPRRRKKTTAVTPEPQTSETSAETQIATEEPPRRRSRKKKDTADESIPFK

SEQ ID NO: 7154 - protein, 456 aa, unidentified
  source 1..456: note = Related to JABJNH010000022.1; note = Candidatus Magasanikbacteria bacterium
MPRKKTRKKSRNIARGNNFVTVLSMNDDRLAKTIRQIISFQKGDWDLLMDVLQNSFVYRVERISKGIGKPPRIVHAPNGLLKKVQRKILNRFLSEIPTHSARHGGGQKGTSNKTNALEHQDNAYAFSTDIMNAFPSILRSRVRACLKPHLKRVLYQFRPLVFEFEEKRDPREKPTCDGDIVLEGLIDLLVFDDRLPQGPPSSPRLLDIVSYKMDCDLWRLAQESSNLGDEYVYTAYVDDLSFSSAVPIPEEVQQKMLTIVRDNGFHPHHSPEKTKYHGPDTGSHPVITGILIRDGMMHLPTRKQNQLRARLHNLNVAKEAWSDNERGEAAGLLGFIRQIYPLDSHRKLPSKLKDQVLFSENRLQQRKVVVSETPFGIPVAEEDVITKVCQNNPSISDFNALAVSTRVGWTSHSGIPFTGTITERFPDKPHLAQVTYLSKGGKRCGTRLKCQRLAVL

SEQ ID NO: 7155 - protein, 420 aa, unidentified
  source 1..420: note = Related to JACQSL010000039.1; note = Candidatus Uhrbacteria bacterium
MAKRKRGGAASAGDAPTATLVADDDVAQTFQKIFAALSEPAMTFLSQWLGIPRNATDRGVGLARPYTLADAAAILENGTPYRRYFRPKSGGGVRRISEPAASVKHVQRRLLHVVFPSIPVHHASFAGLRTRSAIEAIEWHAAQGKPFFKVDLKNAYPSVSRTRLTKVLRGPLQEYLARAAPHLVAEEYEALINFVISICLDAGGLAQGAPTSLHLMNAARFELDCALAAYLRSLPGSYTYTAYVDDLIISRGDATEIPEYVRERIVRIVLAHGFLVNRSRRKRKVDYWPAGTGARRPVVLGLVPHRDGRVTISAKNRKRFRAALHHALSSPESSDAHRAQVAGVMGYLHMVYGDDRLPSELRVLYAQCRERFGRPKTPGGAYPDIDCLLAEQHPGEGKAADPHSEVDDARASGKPPTDSA

SEQ ID NO: 7156 - protein, 403 aa, unidentified
  source 1..403: note = Related to JACPHT010000008.1; note = Candidatus Uhrbacteria bacterium
MAEQSRLPISFLLDARLEEVLCQILKIDPAEWRATTALWASGNAWTIHKIPKKKGHRTIHAPSDPLKKVLRALLTQFIQGIPVHLAVHGAHPGTSIVTNARAHVGGKAFYLLDLKDAFPTVNRKRCSAIFGPTFTGYITVVTGLPEQDGKRLAETFVDLLIVDDVLPQGFPTSPAVLNVLLGQVDRNISQLLRSASATEGVVYKYTRFVDDLTISSSDEVIPKKLRQKIRQAVRSDGWTIQGTKVSYFGDGAEGDEERTTKYPEVTGIIPNQDGRLTIPRPRLNKFRAILHNLLEVADKRQSGDEEALKAVKAQMEKDVVAFRKRGISLDSNLSPDKFYAREWPLTTREHRLLVGIVGFVSMVYDQKLPSSIRELYIKAKTQFRIGTRDISQGHAYSFVKETE

SEQ ID NO: 7157 - protein, 397 aa, unidentified
  source 1..397: note = Related to JACQXU010000004.1; note = Candidatus Uhrbacteria bacterium
MPSSFLLDASLEETLCRVLKIDPAEWRATKALWESGTAWTIHHIPKKNGVRIIHAPSDPLKLVLRSVLKLFLQCIPVHMAVHGAHPGTSIVTNARAHVGDKAFYFLDLKDAFPSTNRKRCASVLGPRLATHLADATDLSEKDSKRLAETLIDLLIVDDVLPQGFPTSPAVLNVVLGAVDRVLSQLLRAESEKEGVVYRYTRFVDDLTISTDAPEISKKLRQSIRRAITHDGWTIQGTKVHYFGDAEEGDEERTTRNPEVTGIIPNPDGRLTIPRPRLNKFRAILHDLLTASTQRLEGDAEALGKLQAQFDLFRELCKKRKVWIQPNLTLQEWCGNDWPLSPRERQIIVGIVGFVGMVYDQQLPSIIRKPYNEAKVRFGIGLRDMAGINGYNLDTEIC

SEQ ID NO: 7158 - protein, 341 aa, unidentified
  source 1..341: note = Related to PFWU01000005.1; note = Candidatus Uhrbacteria bacterium CG_4_9_14_3_um_filter_50_9
MCVNSSTAARFAQQEVFMTDPSAAPASFHKLTPMIERTFVELIRETEAVWSWCHQLYTDGVPWEMRRIPKKKGFRTIHAPKDPLMAISRGILHHVLRRLPVHRSVHGSEPRSSVITNARVHAGFAKSVYNLDLENAFPSTNRKRLVANLSPKMLALLLDSTDLSEEEASVLVELLIDLMLVDDILPQGFPTSPAVLNIVLLPVDREISRYLRQVGEELGCELRYTRYVDDITISSDGDRIPKPVRNQIRKIIRHNGWKINQTKLMYHGDAEPGDDERSTKMPMVTGLVIHDDGRLTVPRWKLRKWRALMHELLQAEDVSQDQRDTLVGVVSFLTMVYDGDL

SEQ ID NO: 7159 - protein, 395 aa, unidentified
  source 1..395: note = Related to JABWCH010000247.1; note = Candidatus Brocadiae bacterium
MALKITCPQCTAEFFVVEAFSGSKIVCPQCTSAIILALKTQHPSTHISGPKAILPSQMLNIKEEAIRHLEIWLDVPSVSIKNALSMIEQDKAYEVWKIPKGESNTFREIAAPADVLKHIQRRILDRLLYRIPVSNASHGFIQGRSIVTNASFHLKTAGAVLNFDLKDAFPSVDAQRIKHLLVRYLKIPLKHLGGNIPHEALDQAIEMLVKFTTYKGALPQGGPASGYLLNIACISLDKTIYSLLQSYGNSYRYTRYADDITISSPMPFPQGLQEAIETAIHNSGFQINPKKVRYAVRSQGQRLEVTGLILEKDKVRIPSQKIEIFRAIIHQAGSLETQNLQPEKRLEIQSIIAFIKMVYGKIPYRIWGPYKAYMEKHGIFMPRKTSKAYLSLYPH

SEQ ID NO: 7160 - protein, 403 aa, unidentified
  source 1..403: note = Related to NZ_AP019860.1; note = Candidatus Uabimicrobium amorphum
MAVEIRCPECGAAFQAEDVFPGSRVSCPSCEAILILDVEKQRLSRKSIVPPVPGPKIYKPEDQDSLKRAAINHLSNWLDIPATQINEALASLQKGEGYNDWKIPKGNEYSFREISAPIQILKDIQRRVLDRLLYRIPVSNAAHGFINGRSIVTNASYHLETAQSILNIDLKDAFPSVKKERVKHLFVRYIKIPLKHLGEQIDHGVLNKVVDILVELTTHNGGLPQGGPCSGYLLNVACITLDKSIYRLLQTHSTQYIQYRYTRYADDITISANAPISNMLKSEIQKAILNNGYQINPKKIHYAERKRGQKLEVTGLIIEKNKVRIPASRLDNFRANIHQASLMNTADLTPEKKLEVQSIIAFAKMVYGKVPHRLWGPYNTYLEKHGLTHPFGRKGLQWDQYPS

SEQ ID NO: 7161 - protein, 398 aa, unidentified
  source 1..398: note = Related to JAGOMP010000071.1; note = Planctomycetes bacterium
MSIKVQCPQCNSGWNVTEAFPGSMVHCANCGCAVLLAITPTYTSQRFLTPAPQVTGPSQQEVLKEQAVGHLEAWLDVSAEQIQQALESIRLGTAYDIWKIPKGDSGFFREITSPCDVLKMIQRRILDRLLYRIPSSNAAHGFIPSRSIVTNASYHLKTAGAVLNLDIKDAFPSITSQRVKHLYVRYLKMPLQHLGVAVPHAVLDYAIALLVELTTYNNQLPQGGPCSGYLLNLACLRLDKEIFRLLSTYGASYKYTRYADDITISAPMPFPEDLSSNLMKVILHAGFQVNNKKVHYAIRDKGQRLEVTGLILEKNKVRIPNEKLEKFRTIIYQASLLDTENLTCEKRLEIQSIIAFVKMVYDSVPFRLWKPYQIYLDKHNIPLSKGSQHLSLDLYPHY

SEQ ID NO: 7162 - protein, 429 aa, unidentified
  source 1..429: note = Related to JACQVV010000429.1; note = Planctomycetes bacterium
MATTVNCPGCAREISIGRAFTGERLECPDCQTILLLKVTAAPSLDRPQTILPPPPRFAHPPAPKDEAEIDRLARAHLASWLDLSARELGAALSLVENGQGYDTWQIPKAGPSFRTISAPKEELKRVQRRILDRILYRIPVSNASHGFVPGRSIVTGARVHLEDAKEVYNLDLKDAFPSVDATRVKHVFVRWAKIPLKHLGPHVEHAVVDRVVELLVRLVTHEGKLPQGGPTSGCLLNLACLKLDKYVYRFLGRYPGDLRFTRYADDLTVSSRDTIPEEVRQGLQAVIRDCGFRVNPQKIRYLSKARNQNLEVTGLILEKGQVRIPPATLDRYRAILHQAATAHELPDEKRLEVQSILAFVKMVYPALPGAIRKPFEAYAAKHVGRPPGPRKAFGLDLYRGARPPAPEPAAPEPGALPAPAPEPPAPPTG

SEQ ID NO: 7163 - protein, 420 aa, unidentified
  source 1..420: note = Related to RFJW01000804.1; note = Planctomycetes bacterium
MERSSMEFEIHCPSCQKEYLVYHPFTGAILPCQSCGTNIVLAIPKELEKEGDLKQFRYTIKRGRKREKPHTPHLVSPEKQLLLREEALFALSRWLDLDKSTLEEALDLLKEGKGYNEFSISKGPGRGYRKISAPSPVLKKVQRQILDRLLYRIPVSNACHGFMPRRSIVTNAKFHLPTAKVVYNVDLKDAFPSVSSLRVKHLLVRYIKIPLKHLGEQIEHETLDEIIHLLVQFLTYQNSLPQGSPASGYLLNIACIKLDKYLYKLLREEGLAKEIRYTRYADDLTFSSQDSIPETLRRKIISTIRDCGFQANTSKTKYLDRGKNQVLEITGLILEKGAIRIPRDTLERYRATIHRAYLTDTSELTEEMKVEVQSIVAFVKMVYPLLPYRISKPYKMFIQKHNINPIGSSSQFPLSHYPKG

SEQ ID NO: 7164 - protein, 423 aa, unidentified
  source 1..423: note = Related to RFKQ01000043.1; note = Planctomycetes bacterium
MRAQIQCPNCSQKHHIQNPYPGSLLLCPHCQTALLLELSPELEKEFHLHPPKQYRFTIHSGRKKQPLTPTILPPETLQQLQEKALFALSRWLDLNKEHLSNVLQLLEQNQAYDEFKIPKTQPHTFRQISAPKEELKLVQRRILDRLLYRIPTSNACHGFTQGRSIVTNAKFHLPTAYEIYNLDLKDAFPTVNTLWVKHLLVRYLKIPLKHLGEHVEHEVLDEIILILTKMLTHKNGLPQGSPASGCLLNIACIKMDKYLYKLIADKYQNTIRYSRYADDLTFSSPTTIPQSFRQEVQQIIRNCGFSINPSKIKYLSKKRQQLLEVTGLILEKGQIRIPKTNLERYRATIHNAYLLPHEELTEQKRLEVHSIVAFVSMVYSHLPNRIQKPYQKFLEKHGGKPIGKLTKLGWKTYPPDPPNPKLT

SEQ ID NO: 7165 - protein, 721 aa, unidentified
  source 1..721: note = Related to JACKEL010000003.1; note = Myxococcales bacterium
MGQDTPKRKRNTAHLTIRAYQPLASYSDAAHQLLAQWLDVDVALLREVHQAIRQGDAYYHYRIPKPGRLEWRDIFEPYGALKEIQRRILDRLLYPIRVSNAAHGAVPSRSVVTNAMHHLPNAQQLLMMDIRNAFPSVRLPRVHGIFRRYVKPLFRKFGPLPNAKDAQQGPSPVDEALHFLAALTTMKQTVDTPQGPRETYALPQGAPTSGYLLNLACLEMDQKIFKIIDQNKDLGLRYSRYIDDITISTPSAIPPEVQNELELAVIKNDFRLHRGKTRLVETHNENAVICGVTLRFGRLEADPLLLERCQEVLERSVEVADPRTEIKRRSKIRGIVSFFKQVYGDQLPSGLKDVYQRYRKARDLPEEPEVAAPTLAPAEPRTAEAQDAVSLLAQWLDLSPSLVGLAGELASSGLGYEEWEIPKGNGKTRKICSPKNELKETQERILDRLLYHMPVSVASHGFVPGRSIVTNAQAHLDAQHLINLDLKDAFPSVSKHRVKLVMQIGLGNLLKKFGLRCPRSLRDDVIELIASLTTHKDELPQGAPTSGYLLNLACLTLDKRIFACLQEHKVSIAYSRYADDLTFSTQEPLPDELLGQIKKLIENAGFRWHPHKVHVASVAKGQALEICGLRLDGNQIRIPREKLKTYRSVLRRAAIKIPTGQLDADTKNHVQGIVGFVKMVYGDLPHSLAQPYQAFLQTHPEARPTGSAREKFALYPNVLPA

SEQ ID NO: 7166 - protein, 717 aa, unidentified
  source 1..717: note = Related to PCBK01000030.1; note = Deltaproteobacteria bacterium
MSDNSTVRKRNTSHLTIRKRSPLSSYSDSAYRILSQWLDVDTSLLYEVLEALKAGEAYYTYKIPKHGTYEWREINDPYGGLKEIQRRILDRLLYTVPVSNAAHGAVQARSVVTNALEHLPDAKEVLSLDIRNAFPSVRFSRVHRIFRKYIKPILRKHGPLPSPNTGGNPPLDEAIHLLAALTTYPRSIKQKGQTQKVWCLPQGAPTSGYLLNLACRALDRKIFKIFDKHPNLNLRYSRYLDDMTISSSVELPADVQRELELAVKKNDFRLNRDKTKKYGPTDTPVICGVMLRQGHVEAEPELIQRCNDLLKRSVHVDDPRVELQNRRKIRGILSFFKMVYGDQMPTEISEPYSEYRSARNLPPEPSIPAPAHPTVSARAVEHQSAMSLLAQWLDISMDTLNTAHQKSLSEDGYEHWSIDKKNGSKRQICSPCLEVKDIQDKLLSRLLYHIPVSVAAHGFVPGRSIVTNALAHANARYLLNLDLKDAFPSVSRKRVEHCLNVGLGGLIKRFGLRCPTALRQDVIGLIADFVTYKDALPQGAPTSGYLLNLACHTQDKRIFELLERTAPNVTYTRYADDLTFTSTEPLPEGFLEAIQNEINRSGFRWHPQKTHFAAVHKGQNMEICGLRLDGSTLRIPRKKLKHYRSVLRRATNKLETGGLDTETRHKIQGIVGFVQMVYGELPRSLSQPYAAFLQKHPEARPTGSAHEKISFYPNIQT

SEQ ID NO: 7167 - protein, 719 aa, unidentified
  source 1..719: note = Related to SBHC01000053.1; note = Deltaproteobacteria bacterium
MSETNTPRPRNRSHLTIQARRPLASYSDAAYRLLGQWLDVDTGLLQEALEAILAGQAYESFRIPKPGRDEWRVILDPYGGLKEVQRRILDRLLYPIPVSNAAHGAVPGRSVVTNARQHLPDAQEILSIDLRHAFPSVRFSRVHSIFRKQVRPLLRKLGPLPTAHSGTLDPVDEVIHLLAGLTTYKQTVRQQGRTTQVYCLPQGAPTSGYLLNLACLPLDGKIYKIIEKNPELNLRYSRYLDDLVVSSPNQLNDEVQKEVELAVVKSDFHLNHQKIARTQAPAPLVVCGVQLSGEQLTAEGGLIERCADMLRNAEAVRNPTAEQKLRRKIRGVMVFFRQVYGQDLPPNIAEPYQQYRTNRQLPEEPETVAQAVAPVTLATEPSNAVELLAQWLDLTPETIAEARAKIQAGEGYESWSIDKGNGSKRIITSPVDQLKDIQTRILSQLIYHIPVSNACHGFVPGRSIVTNAMTHQGATSLINLDLKDAFPSVSKHRVELGLRIGLGRVIKKFGLRFPRPMRDELIALLGELLTVDDQLPQGAPTSGYLLNIAAMSLDKRLFELIQEHDQEVTYTRYADDLTFTCKDGELTTDFLNKLKRVIRRSGFRWNPRKTHRAEVDKGQQIEICGIYVDDDGLRLPRDKMKAYRSILRRAATQIPTGQLDDATKRQIQGVVGFVEMVYGELPRRISEPYQAYLQQHPDARPKRLYRDKISFYPNIMPNP

SEQ ID NO: 7168 - protein, 345 aa, unidentified
  source 1..345: note = Related to PBSL01000014.1; note = Planctomycetaceae bacterium
MELNRPADTAFAMLARLLSTDNEVVRAGHEALSGGDAYRSWEVPKGNGKTRRIDAPVEELKQVQSLLLTRLFCHAPTSPFAHGFVPGRSIATNAAVHQQTGRSLVSLDLEDAYPSVSRQRVVKTLEWGLGYFLKHVAPCSSRESRDELYELIADLCCFRQCLPQGAPTSGLLLNMACCSLDRRCARLLRRCRDQFPELRYTRYADDLSFTSSEELSHEFLEQAIGCVVQAGFRVNRRKVKRYSVRNADLVICGIRLHEGQLTLPRRVLRRYRALLFQSLAYGPDEISEENRQFLLGHIGFLTMASSVCPPQLERLLEEVLQQHGSWLRSGVASHILPSYGEVGRS

SEQ ID NO: 7169 - protein, 344 aa, unidentified
  source 1..344: note = Related to DLVH01000085.1; note = Planctomycetaceae bacterium
MGMNAYADSTLSLLSRLLMTDRETVNSGFEALSGVAYDSWTVPKGNGRERQIDAPVPELKRLQSLLLKRLLNFAPISPFAHGFVRGRSIVTNAAVHRETARCMVSLDLKDAYPSVSRDRVVKALQWGVGSFLKHTSPETTRGEREAVFEAVADVCTHRDALPQGAPTSGQLLNMTCCSLDRHCSRLMRASREEFPGLRYSRYADDLAFTATGELSHEFLERAIGCVLRAGFEVNRRKVKRYTVANADLVICGIRLHDGQLTLPRRVLRKYRALLFQTLAREPEDMSDGARQHVHGAIGFLTMATTVCPPQLEDLLQAVLQQHGTWLRPGTVPAHFPFYSSFSQK

SEQ ID NO: 7170 - protein, 977 aa, unidentified
  source 1..977: note = Related to JAHJCH010000159.1; note = Myxococcota bacterium
MTEPTQRAARLARLMSRGAATGASEARATPHEAARRATQVLIGALLPGDVELQAALGGDLSALEHAQRPGPAQALLDALLDALEGPLSAPLAGWVELAEGGASDGALWRAVDTHLARPECLALRRALTSRWAALPSTRARLSALIDARPSLRGARGPLTGLLSAALSASESLRGSRLSEALRVEVYVSYRRFQRALLSDDLRSAGAALDDLFGYTPNRPALLISDAALCVLEGRPGEARRALSEALAFIHDHAALEAAYAALAAPPRLEKTAAAPRHSPRDLRPRLGIEGRAVRAEGRVYKPRLDRWSPRPSYARWVIEAVAAALGRAPEAIDAALTTLHRGEAYRAFTITAPSGKPRRIQAPQGALIEIQAAILEGLLYRLPVSNAAHGATPGRSLITQAVAHLPQPRQALSLDLKDAYPSVSFQRVYRVFYEGLARLLPVARLPGLEGLRPLVARDHLAHLLATLTCAPLQGARPKPKTAWALPQGAPTSAALLNLACADLDRGVYKLLRAHPGVDLRYTRYIDDLTITATGGALPEGLTRQLERLIERVGFSSQPLKRRAWRVGEGPLIICGLSLESGGVAFGPDLIARAATLSALGAPGAAELRGLAAFARQIYAQTPPFLQSWAEAAPARAWSSPRAPYLRYLQGDPTAAAPGVAQLARWLDAPMAQVERALALLEAGAAYATWRLSKGGGGEREIESPAAPLKGLQTRILHRLISRAPLSAAAHGFAEGRSIATNARAHLGAAALLNVDIEDAFPSVSAQRVRHALDRALGPRLASLGPSAEAASEALGLLTRLLTYRGRLPQGAPTSGALFNLCLTPLDRLLEDACGPRGITYTRYADDLTFSSPRVEAIDAAFGDQIKQIIHRAGFRWSARKWARMAAPRLEVCGVRLDGAHLRLSRAQLQRYRATLHRLAHAPTLDAEGRDKAAGILGFVHMIYGELPAPLRGPAQALRQRHRLEPKPKSKLDLYGRG

SEQ ID NO: 7171 - protein, 352 aa, unidentified
  source 1..352: note = Related to JADZES010000076.1; note = Deltaproteobacteria bacterium
MPGRSATTLLAKLIDLPAREVEEALALVTGGEAYDRFEIPKVGTRAPRVIQAPVERLKRVQRALIGLLEPLALHSAVHGFRRGRSIVTGAEKHLQARAILNIDLKDFFHSVDRDRVRRALQRSLLPRLVEETGELTKAEGDAVVALVTELTTYAVPGRDLPVLPQGAPTSPFLANLAARKLDQEISELLAGLPGELVYTRYADDLTISAPHEIDRRLIGEIIKRVQRAGFAANPQKVRLASTLKGSPHYRQKLEVTGLVIDPRDKVLRIPRDRLELYRLKIHQAAHLRELDPGTRQEIEGFVSFAFMVYRTLPPSLATAYERFTAAHRLAPLQAGKSRRAARRRATQKELYP

SEQ ID NO: 7172 - protein, 351 aa, unidentified
  source 1..351: note = Related to DLVH01000085.1; note = Planctomycetaceae bacterium
MCDPCGLDPQGSWPPVAIETPTVLSADCKMALADLLQLPSGQIISAWDAVRGNAAYDWHLFGAREVAVPVPLLADVQRRVLDRVLRTGPVSPAAYAGVPGRSYVAAAWRHLGGTGAETVVMDIAGAFGSTTYGHVRSALSRRLKHELWVLGLDSDDAKAVVQVIAHLVTVDMDGRSRQLPLGAPTSVALFNLVLLSLDGDLARWCVPRGIRYTRYVDDMVFSCSEGVPNQLEEFVEHNVERFRFRLNQNKTVRSAAGMGTVHGLVRTADGIVPGEGARRRFADNIQWHTRQAEDEATSEAHREKSRGFLKGLNTFLRQFYERQDLARPEMLKIHVPEGSTAASPLVDLLWE

SEQ ID NO: 7173 - protein, 301 aa, unidentified
  source 1..301: note = Related to BPBW01000218.1; note = Planctomycetaceae bacterium
MWRWWLRLAPAGRSEVAVPVPVLSDLQRQILERILRTGPVSPAAYAGVPGRSYVAAAWRHLGGSGAETAVLDIADAFPATTYGHVRAALFRRLKSELWVLGLDPADSKVLVQVLSHLVTVDKGGRSRQLPLGSPTSVAMFNLVLLPLDGELARWCKPGKITYTRYVDDMVFSQADGLPVGLETTVHRAVVRHGFRLNPAKTVRRPAGQGTVHGLVRVAAGIVPSERARERFASNIRWHSDRTADTTIPAPQRQRSRGFLKGMDTYLQQFYERQEISRPGSLEIQIPEGAAVPPPAVDLLWD

SEQ ID NO: 7174 - protein, 337 aa, unidentified
  source 1..337: note = Related to PBSL01000014.1; note = Planctomycetaceae bacterium
MTVITIPDPLSDDCRVALSDLLRLPVEQVMAAWKVSQTDRGYDWNLYGDRVIHVPQPLLSEVQRQILDRVLRTGPISPAAFSGVSGRSYVLAATRHLSGPPAETAALDIADAFGSTTYGHVRGALWKRLKQELWILGLSGSESTAIVKVLSHLATVADRARTRRLPLGSPSSVAMFNLILLPLDGEMLRWCSEYGITYTRYVDDMVFSCPDGLPPDLESRVEAVVRRHRYRLNHGKTIRHAAGSARVHGLERTTEGVVPGADAVERFAARARWHQGKAVDETSSRSQRERSYGFLRGLDVFLRQFYEAQDLQRPDSLRIVVPEGAERPVPPIDLLWN

SEQ ID NO: 7175 - protein, 332 aa, unidentified
  source 1..332: note = Related to PFNL01000093.1; note = candidate division WWE3 bacterium CG_4_10_14_0_2_um_filter_41_14
MKMLPPEWEQLWECTRSGNEVTDEVTFHALEWLYDNRTKKGTWFHNPFRVEKKNKQGQFRLISWAGPQLSIVHLAISRWLKHEYVRKSMDASTPGAGGVMVALRAHGDNKFVTLVDVANAFSSVSERSLSAALRCLMDDVTEEFLDVLLELTTVDGHVWQGWSVSKDLFNLVMLNLDPVVFDQLPFLGVEIYTRYVDNLIFSSSKPYSPITLERFLRHVFKQCGFLLGPFQHSDQGRYSYLGVMVEEGNYRPQDVKRYVVEIEKALQHPCPHLYYWTILGYFSWTLSVSRDNIPKELFEVFERYFKLVGMIPPALQRLMIMRYQMSFADLQN

SEQ ID NO: 7176 - protein, 345 aa, unidentified
  source 1..345: note = Related to JAKLSD010000282.1; note = Candidatus Portnoybacteria bacterium
MTEKKYKLQPLEKVSLDVQFSWTMGIIAKLLKITKKNLRKAKKIVSAPKYDDEILINGMPTQITFHYGFYGFIKKIKRKQRKILAPHPKLQIVFRAIKDTLVEMEPTHENAFGFVKKRNVQMAVRSLLGNAHFISFDIADAFPSITAKMVENSLKKLKLQEELIQPLTHLVTCDYDQERRLPQGSSCSPAILNLVYKPMCQEIDRVCGTHNISWFVYADDFNFAALVIPPQAKNELLAIPPKYGFSTKASKTKDNLGKTIPHMLGLTIVDEKVHIRRRTKKKFRRILYMAWKYEAYSPQQIRGVAVAIRQTYGNEKNWPGWLKEYWIKYQTKRQAEGGRYEKSAQ

SEQ ID NO: 7177 - protein, 344 aa, unidentified
  source 1..344: note = Related to JADHWO010000107.1; note = Candidatus Aminicenantes bacterium
MVREKHELQPMKNVSLDVQFSWTMGIMAKFLKTTKKELRKVKKIIDVKNLKDQIPIKGSFVKMTFTHGFYSFTKKIKRKQRKILAPHPKVQIVLKAIKDTLVELSPAHENAFGFVKKRDIQMATRSLLGNTHFISFDITDAFPSITAKMVEKALRKLKIGEELIKPLIWLTTYYYNQDRRLPQGSSCSPALLNLVYVPMCQEIDEVCKAHGIKWCVYVDDFHFAALKIVPDVKKKLLTIPSKYGFSIKAKKIKDNFDRTIPHILGLTIVNGKIHIRRCTKKKFRRIFYMAWKHGAYSPQQVEGTVAAIRQTYGKEKNWPGWLREYWTKYQTKYQTEGGRNGKHG

SEQ ID NO: 7178 - protein, 332 aa, unidentified
  source 1..332: note = Related to LBPM01000015.1; note = Candidatus Moranbacteria bacterium GW2011_GWF1_34_10
MAISNEMCPLSVASIQVQLQWTLGGLSELISVPKKQLKKAFKIVSTPKLEATIMKRGGLVRKTFLYGFASYIIKNKNKERKILEPHPEVQKVYKKIKEWLEKVDPPHERTFGFVKDRNCKKATETLSALFRGGHHVAFDIADAFPNITEEMIKEALLRLEIEVDMAEVLAWFVTYNYQGKRRLPQGSSSSPSILNLVYKPMCKEIDRFCQANGIEWSVYVDDFNFAAPSISSELKDALLSIPSQFGFSIKPKKNKDNLGKTIPHLLGLTVADGKLHFSRTQKKKFRGIFYLAVKYQEYPPEVVHGIMRYVHHIYGPKENWPGWLIKMGGTQS

SEQ ID NO: 7179 - protein, 307 aa, unidentified
  source 1..307: note = Related to PCRP01000057.1; note = Candidatus Nealsonbacteria bacterium CG23_combo_of_CG06-09_8_20_14_all_38_19
MLENKSGYRVWSIPKKSGGKRQIQAALWPLREIQARIAALIYPYSISEINHGFIPGRSHQTAVLPHLLANAMFCWDIKDAFSSTTKKQVLLKFRVIGFNNPLADLMADLVCYSATGKSEDGFLPQGYCSSPIIFNLVLKDIDRLLFLFAQQRDYQISRYVDNFAISTPKKEIPRQDRELVVRIVMNLSNGSYKVPEEKTSYFKVEEDKVCFEFLGLVIKGPKKGKREIRVTDEKLADYRWTIHDALEKGDFSDRKVREIRGKINYLKSVYQRQSLPLPIRIMELYFQYQQMAEVAKTGQLPLNLSGP

SEQ ID NO: 7180 - protein, 305 aa, unidentified
  source 1..305: note = Related to JAHJOV010000010.1; note = Patescibacteria group bacterium
MLETKKAYHVWFIPKKPAGKRQIQAARWPLNEIQVRIAGKIYPYSISEISHSFVPGRSHRTAVFPHLRANAFFTFDIKDAFPSTRKKQVAANFRWIGFKKAVADLMADLICYSPTEKSEDGFLPQGYASSPTVFNLILNTTDRVLFGFSQKRGYQVTRYVDNFAISATQKTIPEEERKLAIKIVKSLSLGNFKIPEEKTSYREAGEKEVHFEFLGLVIEGPRDGERKIGVADEKLADYRWVIQEALDKEDFSEGKFREIRGKINYLKSIYQGRALPNQVAELYNQYRLLREIINTTKRGQLSLPI

SEQ ID NO: 7181 - protein, 338 aa, unidentified
  source 1..338: note = Related to JAHIGO010000018.1; note = Patescibacteria group bacterium
MITPGRKEAISELAVALEISPNLINRALQMITDKTAYNVWSTPKKSGGERQIQAANWPLNEIQSKIAAEIYPYSVSEINHAFVAGRSHRTAVLPHLRANAFFSFDIKDAFPSVSRRQVLLKLRLLSVQLGLKDRVAELITDLVCYSPTGKSEHGFLPQGYRSSPHIFNLVLKDIDRILAGFAQKRGYQITRFVDDFLISTTEKAIPREDRRLVIKLVENLGGFKISPEKISYLESEGNDVHFEFLGLAIKGPREGERTMGVAEKKLNECRWIILGAMEQKDFSKKTFRRIKGKVNYIKGIYKSQGKPLPAKIADVFAQYRSLRAIADADKNQQVLFKI

SEQ ID NO: 7182 - protein, 328 aa, unidentified
  source 1..328: note = Related to MHNB01000007.1; note = Candidatus Portnoybacteria bacterium RIFCSPHIGHO2_12_FULL_38_9
MNNEKLKKGINEICNFLEYNPGIMDLEKAFEGRNSYQRIFIRKRGGKKKGKRVIHVPPPKLKNVQSVIHRRVLEMVEWPASVHGFVKNRSHLTAALKHSRSIPPPVALLLIDFKDAFSNVGVKKVERALDKRLQPNLLCPLSPGAIKLLAKLITYRGRLPQGAPSSPTIFNLVALDLDEVLSVYAEERGYTYTRYVDNIAVSSPKPIPKNERAEIIGLCRQFGFQVVSEKARYQEAKWGVLEMTKVLLQPYGGQKWYASYGLGLSNRKFVDKVRAMVHRAQKDPSISLASIWGKIDYVRLVDPYKLSSRLSKPMRQLRSIQSNLERRK

SEQ ID NO: 7183 - protein, 326 aa, unidentified
  source 1..326: note = Related to LCRC01000006.1; note = Parcubacteria group bacterium GW2011_GWB1_52_7
MLTPLGCRFQELVSRAAQLLAVEPALIEQALQEKGQYQRRTRKKPGKDAEGRPRIRVLHVPPPVVKEVQRAIHRHLLNLGNSWFRKLGSDFAWPIAMHGFLPRRSNLTAARDHIGNTALFTLDFADAFPSVRRERVATALRWHAKLGRQEANFIARLATYRGRLCQGSPSSPLLFNLVVLNLLKSLERLAAERGYRVTIYCDEVAITADKPIPAEERRAILQLVIQAGFAVHPKKIRYQEARWGALEVTKVLVRPDRLGLSTRHTIDRVRAFIDHLARRGTADTKELAKAKGYIGWVELVDPEKLKTRLRKSLAQLAKLEQSGGHS

SEQ ID NO: 7184 - protein, 338 aa, unidentified
  source 1..338: note = Related to JACPLK010000008.1; note = Candidatus Parcubacteria bacterium
MQQAELPLSPNNAPWPDDFRTALGLDEAALAEAWMHRADYRPHRVPKRKARRIGPKREPRVAKKKRRPIDEPHPALRVVQEAIRRKLLEQIPLSACAHGFRKGRSAKTALLPHRKSTSFFTVDFRNAFHKVTGAMLAEALRACTPIIKPRWVAPLVAFTTHRGRLPQGAPTSNDLFNIACRELDANLAAFAQTRGFVYTRYADAVIISAKAPLPTDLQREIEAKIRAYGFPLAAEKTGYTEPRYAHPVIMGIAVVDGRLRVPRRQLDRARAFLHRAKLDPTIPMEIVEGVLGNVRGLIGGLPPRLLKPYKALLMSRHLWVRYRRRRGIPYVAHSPMQP

SEQ ID NO: 7185 - protein, 329 aa, unidentified
  source 1..329: note = Related to JACPXH010000004.1; note = Candidatus Parcubacteria bacterium
MPAPWPDDFRTALGLDEAALADAWLHRADYQPHRVPKRKPRRIGPKRQPKAIKKKRRPIDEPHPALRVVQEAIRKKLLKRIPLSSAAHGFRKGRSATTALIPHRKSAAFFTVDFRNAFHKVTTAMLADALRECAPIIKPDWVPPLVAFTTHRGRLPQGAPTSNGLFNIACRGLDANLAAFAQTRGFAYTRYADAVIISAKVPLPTSLQREIEAKIRTHGFPLAAEKTGYTEPRYAHPVIMGIAVVAGRLRVPRRQLDRARAFLHRARYDPAIPMKVVEGVLGNVRGLLGGLPQRLLKPYRELLTSRNLWVHPRRRRLAPPLTPSTSSPP

SEQ ID NO: 7186 - protein, 407 aa, unidentified
  source 1..407: note = Related to LCRC01000018.1; note = Parcubacteria group bacterium GW2011_GWB1_52_7
MRDKRQLGIFIPGFLDDSMLKLAVPQTARMIGYEEKHLPFFSRTLRRVLSDPNAYRSVQIPKRLGGYRTLDIPNHDLMQVQRRIHSCILVRRYVPSPICHSFVGKLYDRSGAAEERWQAGRSIFTNAFAHLAPGPRARRDVRIPSSILTVDLKEAYPSIAADRVFRVYQELTGDPWTAQILTHLSVWRGCLPQGAPTSPMLQNLVYRELDVALATEFNKGPFRLTRYADDFTLTSLRGYIDPKIVIHLIEVVEAHGFPVNRQKVLRWRRKDRRLRVTGINIRRTAERPFSLPRKKLEQLRAALFYAVKTLQSTARYEAERRAAGTLDTTTAKALDQLQKQTWGRIHGLVGFAVQVYGDELPPTIYKWFGFLREETEVTGEELLQQIRESFPVSEVQRSGRELLGDSP

SEQ ID NO: 7187 - protein, 366 aa, unidentified
  source 1..366: note = Related to JACOZA010000081.1; note = Candidatus Sungbacteria bacterium
MQQRLSDPYCYRAKQIPKRLGGLRTIDVPCPRLKKLQRRIHDFLLRRHYRPSRICHSFVGKFYDVARPARKRWIPGRSLFTNAWVHLGVPPGVSPRSKSRRIHWRIPRSLFSVDLKDAYPSIGVDHVFRIYQELTGDPWTAQILSTLSTWNGSLPQGAPTSPLLLNFACRELDGALAHEFTRGPYRLTRYVDDFVLTSTDPEISEATRERFVAIIEQHGFKINQAKTCYWRDTDRALRVTGINLFPQERHIGLPNVVQRQFRAALYYALKSLESIHAYALQRGVLDETTAMSLRGAEKQAWGLIYGVIGFTYQVYGAKIPRPIYAWIPELTARTGVTSDTLVAKIKKYPPIAAIQQIGEEIIGSSP

SEQ ID NO: 7188 - protein, 382 aa, unidentified
  source 1..382: note = Related to LCDF01000016.1; note = Candidatus Giovannonibacteria bacterium GW2011_GWF2_42_19
MKEFENIGSILKAIVQKSMYNVIGLSNAIDLERALELARDPKTGYRRFIMEKKSGGKRPIDAPHDDLKFVQRMIYKKILLKDFTPSKICHSTLERSIVSNAYAHLGVPADVVPNPSYITIPWREPQSIHLIDLQGAFPSIKTGRIKEIYQDILHDENAAEILTELSQLRGSLPQGAPTSPLLFNLACRELDRDLEEEFADPRLPLTRYVDDISVTSLDSRVPQKKQKMLRMIVEKHGFKIKEEKVANWDVRDKPLNVTGIALNPAKRAIFLPYKTREIFRLLMFKSYKTLCEANSEWFEQERDISLMKFITQGRRRYKRAFGTICGVASLAFMVYGKDEAPKRTFSWFEGYDGDVSSATFQAILDDIRNGDLVGEIWGYNQF

SEQ ID NO: 7189 - protein, 404 aa, unidentified
  source 1..404: note = Related to JACQJT010000015.1; note = Candidatus Giovannonibacteria bacterium
MAKNPESIGSLLANLSAKEPRGSLLTNLLAKISLHETAKLIGTDERSLLRALRLAKRPDGYKRKYIPKKRGGFRPVDAPHDDLKWVQRCLHRNFLRRRHHPSSICHSFVGKCYDPQAEFGEKWRAGRSIVSGAYEHICPGEWRHPRSLFSVDMKDAFPSVTEKRVSAIYKELSGNELVAKVLTNLSVLNNSLPQGAPTSPTLFNLACRELDANLAEEFGLDGRFVITRYADDVTITSVEREIKTADRERLVKVVEGHGFKVNREKDCYWQDWRHVLRVTGINLDPEKRRLFLPRSELDRLRLLAFHSLRVLENESAAWLESKSRFDVPDFLRSLDKRATMAFGRLGGIVGFCSMVYDEQEWPSRLFGWHPALAEWSKDDFHTLLQIIKEGELANPDSDLFDFSP

SEQ ID NO: 7190 - protein, 421 aa, unidentified
  source 1..421: note = Related to JACPKW010000005.1; note = Candidatus Giovannonibacteria bacterium
MNIKKLRKEDTNLQQPSLGIQSLVEKTLGKLALEETARLIGVDVSDLVKALEIAKSSDGYRHKKILKKRGKGYRRIDVPHKDLKWVQRACHINLLLRHFKPTPICHSFVGRRFEKDSLHWIFGRSVISGAWAHLGVPPDEEPDPKSNSINWRKPRSQLAIDFKDAFPSVSRTRIKEILQKLLEQTGKYQAGADIIAEILVDLTTWNGVLPQGAPTSPVLFNLACRDLDEILIGEFSDEEQKSRIKITRFCDDISVTRLSKKIGLKTRGKIERLIHKNGFQINEEKTVHWQDSHHVLRINSINLDPINRRVFLPRETIERFRYLLYRSWQELEESFSWWLVLGRDSDNTIKYFLNQAAYGRIAGIVGYCRMIYKEDSEMPLRLFSWNPDLSGYWDQERFEQIFADISKGSLIQDLEDHLHYF

SEQ ID NO: 7191 - protein, 403 aa, unidentified
  source 1..403: note = Related to JACPYH010000043.1; note = Candidatus Sungbacteria bacterium
MLHQAIGHVADLIGLRKRDVPFLKTVYERALKDPYAYEPILIRKKRGGYRRIDIPNKGLKYVQRCIHHQLLVRRYEPTHICHSHIRKTYDVAQEYGDRWLPGRTIVSNAFAHLGVPPDVDPHDQYDDERIRWRTPCSLFAIDLKDAYPSVSEDMVFDVYGELAGDPWSAEILTRLSVWHGCLPQGAPTSPLLLNFVLRDLDAAIKKEFRPQHFCVTRYVDDVVLTSRHKRISLRIQKRLIDLVEAYGFKVNLEKNCYWQADRHVLRVTSVNLYPEERRVALSKTVVEQFRSLLYGLFTGLRANGFLLHSNLVADAFSRALDCEDPRVAEIHGMRSKQFHKMMGIIGFCHLVYGNELPKRLSAWGDRGGGDAMDVEWAIEMIKDGYFDTDVIDASYDASGYRVR

SEQ ID NO: 7192 - protein, 388 aa, unidentified
  source 1..388: note = Related to nan
MRKEVRQMFPKRIGAIVPGVMREAVLPYLAQQLAIKADMLREALEIRARPMVQGDLESPYRRYPKKKKTGGVRWITAPHETLKKVQAAIYKRLLRPRYKPTPIAHGFIRGRGIVTNAAVHIQGGREPQSALNIDLQDAFPSVRAERVVKLFRKLTGSEELALTLGYLTTWKNEQGQGAIPQGAPSSPILLNSVLQEFDAELLELAGKFGLVVTRYVDDITLSGPDARIPDKVFTYVARLAKKHGFLPNMTKLRWQHANRNPIEITGLHLIKPWVGDLEVRLPAATRRRWRGILHNLAEVPTDAFGKPEVGLGVGIIGVARHVQAVSSNAATRGHILPYELRAPACELALLDRVPSIETLRDPRAWRKFQQKHQESIRRFELAYADRQS

SEQ ID NO: 7193 - protein, 373 aa, unidentified
  source 1..373: note = Related to MHTT01000006.1; note = Candidatus Wildermuthbacteria bacterium RIFCSPHIGHO2_01_FULL_49_22b
METVVPYVEQLEFDFPGVPRRGPGRVFVVPDNIKQKIECARDFLVGRLRLPYQEMAFALTLPNACWYEITKKVGDKQRTFYVSRRPLAEMQRRIATYLEDSSKWERWSMRKRGSLHRSETDLASAFRRGTSIITNAWPHRVNRSSLTLDLRDAFESITRRHVERYLTRIFANNITHPVQSPEVTAWVLSRLVTCRGKLRQGPPSSPAVFNCMLERLDDALAEATGAPKRDVIMPAMYLGMRFQRYRELDASDRRSGASYVAPRGVLYTRYADDLCFSHPDETFPIALEEMIRKVVASHGFRINGAKTRHGRYGILEFPGVVVANGHLRPKTRLVQEILEGVSIMTAQERAGYRAFLHQFGPSGRLECLRVFDN

SEQ ID NO: 7194 - protein, 350 aa, unidentified
  source 1..350: note = Related to NZCO01000055.1; note = unidentified bacterium
MDTSRGIAARGHVDACLAGLKMYSLDPDVVLDVLLRPNAHWQRVVKEKRGKQRVCYSPSDDLRTLQWRLIRILDRSIKFHRGYCRIWDQRYAFTISKPRFPQTGWWKGSSIVANARVHRHSNSALVCDLRHAFQSITTRHIQSFLNRTQPFRIRRRRDASWTYFPESLMWVASRLLTYYGRLRYGAPASPIMFNFMIDRLAVDLATAVNAPLHVNEAALRSTQRILMTVYGDDICFSCKRGAVPESVLWRTETLVRQHGFRMNHAKTLRSGNGALLLPGVVISAHEVRPRDTYLDPLATAIQGGELTQDQANGHLGFLKPFKRPGRRALKRWGPTLYAQLQERAGVTINE

SEQ ID NO: 7195 - protein, 334 aa, unidentified
  source 1..334: note = Related to LCBS01000001.1; note = candidate division WWE3 bacterium GW2011_GWB1_41_6
MFVESIIWSMAENTTPSFDKELVRYRNTISRLVSLAERERYLKPFYVKKKSGGKRRIVPATKDLVYVQSILASWFVKTFGGSADYCYTGKGIIPAIKPHQGAKTALVVDLKDAFDHVTKEKIYKLLERRFRKMSKEVRLLIATLLTYEGTTPQGCVSTPYVFNAVVDPMDKDLLAILGNFPLRAYTRYADNMCFSFDKPVNLWAVDRAVAKIISMHDFQVSWSAGFEHMPISYLGTHVYEDRLELDPDKLDAYVLLLNEALSSPTPEVYRKQILGILTWVSQVYKTTNPEKLSPEDRAKLAYFIGLFQQYFGKVRGTPELLERLVTSFHNSRMF

SEQ ID NO: 7196 - protein, 410 aa, unidentified
  source 1..410: note = Related to JABHMO010000007.1; note = Candidatus Falkowbacteria bacterium
MTKILQSACNPLQTKGGLAAAYYLRNFLGYKDSEHKINFLELLRRAIYRNSNLYSTARIPKRNGKYRILNIPCHELKIVQRLINKTILQKTRVLKCTFGFYGGSGLEALKKVVKPEQAIFSVDIVDAFSNTTARAVYHVFRRLKFGHFASYYLTCLTTWLHPTRSFSQTKRQSDHDFAHDRSDELHAFLSFGGFNFAGKEAKLQQNSFVLPQGAPTSPRLFDLCFWQLDYNLVVRAIHVKGYYVRFADNLYFSAPEFWRDGQIDITKNNKGALLFHSPLISSIYDIMRAGYRIWIEPFQNMPRYTQKWYQIYKLHKARLLMPDDKDCLPALGYNVFPDGTIRNKRRFVLRIRMSVFNLRKALESGNYEDTWRIYQKLQGQMQFAIHDQLPPRLLKQATDLLSQINSQQAI

SEQ ID NO: 7197 - protein, 376 aa, unidentified
  source 1..376: note = Related to JAFGMD010000036.1; note = Candidatus Falkowbacteria bacterium
MLKSRTHIKNPLLKISGRKAAWYLFSTLDYPFDDFERFRKILWAAIVRSPWLYSNIAIPKRDGSKRILAIPHPDLMTIQRAINKNFLELYRHPNVYGFSGGNAREALTALARSNQAIFASDIKDAFPSTTGRAVFNFFRTEKFGYYTSYYLTCLTTWFNQQKKFNLPQVGLPQGAPTSPRLFDLCFIRFDRRFARLTKNANGVYFRYADNIFLTAEEFWPERINIQTMRDGGVRWQSPIISAIYRILKRGYEFEHSPDNEIWHNQEYGLHKSYFARQGQILHALGLNIKDDQLHNTREFKLRVRMTIFNLKKALEQKDDFETKIWPLYHKLDGMQKFLVKETSSKLWEEAEQALFQVALIRYSGQGGRYVKNISEY

SEQ ID NO: 7198 - protein, 417 aa, unidentified
  source 1..417: note = Related to JACRDY010000022.1; note = Candidatus Falkowbacteria bacterium
MAHQPIYNPLGNPWGKAAAHWLHWQLALEEDDIPWDMFASILWLAIERDPGLYYRKRKQKKSGGTRTLCVPNGDLKRIQTKIDQIVLAAEPRLPYVYGFGGGSVAQALQPHLERGYPIFTADIRDAFPNTHDMAVYNVFRRLGYRKNTAYLLTRLCTWPINSQWRAALPQGAPSSPRLFDLCCRPLDVKLHQLAANVDGSYTRYADNLFFSARSFSARQYRPDEKKRYRGSAWPEPQPLWQTAPGDDAAVISWHATLISAIYRRCTDGYELPELPRKVYRHHWSWLRKCWIHVNPSNTISDRLEYQLHKTYLWHPKQGHAFKALGLQIIDGRLCNSRRYKQRLRLLTHHVSWLLDHHRDFETEVDPVYLQLNGLLQFAVRETLPAPLLTAAAALCQRVEDIRYSGPSHTRVRHINAY

SEQ ID NO: 7199 - protein, 388 aa, unidentified
  source 1..388: note = Related to MHHZ01000002.1; note = Candidatus Buchananbacteria bacterium RBG_13_36_9
MNDKKSPLERQSGQIAAKYLFKKLKYPFKDWQKFWDLIRLAVERDKNLYRQISLSKRGGGKRVILIPCEELKYLQRLISQRLLADISGHPNASGFSEGSIREALLPIVRAKQPIFCADVKDAFPETTFGAVFSAFQRCKYGYNSSYFLTYLTTWRTYQSLFYNSALPQGAPTSPRLFDLCFEPIDNALAKFAAKIGGVYTRYADNIFFTAPTFWPARKSCRKVEGETIVKDKHGFETYYPYKRKISTIPEGKADIDKSDSGALNWHSPVISAIYQIVHTKGKGTYYQLHKSYLCDKGQLLHALGLNLINGQLHNTREFKRHLRLTIFNLQKSLSAQDDFGNKIWPLYQKLNGMMQFAIKETLPVSLVQQWEELDLAIYQIRYPRTIGT

SEQ ID NO: 7200 - protein, 366 aa, unidentified
  source 1..366: note = Related to JAAXXB010000144.1; note = unidentified bacterium
MWENKQTGSIRHEYYEPEENVAALVWLSKELGYKIVGEDVIYSLLVQLRVDKPEQNPLYHTILKRKNDGTIRKLYSPLDELKEVQYRIKRRILSSYQVSDNAFGYSGGSVFDTLQPHLPTDGEQRIMFQADIKNAFPSVSGENVFLALYGLPSSESYEHYREKGYLSWHVAAMLTELLTIYDGWSGFLPQGAPTSPKLFDLVFLGIDRNLSHLACNVGGVYTRFADNIYFSMKGEFFPEVISRAIIRTIQECRSRDDYLFDARRFYCKKVKVRPLNVESLRALGLNIINGEIHNTREFKLSIRKSIHHINWLLANSDTPEYSAKLEHAINVLKGQMSFAVEETLPEALLQDYYSLSTTLDGSVSTI

SEQ ID NO: 7201 - protein, 371 aa, unidentified
  source 1..371: note = Related to LBVV01000019.1; note = candidate division CPR2 bacterium GW2011_GWC2_39_10
MVSRIFSPCPDIVSDNEIPAIIWLSKTLGKPQDDGSVLEILKRIRQGETLYEEGFVLKRNGKLRKILKPVPELKKIQREINRRVLSDLIVHPNVSGFSGGQLHDAIRPHLNAKSIFCTDIKDAFPSVTYNDVFRCLTKGREYELTYDISDSYYVYDEEWDDFFPCIIGRKRFKILNHGFLSWYAAQIVTEIATAKDAYGRLRLAQGFPTSPRLFDAQMEPIDIKLTHLAQNVEGVYTRFADNIHFSMQEEEFPGEVARAILKTIEGRGRNLWSNKYECHKTRSFKTDGQAVRILGLNIIDGKIHNTRAFKRAVRLSIHHVKWFLERGIIDTEEFEHAYRKLNGQMGFAVPETFPVKLLDDYSQIKKTYKDL

SEQ ID NO: 7202 - protein, 408 aa, unidentified
  source 1..408: note = Related to JAIOSA010000118.1; note = unidentified bacterium
MGIYKEIVKDLVIDYKKRNPDWTEYDFSEHLVLLTYRAGNNAVLPDPLADSEEAWQATLNSEVPVKNDPVETFLSSFRLNQDGDERIIKIVERSTFYWLGKIFRMHFLDLMNLVEKIRVKGWSNFYRLEWQDKKGGGFRQLQIPNRQLMGIQTKINEKLLRDLPRYPQAFCFSGGRVIDALRPHLKFGSLLKLDIKKAFPSITAYDVRRGLTFGRKIKPVEKLQNIEDYGHFSWYLAKIICDLCVTSSLPQGAPTSGRLFDLAFYPLDVELSKLLKAAGGNYTRFADNLFFSVSERFFPSELKNSIKIIITGEKRNFLKLRYHKLWITNKRYVALRALGLNTLNGRLRNTKAFKSRLRKAMHHKQRLSELGLDTEAAQQKIGGLMGFAVKETLPNKLLKKTEQIKKDR

SEQ ID NO: 7203 - protein, 362 aa, unidentified
  source 1..362: note = Related to JAAXUE010000002.1; note = Candidatus Moranbacteria bacterium
MDRIPWSESDIEFALSLGRDTEEREANIEQYTSEWMNERTERIRGRETAAFLWLAARIGMKPNRFLFAVAGFRSGSFGYTTHFVTKRDGKGKRKITAPHKVLKAVQRKIAQELFWDHPRSPHSFGFLGGSSAEALLPHAKNASLLMVDVTNAFPSIERDVIFRWFRKRDYSWRVSGILADLATFEGRLTQGSPLSPRIFELMFEWIDERLSRLARRVGGTYTRYADNVFFSIPGAHMDKKLVWTVLKKIWRMDLICQVPRDKRYHPTFDTHKLRVRTLPGNAVHTLGLVLRDGEVHNTRDFKRTLRKRIHHVRYLLENSRETGVILSAWTMLCGTYSYARKETLPPKLIQEVEELRGRIHQL

SEQ ID NO: 7204 - protein, 365 aa, unidentified
  source 1..365: note = Related to JAAXVB010000009.1; note = Candidatus Moranbacteria bacterium
MINNQEFGYDPEFMLAFVRELEEKRIERGDQLRFELEEEKRYIRKKQLYALLWLARRIEVKPEKIIELFLAIQEKKKIHNVYFKNKSGGGKRKIIAPIKELKYLQKRISTEILKRYSRGSESCSFGFIGGSTAQALQPHLESGCLLMFDIRDAFPSVKHRHILDLFRGLGFSWYVASFLADVATYEGCLAQGSPMSPRIFELICANYIDRPLEKIARKNEGIYTRYADNIFFSVLGDGFDERLKREIFRNICPPRSSNLKSPYCPKFQTHEFRVKKLAGNAIHALGLVIHDENVHNKREFKRRFRKAIHHAKWCLKNNYDLLPEAWGKLRGLFSYAQKDTLPAKLRSDYELLKDEILNLGIDLTI

SEQ ID NO: 7205 - protein, 393 aa, unidentified
  source 1..393: note = Related to PFPB01000062.1; note = Candidatus Nealsonbacteria bacterium CG_4_10_14_0_2_um_filter_38_17
MEDCEGFSDEELDDVEYSVQLAAENEEFEWRLQREIQRKRKEIPALVWLAHQMKIAPDNLDTVLNMVRNDQSPYRMITLDKPDGGKRRIFIPIDPLKRIQRKIVKCILSDFQTGPNCYGFSGGSIVEAIEPHLQAGTILYVDIRDAFSSSSAEMVMSYLTEGRVPTFRYDYNGKSWPYCYDEDGERGLHYGSTRRLVFEGMLREGRMSWSAARIIVDLTTYPVIGSTCVLPQGAPTSPWLFDMVCKKLDEKLTAFAQKVGGKYTRYADNIFFSMDQDEFPNPVKNAVLRMIRMYGRFRPHKIRVRRMTKGAVKLLGLNVIEGQIHNTREFKRRLRLAIHHVEWFLNNRLKDTPEFDTAWHKLQGLMAFARIDTLPPKLLESYYELEDRIFKIN

SEQ ID NO: 7206 - protein, 362 aa, unidentified
  source 1..362: note = Related to JAGOSO010000002.1; note = Candidatus Pacebacteria bacterium
MNWEDELSDRFLSNGHQLTMKELEEHRLQDRIKKSRRRIDYRKKSFFWLGHKLELPHWLNLSEMLQRIDVEGSAYLYKEPQIIPKPEGGTRIILSPQADLKLVQTRINRLLLKTFPRRPETFGYMGGSCLELAQRHLGMASTLKFDIKDAFFQVPWTNVRKSVKGFRGIAPGFSGSVSHWIAKLCTYSPTPEHIRNQFGLWRGATSFLPQGAPTSPICFHLACGPLDDEMTKLAKRFGGVWSRYADNYYFSMPTPQISNKLEEIVVCEARTKGFKIHKVRRVKQGELCRILGYNLLDGRIANTRDFNRNFRGALYVLRTKLDRGLDYRDAYSRVKGFMGMAINVPENLRLEYDYCKNKIETI

SEQ ID NO: 7207 - protein, 327 aa, unidentified
  source 1..327: note = Related to MHCP01000015.1; note = Candidatus Woykebacteria bacterium RBG_13_40_15
MRSIEPVIFSSGEGRFPAEGLEVDYNRFGFNPLVYLGFLIGIPTRWIDYVIKIGADNFYTEVRIPKKGGGVRVLQVPLDPLMGIQRRILRKVLSQLEPKSSCHGFVTGRSIITNAQVHVGSTHMLVLDLESAFDQGLSSRIFRELWGERVGERRLGFLVASLITQLCTVYSGDIGERYGFRHLPQGAPTSPALFNLACRPLDGRLDHFVWRIGGVYTRYADNLAFSVPRQLTPKEEHIIRKIVDGSGFRVNDAKTRLMRQSGHSILRLPGVAINNGRIILPKRKRKQLRAAIYLAALHGETDRLRGLIGFVEQVYGPEVPRQIIGSH

SEQ ID NO: 7208 - protein, 338 aa, unidentified
  source 1..338: note = Related to MEZX01000002.1; note = Candidatus Berkelbacteria bacterium RIFCSPLOWO2_01_FULL_50_28
MPTLTGRQYAAGRKLARRLDLPPDQLFLVLEYGAAAFYGSYAQPKSGGGTRIIHVPHEPLVTIQQAILKRYFSCLPVSPIAHGCVAGRGIESNAFPHRKARSMVGFDLKDAYNQASFTRSFIQTYHHHYTTSNGEVIERWCSQRKQPWDILPMELAVLEIVSDLVDIYSDYKEVLPHYKLVLPQGAPTSPALFNFACQRMDARLEHLASNVGGVVTRFVDNIVFSWENDEVDRPVYSAIRRIIEKSGFKVNERKTVAIRNGNRNGVPLRFPGVHIIDGDLYIPRKKLRHLRMALHCAGKAHNDALYQGIKGYALQVEAQMPPQLRGVYGKARADNPRI

SEQ ID NO: 7209 - protein, 321 aa, unidentified
  source 1..321: note = Related to JACPCE010000006.1; note = Candidatus Woesearchaeota archaeon
MSLTLEIGLQDNKPAIKSYKTELSQYLSDLTHPLEVLEISHRRKELTDILLDLTETTQLSLLCDESETLDHLFDGLLQLRKEKRPLYKRFQKEINGKTRDLAVPQKPLDLFLRNYAGPIINQAECHAQAHGGENNWSLTESIKTHLPIGIALSFDLSQAFKNTHLQYVFDFYYSLIYKKTRDKKTSTDLAGFLATVSTVYYRDGGYALPQGSNIATKLFNRLLYPIDESLSNYAKNRNLTYTRWIDDFILASKDRDKTNKELIEATNIVQPYFPLSEKKTFLQRDKPVYLLGQKIVDCWITKATTKEIQSKNPMKSTTHYL

SEQ ID NO: 7210 - protein, 317 aa, unidentified
  source 1..317: note = Related to JAGVZG010000002.1; note = Candidatus Woesearchaeota archaeon
MDLAVCDQYKKVKLQVQIHTKELTDYLHSIEHSLQLLEDTNKRKDVTSILLEFTKTSQLSLLGDEAKTLDVVLENLLDLRRAKRPLYKRFKIKVGEKIRDISVPQKSLELFLKYYVSPLIDHAKCHAQSHGGEVGCTPKYSIKSILPVEFVLSFDLKDAYKNIDLQYIFDFYYDLIFEKTKDVEKSKQTAGFLAGVSTVYYADRGYALPQGSPICSKLFNRVLLPIDNLLYKYSLEIGLDYVRWVDDFIFSSSDCGLTLDKFVKTLDIVRNYFPISENKTYFQRKHPVYLLGHKIVGTDISEATTEELETRRQINLS

SEQ ID NO: 7211 - protein, 362 aa, unidentified
  source 1..362: note = Related to MFWN01000063.1; note = Candidatus Pacearchaeota archaeon RBG_13_36_9
MPAVLEEVPINDSPLVLGVPGHYYSFFGGPLFLGIHDDKLREHYEKIKIPLNILRDDEKRRNLAELLSSLNPKPGLFSGESDLEELFPLILEQKHLYQIWKQKVNGKERSFYVPQKAFKTLLTNYVLPFVKAVPAHPSCHGGEKGWTVKKSLESHLPVVSSLTFDMSAAYHQATMNYVFEFFYDSLEGRCKTEEQRRDAAVFLSAVCTIRKDYDERREECFEASLPEGSAVSSAVFNRMLLPIDEEFSRFAEKKGIKYSRWIDDFVFTSPKKRKFNHFEYVMRKAQESFTLAPRKVFFTYEGVSYLLGHKIAYNEIEKISREEFEKQRGEPYTGGMLSDTHPWDCMYEGYEEPTCDGNDIPF

SEQ ID NO: 7212 - protein, 405 aa, unidentified
  source 1..405: note = Related to JACOZR010000022.1; note = Candidatus Woesearchaeota archaeon
MEDRMYAPSGRRFRIFVDCMSMGSRLDVIPSENPDLEIDTDGTPTIFLSSVPLVPGAYFTGPWLPMSYADELVKYFSETRNPLEVLESKKEIILKTLLELLPLDNQLSMLDNKQERLEVLLDDLLALKGERKHLYQRWSQRINGKVRDISIPQDSLEHLLIEYVKPIIMEAPCHSQCHGGEQGFSPKKSLSRHLPLGTVLSFDLANAFKNTHIQYVFDFYYTLFENKIENREIRRDIAGFLTSISTVYYSDTQISALPVGSPISICLFNRLFYPIDEVLHICALKKGLRYTRWVDDITISAKETNRNPEKICGAISMVRREFPIAVNKVFFQQNVPEFYLLGHKIIGNRITKMNKEKSKDKLVPLDPECIATEREIEWIHEVYMGEIPPNQGECSLEGLEEDLPF

SEQ ID NO: 7213 - protein, 387 aa, unidentified
  source 1..387: note = Related to JAHWIP010000076.1; note = Candidatus Woesearchaeota archaeon
MSIEAEIKSCNDVFVEGSFYKHKYEDETSAILLKERLGIPVAYFRGPWLPMFYINECMEYSFSLDYPSQILEIPKRRKQIVDAMLELRSAQQQASLFNIDEKQDLESLLDRLLILKNNNRPLYKRWTQNIDGKKRELSVPQKALDVLLKNYVHDIIMLAPCHPQCHGGEKGWSVKKSLATHTPLGTVLSFDLANAFKNVDIQYVFDFYYRLFESKISDPENRRDTAGFLTTLSTVYYKDKDSFALPQGSPVSIPLFNRLFYPIDKLMQESATKRNLRYTRWIDDLIISAKESNRNRKKFFGSLSIVREDFPVNLNKTFFQQNLPEYFLLGHKIIGNLVIKVSKDEEKNRGEQIDPDCFATHYEREHLWIEDYYDGDEPGDFGEIKDF

SEQ ID NO: 7214 - protein, 310 aa, unidentified
  source 1..310: note = Related to JACQNJ010000008.1; note = Candidatus Woesearchaeota archaeon
MPVYEREFFDYVESNLHPTGSVLANPCRRGSLRRLLSPGTQEDLFGDPLEVILERLSGDIVNRKGGYMRWREKIGEKERMLSVPSKTLWKFLEDYLEPFIEKQRVHGSCHGGIKGWSPKSSLESHLPIVTALSFDMESAFQNMPARKVFDFFYCSLKGIDNYEERRDIAGFLTFISTVRYDQQRGLPQGSPISQAIFNRLMLEVDETMFWAATERGMTYSRWVDDFTVSSPDRRDVREFLGAVNLLAERFPVARDKVYFQEGEPVYLLGHKLVGGRVLKNSREERLRNKTPPLDYYKWLSNRRAFEPWIN

SEQ ID NO: 7215 - protein, 307 aa, unidentified
  source 1..307: note = Related to WJLU01000050.1; note = Candidatus Pacearchaeota archaeon
MNPKVDRLNEYCRRFGPGFRVLDDVRNVLVDFLAGLDRQLDLFESPEQRALSSLEALRVHDGSLYNRWSFSDNRKRRELSVPCEPLKVFIDDYLIPLIKRTKVHECCHGAEPGWSPRRSLEDHLPCYSVLSFDLKSAFNNFTIAEVFDFYYSLDLEGLEEDEKIAVAGFLSMISSSLVDGRRVLPTGASHSPLLFNRGLLELDDELYEGCSRKGFNYTRWLDDITISSQGKVCIEELLGAVELTERYFPVAPNKIFFQKADEPIYLLGHVIYLGRVCKNSRTERDAHKVKPLDYDEWFGDRGYEGWE

SEQ ID NO: 7216 - protein, 317 aa, unidentified
  source 1..317: note = Related to JAGVWS010000026.1; note = Candidatus Pacearchaeota archaeon
MLNEVVVNLRDESLIEAAGAVIDAAITPRNRISTLFPEVDEAYRPANLWRDVLEMLDQGRSLYSRFQKADSNGRVRDISVPQAAFLEFVNRCLIPLVKSVPSHPASHGIEKGWSAERSVKTHVPIRTAFSMDISDAIPGVGIDKVYDFYYALLEDSKFGLTERERAGVAGNLAYLSTVHYASRGTRGLAVGSGLSNTLFNKLFMGIDVAIQEGCNRRGFRYSRYLDDVTVTSEGDESNEAFLGIHPVVAAHGFRISPRKTFVQKASEGDIYLLGQVVVNGRAVMKNSREIREANKKGRLEPEYIERVLSSGDYSRWI

SEQ ID NO: 7217 - protein, 312 aa, Seinonella peptonophila
  source 1..312: note = Related to NZ_FQVL01000001.1
MIIEQQSSIHITQYLNRIMEEDHTPSYQRIWIDKYHGTTIFNPQQIAELTVKQKEEPRRADQRYVRTLGPDPKTKQWCQTLNDLLLQSREPHPNSHGLEKGRNTSTYIEPHRTQKKVLSVSLYNAFSSVGKKRVTSIARHLLGIEGNAATFFGEIATKHGKLNLGNPLAPQLLNIQAYKMDRYLTDFVRKYGLEYSRFLDELTFSSAYFIQTETIAKIKRIISRCGWMIDNETVNIQSGNHFIIAGHVVVPREGVVREKKEHRKEATNTIPSINQSHTNQANKALKTLTNPSDRLSREKGLIRNLKGLLNRK

SEQ ID NO: 7218 - protein, 425 aa, unidentified
  source 1..425: note = Related to LN854281.1; note = uncultured prokaryote
MSRKQNKVSNSHNKSWSNYRQVSYIKTSVVRQIGVEELKRINKRIFVLMKRSEGFFKEEKARMLVVKQANGYFRGQKVISQADQRALKATGGKYREVTFLKDKATRKMLRKVAKLIDIPHADQVGFTRKRSIWDAAARLGDAKSIVNIDLENAFNAIPEQAVYLILRRVFDLNKKHARQLTNAITDGGYLYQGSPLAPLIFNLWTRPIMDSVRGAGFDIVAYADDLTIGSDYGAISHKMVRVFIKWIRQFNMNVNMAKVKFYNIKKAYKETVGLKSIRSGGGILTTPVKFRKGLRKLRYLTHLYTVNGVTHTRRVNKEGEPNELGFVILGSWIWLSEAERRGVARVDTALYKKLKKSVPAIIEDWKIKRRSYNVDHQSCFTTDSIPHIPQDTRGKWKVIYTSHQGRLREGVYRKRLSARVRRPFR

SEQ ID NO: 7219 - protein, 364 aa, Streptococcus suis
  source 1..364: note = Related to NZ_POJC01000071.1
MEFKDTLAKGMSYTKQSIARYNPNVNLHKLGAKIVAWHNANKGLSYSMKTMYVVKNDPLGRFKKGAKHFEKVDGITYRNIRFYKRETREKLVEILDCLDLEHPNQIGFSRGKGIKDMLKLDNIGERTKIKLDLSNAFDNITKEQLKALLVIVFEIRPKIAEEIASAWTVNGHMVQGHPLTPAVFNLLTRQAVDFVIKYVKNCGIIQYADDILIWHDTHDYVSWKTIRMVCKAFKRAGFPMNTEKEGFYHKGAEIQFVGLRYRRDTDGKYKWFPKEMRKNKARLRAYKHLKALGHLGLDHKEKGYTEWLLFRKRNKQNNKQIQTLKGEWVDFDKAVETMLKLFPTKEEPQWAEFNRLPIREFLLI

SEQ ID NO: 7220 - protein, 394 aa, unidentified
  source 1..394: note = Related to HG796529.1; note = bacterium
MYYKRENLATLRQELIRHVGIEEFNKISATVRTKLENFEYYRIGYSSFWINKRTKAKVFSKSEILKSNDEHRPIKSPKKDLKVLTKEINELFSSFTSNRYYIKGFVKDEGVQTNAEYFRKYGGIKFGLNMDLENAFNQIDYGNLKDFGKIVMGWNAKVSEKFAKLLTIKGQMVQGNPLSPTMLNLFAIPMDLTIIEFSKSQTAPLLYTRYADDMLIGSRTKIDFKTFINLLKIIKQFGFKVKKKKTKFMKNNIEITGIILYNGKRWKTKRGRKRRLVKKIRLMKHLQSLGLKHTKRLNKEGKLIEISCVISGILAWLYPASSKKKKSRKNRKTKQNSKLNRKFSKTKHDKSLAKQNKKFSKDKRQKVAKNVEEEYRIFCMTNHHILRRNSPTTT

SEQ ID NO: 7221 - protein, 343 aa, unidentified
  source 1..343: note = Related to nan
MGHKPCRSCGEGGYAERQNQFNFQLLSFSHVKLNPNSCLSATPVRVLGILTMFTRKTVYDVNRMSGQKKAREVCNPGRHLRTIHGALRRSLAPLVSALAYSAGCRKGDSPRRRLLRHLGDVHFYLIDLKSAYRAVQLAPMARILARISPSCLLPSADQSGQYNLPYLTEQESERWLLQYAFDDKFGGLMVGAPASPDLFNLYAGEMIDAPLSKLAARYGLRYSRYLDDLLFSAPADNPIGQKKRRAIRRILTEVGFAVSDHKSRLWDIRKGPIVVNGVGLDVSGRFFVPGAFMRRLNGIAHLVRRRMLPISNLGGLLGAVKNILSTQHLNRSQGKVLAAAAST

SEQ ID NO: 7222 - protein, 328 aa, unidentified
  source 1..328: note = Related to PCXO01000005.1; note = Candidatus Yanofskybacteria bacterium CG10_big_fil_rev_8_21_14_0_10_46_23
MYKISDFLAELERSAYTKPGELSLRPTFSEPPKWERWAIRDINPLSGQKKVRMLTVPNEALRFLHKGLIYLLRVSKKASSALHYARGARPGFSHQRLVSEHRGNRFFYVVDLKDAYSQVDHSLMIKIVIEFLRAIPHFEAFSEEDEAGVTIFLERYFLLPEIPGLPVGLPASPDLFNAYIGTLVNWRISKMISAGHYTHYLDDLVFSFRSRPSRKKRREIRETLKQWRLPINHGKCQFKDLKKGPIVITGIGLEYGGRMFIPRNYTRKIAGLVHRALETRDPHEIARARGMVGLVLHTLKVARQVPNQHEEKLLRSFRKLQDDPENNR

SEQ ID NO: 7223 - protein, 316 aa, unidentified
  source 1..316: note = Related to MHWW01000009.1; note = Candidatus Zambryskibacteria bacterium RIFOXYC1_FULL_39_10
MFIDIKEFLEIHDDPRFDKYTLRDVNPVSKHIKTREISNPNKSMREIHRRIIQAVKDVYLDSSNHFSSTHQNADRHNSSRFFYQTDLMHAYASVPLEGLVTILSSLKPTWGTKNVREILTTYCFDESGAGLIVGAPASPILFNIYAWQTLDIPLLEFWPYMNDEGQIFRKFYTRYLDDLTFSSPEPITDSIRRSIRRVVEQAGFQINHRKSTVRDLKKGPVVITGVGLEYRPRRSARLFLPRHYLKRMNGLLHLALKGDPRVSHSEIEGLMGVFYGVLGRKHRQSHQSTKLNATESRFLEMYGAYRAQYERATNRK

SEQ ID NO: 7224 - protein, 308 aa, unidentified
  source 1..308: note = Related to QZJN01000010.1; note = Candidatus Parcubacteria bacterium
MFILFSSFVKGLPGREAPGFKFFFLQDRNPLARRRKRRHVGAPNEAMWRLHWRLIQWLRSPGLNRGRRYSTGCGHLDSPRRNILRHRGNRFLYLLDIKDAYPNVNLDKLAKILYELAIHLVPEDKIKLFLKLFCFSPNGGLVVGGPASPELFNLYAESLLDHPLGVFCHKHGITFSRYLDDLTFSCSTPIGKRKRLEIRKIILKAGFNINHSKAKVVDLRKGPVVITGIGLNLNGKLFVPGHYRRRIDAVFHKAAKNPKDLKYLAIGMHGLFRSVIPRGELNSRSELRTINRFRSFLSANRNKEALTR

SEQ ID NO: 7225 - protein, 332 aa, unidentified
  source 1..332: note = Related to JAGQML010000021.1; note = Candidatus Nomurabacteria bacterium
MSEKQLSIDFPTDHFLLQNKSPLPGYKTEEIVTYSSSGKRKVRVICKPNETLRIMHDIMKEVLSPVYNKKNLPYAYQWIKGISTPPIAALQHHKENRKFYPRHWFVTDLKSAYHSMDLIEASIYVEIFCQINGINPVIDWTISMILYCTDPNMTLAEGLPVSPWLFNIYAHYKLDIYLALLAHKYNARYSRLGDDLIFSSPEPFGKRKRKAILGFVRNQGFTISERKTKVIDLTKNHGASINGIGIRNTVSKGELFLPRDYRAKIKGLLHVALYGLDENGRLNDPSNFPEINGMMAIFKKLVPKNVDSWTKDDDWIVENYEIFRESFHNKAG

SEQ ID NO: 7226 - protein, 321 aa, unidentified
  source 1..321: note = Related to NVSU01000009.1; note = Candidatus Wolfebacteria bacterium
MIPSLRGLLILDPEPSSQKGGGRKHNKNKLHYIPNDSLRVLHAYALRKIEEYIFEMPSATGWIKGRGSITKDHILSHTNGQGFFHEYWYITDIKDAFRSVNLQKMSWVLCNLFPYYDFTNWPDMKEYLKKYFFAPGGSGLAEGYSTSPKLFNIYAEKMIDQHFRELCTQYNISYTRFGDDLIFTSDTIIGKKKKKALLSILRVAEFTPNDNKTHSFNLNKLKEGKIINGVGIRNTSTQAEIFLPRSKRKKLEMLLYLFWYDEAKLNPRKIEGLMGWFNQVTDSSKKGKRTLNTSEEKILKYYNRASFGLKELIREMREETT

SEQ ID NO: 7227 - protein, 396 aa, unidentified
  source 1..396: note = Related to SCTI01000001.1; note = Patescibacteria group bacterium
MARRCVPVVASTPMCLDSCSLLTSGRSTQYSYSSGSPRLITGFYDLGANMPLHNTGQLELELEALMEEPLFHSFIHKDVNRLSGNVKFRRVSAPNKAMRKIHLQIRAALSRLDVEMPYVTAGLRKSKVVNHVKAHRGNQYLCCYDLKAAYDHVRPEAMADILRQHGLPESDIELVARYCFGNESGGLVTGGLVSVQLFNLYANEVIDQPLATLFAERGGITYTRYIDDLIISSGAPIGRRFRRSILQIIRAAGFEIKPAKTQLIDLAAEHSQMAVLNGIGLDLNGELHVRPHYRELLYRLIKRAQAGEIDPSVVHGCMGAFYVIKPRGQQMTPGERKLDRAYRWYVNQQRRADPGRPERRRRKQQQYRARRRLKPSYKRHGRRSGPVGTYRPRPTF

SEQ ID NO: 7228 - protein, 327 aa, unidentified
  source 1..327: note = Related to nan
MKTENNPAFTKRVYQDFNPVSRHRKTRIIYEPNRLMRQVHAKFLKEFGGFLPRGLPITACIPGASPKMNLEPHRRNRYFYLTDIHSAYSGVNIYRLASLLCSLRPDLKLFRGDKLPHEPLDLFRAEDGMVSFLRSYFFAEEGGLATGGPAAPFLFNIYCANFLDVPLMELCRKWELTYTRYLDDLTFSAADGNPIGDKKREAIRAVVISAGFEISHRKSQVLDLKKGTISITGIGLEYGGRLFMPRAYTNTLRGALYRVVRRRSDDDERVRVRGMYSAFLSLIDLRSANCTEKKIIELAGRAFPPKPKKPGYTPKTSSRRKRRRQLE

SEQ ID NO: 7229 - protein, 329 aa, unidentified
  source 1..329: note = Related to SCTI01000001.1; note = Patescibacteria group bacterium
MSKETRSITAPPATERRFINGRNGGKRREVFVPNAAMREVHAQVIRETRLQLGIPSHNFGGVRGGSAVRCAMQHWGNHYVYKLDLYNAYPSVRPEWLYPVLAEVKSELWVDQVGMEDFVRRYLATPRGRGLMTGTPAATDLFNQVAARKLDEALIELAERWSLTYTRYIDDLVFSSWEPIGRRKREAIRAVIKRSGFRLNYKKTGYYDVARRPVMITGLRLGAGPSAGEASDDINRAFAIYLPRKWLQGLEGSMYCLVNGKSNRVGKAIEPGVVEGRMGALREHLALGGFPFDRQAALVWRKYTYVKPITRPKVPLSPMEEWLQRLFRG

SEQ ID NO: 7230 - protein, 323 aa, unidentified
  source 1..323: note = Related to MEZX01000003.1; note = Candidatus Berkelbacteria bacterium RIFCSPLOWO2_01_FULL_50_28
MSNKPILAAPVEGAAFRHFFLKDVNPLGGRTKRRHISAPNAQMREVHSALISYLRSLPADLSAATGARKGHSSITNIFPHRNNRYFLLLDIKDAYGTVDEEKLVQVLLELDPTLPRDLFGSEVVTQFLQRYCLNNKGGLLTGAPASPDLYNLYVAVLLDSKLIELCKQYGLTYTRYLDDITLSSMTRIGKKKRQAIYGLMREAGLVIHESKTQILDLNRGPVKIAGFTLNQNRSIILPRSYLGKIRGAIHNAIEKGLCDKATQVQISGMMSQLLASLQDPSVRRKGGRRYRRRPNSTEKRVMDRYCAYRQLCAQTISPKLATS

SEQ ID NO: 7231 - protein, 316 aa, unidentified
  source 1..316: note = Related to MHTT01000015.1; note = Candidatus Wildermuthbacteria bacterium RIFCSPHIGHO2_01_FULL_49_22b
MSFENLVLGFELNPALLGGTPAFRIFAIRDKNPLSKREKGRRPLEAPNNAMRIIHGRLIKYLRSLKVEMPYATACRPGDSPLKNVERHRQSRFFCLLDLRRAYQSVQVGKLASVLHQADPRLKGQFWEVRAFLQRYCMSQTGGVPAGAPASPDLFNLYCAVLLDEKIGNLCRQHGLIYTRYVDDLTISGNITVSRRVRAQVRAIIASAGFKVNHLKSQTHDLQKSTLVINGIGLELGGRVFVPPFYLRHVRGLLHEGLKGDLSLAPKIQGAMSVVLGIVNQRKPTASEQRVLRQCKRFRRLIGQTKREQRKAPAPV

SEQ ID NO: 7232 - protein, 340 aa, unidentified
  source 1..340: note = Related to JACOYQ010000025.1; note = Parcubacteria group bacterium
MQLSLHDKIFGVGFDETLRTFPEPPAMRLYVRFCGHTMSGHGKMRKLEVPNKAMREVHIRLLRFLRTLPSESSYATGCKPGDSPAKNVKRHAGQCFFYLVDLRGAFHSVDIPVLAGILRKAAKLPSRQESQILALLERYCASHFGVGGLAEGVPASSDLFDLYCAVRIDKQLGPYCKWWGIRYTRYADDLVFSSERPLSRKIRQYIRRILEEAGFAISHHKCELRDLKKGPIKINGIGLQPDGRMFVPRPFTRRTQHLLHLVLEKGRWELLLQVQGRMALFRQLTDVRNPNRTEKHLLEQYAALQRILRKEKMRAREQKKRVRQSGRPEYLHVSRSPIAC

SEQ ID NO: 7233 - protein, 312 aa, unidentified
  source 1..312: note = Related to JACAFG010000002.1; note = Candidatus Saccharibacteria bacterium
MFDNLSDLLGDEPSFRVHRLRDENKVSGVTKWRTIHAPNDPMRKLHSRMIVDLRLLQTKVHGRSPYATAVLPGSSPRRNVERHRGKRYLYLLDLHSAYLYVKGGELAFILCTLAAQRDGYLVADPSELSSTHDFLKRYCLGTTGGLLTGAPASPDLFNIYAGELIDQRLAPRLKRWGLTYSRYIDDLTFSSNEPIGERKRRAIRDVIAAAGFDISYRKAKVYDLAKGPVQINGIGLDLTGRTYVPRKYLGKVNGILHLARYGMIKPAKVAGYMGVYWTATPRSHQGRNRAECHTLELFHDYQLHRNDWLIRS

SEQ ID NO: 7234 - protein, 329 aa, unidentified
  source 1..329: note = Related to JAIFWN010000002.1; note = Candidatus Parcubacteria bacterium
MIFDGIDLPRSGTKAEFKAWQKRDVNPLGRTSRMRTLHTPNEAMKYLHDRLVINLRRIKAVDLTSAASKPGGSALRNVLRHRHNRYFYLTDISSAFDSVDSHRLAAVLAGLDTQVRESEVYAFLRQFCMTEQGGLITGSPSSPDLFNIYCAVLMDGQMREYCLRHEVTYSRYLDDLTFSSKQVIGARKREKIRELISLSGLRIGHHKSRVLDLKKHRIEINGIGLEYGGRVYLPRWYLYKIRGLMHVAERSEDPKLLQRVHGMIGLLQASTDASRPRNRLETKVFSEYAQLRHQTRKKPFIPPPQGRAPIGIQTGDPWGSLDDDDDVPF

SEQ ID NO: 7235 - protein, 344 aa, unidentified
  source 1..344: note = Related to JACPSJ010000005.1; note = Candidatus Kerfeldbacteria bacterium
MILESFTTGLPGKPAWQPFRYRDVNPLGGTTKVRLLGAPNPAMRLLHHRLVRFLRGLNVPMPHAVGARPAGSPVVNVRRHLYIDNRGRPARYRPNRYFLLYDLRHAYCNVDPGLLAGIICQHCPELTVQDGAVLDFLLGYCFGPNPNKPYQLELPIGQRRRGGLVQGGPASPDLFNLYVAITLDQPLGELCQRYGLTYSRYLDDLTFSSRERSIGTKKRQVIRRKIRDAGFTVSDRKAKNLDIRKGPLTINGVCLNRQGTIFCPRWYLRRIRTLVHAARKGAAVDLAALHGMMGVFTATLPRRWELVDINGRRSERRVPVGRLRIEQKTLDEYRQLQARQRRQP

SEQ ID NO: 7236 - protein, 345 aa, unidentified
  source 1..345: note = Related to LBTF01000013.1; note = Candidatus Nomurabacteria bacterium GW2011_GWB1_37_5
MIDKLTFGIDIENATFKIVVINDKNNLSGTKKRRVIHMPSPEMRIIHKRLIRWIRGQKRLVPISASGSRPGDSVFKSVFIHKKTRKHSYVSNGYTHIDTIGWFPRHFFCLDIKDAFPSVSVSKMTEALLFAGLDPNDYSYNKVISILERYCFTKEDGLIVGANASPDLFNIYAEYFLDRNLRRYCHEHSLVYTRYLDDLIFSSNKTIGKRKRKSIYKFIDESGLKVNEKKTKIYDLRKGCAVINGIGVNEKGRMFIPRQYLDTLRGYMNLYLKGKIELKFNWLRGKMNPLFQCQEQSDLLPNRTEGKVFDLFEEVKVRLKFPINTSLDHDDLDDLAYENTDDLNF

SEQ ID NO: 7237 - protein, 327 aa, unidentified
  source 1..327: note = Related to JAGQMN010000021.1; note = Patescibacteria group bacterium
MDRILFTERMLCNIGLQILPHIKDEDFYSFREKFQEKHLHHFVVNDINSLSGQEKQREVVKLSTELDLFQKALLSRLKMHYGEVLRSEISNSHRSALNTILCHKKVDLYRGEKRIYFSRFYYSMDIQNAFGCMTTEKVLEVLKGDFQDESLEKILKLTCFDLHRGIITGASASSYLYFLYWQKKIDSKIYELCREEGIICTRYVDDFLFSSEHKITKSFSKKVLKVIRNANFEINFQKTQFYDLGRETFNVNGIVFRKKDNRGAIGIPKTRSRKLLGMLNQYEKGNIKIAQLAGAMSLLEKISQVHNGAFLSRTHQKILSRYRKLKR

SEQ ID NO: 7238 - protein, 314 aa, unidentified
  source 1..314: note = Related to NVTD01000044.1; note = Candidatus Wolfebacteria bacterium
MIFDRLCITEKPNAAFKPFINKKGRKLNRQNSDMREVHRAFLAFLKIQDIHMPSAYGTGGKARNLWHRFLQHRDKDTGKFQKEWYILDLADAYGHVNMEKLVGVILLTCDNELRRRSDDLLAFLMRHCSSTREKGLIQGATSSSFLFNLYLDELVDIPLERFCKAHGVTYTRYYDDFAFSGQKGTLLSHRRGKLIRKGIRKILIKAGFEINHLKSKCFDLTKKPTKVNGVLLDYYGRISLPRPVIKKMSGLLHRFVHGKHLSSFVVDGNLGRVQDIHDILEPTCCIEQRLLILYLEYYHHRFRGRVRTRQDDPF

SEQ ID NO: 7239 - protein, 365 aa, unidentified
  source 1..365: note = Related to JACQKC010000011.1; note = Candidatus Kaiserbacteria bacterium
MRRIVMIQQNHAVLRGSRTDAEDDPLRFVTMVGGCPRIDFHWKQDTNGKRRLIGNPNKPLRRLHRLFGQYLEEAISKMGKENYELIKFPSSTAFVRGTNPLKNAQKHQKGRFFYITDFANAYPSVDLVRLAVLIVYIKRHNVYGLEMSLRMLGQNRVLVRELQEDPLFLSILAFLESYCSGQYGRGLAVGGPRSPYLFNLYCEVYADAGLRKVCERYGITFTRYADDNVFSRDKPITSDIRRELRRRIESAGFQVNHRKSKVLCRDMGTVFVTKVGLRDQNLVAPRSESAKAAIVFPKKKRRRLHGIIGSYLHMQMDWPEKVSGRIAEFLHYYRHVERRTAADHKTFALCKEFEREWAKYRKRRK

SEQ ID NO: 7240 - protein, 352 aa, unidentified
  source 1..352: note = Related to JAGWZP010000006.1; note = Patescibacteria group bacterium
MRHVRSAAPQEPPVENWDPLHFATMVGGHPQIHFHWKEEGGKRRLIGNPNKPMRKLHEVFGQYLRKGIYAMGNDNYTLRRLPSSAAFVKGSNPLKNAQKHIEGRFFYITDVSNAYPSIDLERLAILIVYIKKYYEYGPNFSLSAFGQNASFRDQVRRDWLFPPVHAFLESFCSGMHGQGLAVGGPLSPFLFNLYCEVFMDAQVRKLCERYDITYTRYADDCVFSRHKPIIGDIRRNVRECIARAGFEVNHRKSKVLSREMGAVFVTKIGLRNRTGKEDGSETAKIVFSQKKRRRLHGIIGSYLTMQMDWPEKVSGLIAEFIHYYKNVDESTATDRKTFALCKLFEAEWAKHR

SEQ ID NO: 7241 - protein, 346 aa, unidentified
  source 1..346: note = Related to JAGOUL010000013.1; note = Candidatus Moranbacteria bacterium
MRDMIMRPELVGQACGGYPLINFEVRDVRGKSRLIGIPNRPMRSLHRQLGKFLRGIIMHTDGSGYGLRKLPSAYGCVEGSNPLRNASQHKENQYFYITDISNAYGTVSLERLALLLTYLIQYEAYEESGFSLAWFGQDERVWVLRQDEAYQPVLGLLVAHFGGLHGQGLAIGGPLSPYLMNLYCEVYIDAPLRKFCEPREITYTRYVDDLTFSAKHFIGEETRRRIRAVISRGGFTLNRQKSRAQMLSMGQVSITQIGLARDTPDGSTRLVFSQKKRRKLHGIIHSYLTRGMDWPEKVRGYAAEFLYYYKNVAVRTATDEKTFELCKRFEREWKLYGGPKHRTRSK

SEQ ID NO: 7242 - protein, 312 aa, unidentified
  source 1..312: note = Related to MHKU01000025.1; note = Candidatus Liptonbacteria bacterium GWB1_49_6
MIFLKKAHEKTCDELPLFFPRLIRRQNQKTGAWKIRRVYEPNDAMRAIHEELDEYLRSQPRFPKHAPPRPAENVAPHRGNRFFYLTDIENAFGSVKVDGLVKAFCLMNSFWIPRKRGLKNFLENYCIAPEGGLYQGAPSSPALFELYAWAFLERPIHTWYNLKKWCGWNDVTYTRYVDDLTFSSKKRIGRGTRRQIRRLLHNAEFTINNGKNFVIDLANPKTPRITITGIGLEYGGRMFVSRERLRELEKMLIAGIEGEDVNPHKIEGFMSVFWSPYGGKRRSAVLTRTQRRILSLSRAWRKLQKKNHTMTP

SEQ ID NO: 7243 - protein, 406 aa, unidentified
  source 1..406: note = Related to JAGOVW010000033.1; note = Candidatus Pacebacteria bacterium
MHLQLLVEQASATETPPAFSVVRKRVGKKVRAIAVPNASMRVLHRLLINELEAPGYLLESATAKKGSSIIQNVRPHLHARSVYLLDFAHAYRSVPVQKLAASLHFRFPTFGTEREIAHFLKQYCFVPRHGLAQGAPASPLLFELYAEWEVDTSIRQFLERVEDSIGGRINYTRYVDDLTFSALEPIPAWVRRGIRSICMSAGFSIQHRKSVVGSLGTKVVEVTGVHLLAPGRAMLSRDFCNTLERTLDTYLSQLFSEPDLRLEGMIVYYVGMMRALGDVRASNRRTVRIDKKIKAYRLRTGFAPSHKRKTFSNRTLDAIRAQLPVSQIVSRSVALKRAGKEYKGLSPFKVERTPSFFVNDQKGFYHCFASGSHGDIFTFVMFREQCGFVEAVEMLAKEAGVSLDYD

SEQ ID NO: 7244 - protein, 329 aa, unidentified
  source 1..329: note = Related to JAGQNG010000010.1; note = Candidatus Saccharibacteria bacterium
MQPALSFDIMPKRFHHNPNQPELFTLTRDGSTKVRDIYVPTDEVRMKHEAMLRRLHALEIPFPHAHGGLPGFGVIDNVRPHQQSNYFYKLDIKNAFPSVDHEWLQRTVHDMLVERRVRKSDIRDIDHFVEADALVDGCPGLPLGYPASPFLFNIYCRPTDLAIGAGLALRKDFGYQVVRYSRWLDDLTFSSLQPIDAGHRRILREWVHMTPGFEINHRKSQRHSLGQGPVTITGISLYPDRRMAPSPELLEKVRVQFGQMAELIAAGIELTPQEIGEFNGYHSVLHMAGDPLKSRSATVRLLAKWYNRLALQLPDMESAAPGEDGGSTD

SEQ ID NO: 7245 - protein, 308 aa, unidentified
  source 1..308: note = Related to JAGNKD010000006.1; note = Candidatus Saccharibacteria bacterium
MKRRTVFKPATPEDLRIHWRMLANLQSIQWEFPHSVGSLPGSHLIDNVTPHISAESEQFYLLDLKSAFPSVDTDFALRAVYDGIRTRRGRDEAAEAARFMVETSYMGRTQDEKPDKMMYGLLQGLPCSPLFFDIISQALDMRLRRHLQRVFGDDVVYTRYIDDLTFSSRRAAFTRRRRKDIVAQIETLPGYIVNHDKTRCQSLGRGTLTVTGLDMRRNRKWPTDRRVLVAPSGSQLASVEQEINEMTRKLREDLPITLSEKAHFYGMGSILHMAGDPSKSPMSSVRTLKRRFREVDKELKKLPSGRLF

SEQ ID NO: 7246 - protein, 427 aa, unidentified
  source 1..427: note = Related to MFLC01000025.1; note = Candidatus Kaiserbacteria bacterium RIFCSPHIGHO2_02_FULL_49_11
MIALKSLVPLPLFGGAPTFNPQNIFDGKKWRTVQAPNNVMRKLHKELIEVLLELPIDFTSATGSLPGKSNILNANVHAGNQFFYIFDMKDAFPSVPIDRLADTLHVCSHGHLGTRARIRSFLEDYCAGPRGLAVGAPASPLLFNIYCAVGVDPGIRKLLRSDTIYTRYVDDLVISSSRPIPRILRKRIRKVVTDAGFAIKDPKSKVLDKEKGPVTITGVVIDKKGRIAPTKECLAEVEDLLWIPPQELTPEQQKRIAGFASYLQSFREFGRQKLAEGNGTVSTAPLSPVLDTLAKRCRIRLRENKKPRTQKQQMHLVFPEVFIDEIRATASLRDVIEPYLRPGKRGLRLKKVGGEWAGLCPFHNEKTPSFTIAEEKGFFHCFGCGNHGSVIDFIMRVERLEFPDAVRFLAKKYDLPLPERKLERTKN

SEQ ID NO: 7247 - protein, 419 aa, unidentified
  source 1..419: note = Related to JAHIST010000097.1; note = Patescibacteria group bacterium
MAAPRLSCSLKKYGFNSKEVVVKVNGKKLLADLMNWPEKKIEQAITRRSRYYLVKKIDKDGSIRKTYAPDRELKKLQKRFLKYFLYRIPVGWKNLITGFRPGCSYVYNAKCHALADAKIVLRLDFANAFPTVETSYLKTILAKILSQEVEYHRKGDYPFHPLFPVKRVKWFRRAIKNYYQLDLFCDPDKIICEFLDLVLSFVTYQGRLPQGAPTSPYLFNIVLWYSGLIQKITAFLGEKRISVSVGNVFSGEVIFTAYADDLTISSSRSITKHEVNNLIDLIEQESPFRINREKICYFQADRIAPLVTGLRLVKLVKEGRELDVLMSKANLNSREKKNLKRKILNREGRWIVNSVSLPKKGIRKIRGLIHKATYAPPLIQRMLEQKIKGHLSCLKAIYGDKLPNQISKPYQKFQQSLRG

SEQ ID NO: 7248 - protein, 389 aa, unidentified
  source 1..389: note = Related to JABMPX010000007.1; note = Parcubacteria group bacterium
MISKDLLTSVLDWPEEKINKAVLFKDSYRLINRKKKDGSLRKIYAPHPDLKRFQRRFLKYFLYRIPLISSLPINGFRPKFSYIDNTKEHAQKNVRFVLRLDFRDAFPSVKIEYLRIILKKVLFLEVKGYMEKNYRQRPLFPNKRVQWFRKLLRDLPQLNLFSVDPLKILDEFVELILPLITYQGKLPQGASTSPCLLNIVLCYSGLLEKIYQFLWDNRILFSENDVSMVNSTIYADDLTISSSEPISRSSINQLIDLIEQESPFKINRQKISYFNRARIAPLVTGLRIVRLVKEEIELENFLSNKDLTYKQKKNILRRTLNKKGKWIITSVSLPKKQIRRIRGLIYRAISEKALAPIIDGHMANLKAIYGQNLPNQIMVPYKKYLITEG

SEQ ID NO: 7249 - protein, 403 aa, unidentified
  source 1..403: note = Related to JACRFM010000021.1; note = Candidatus Kerfeldbacteria bacterium
MSRIKIEGGDTLLAGVLGMPSADIRNAIVCRDNYKIKHIVKKSGGRRRLSIPCKSVKKFQKLFLKKFLYCLIERGVLDKNMTGFLPGVSVKDNALVHLNENLQYVVRLDFKNAFPSVSFRVVKEVLLHHVKNEIGTYRAVEIQRLLGKKINYPEPVLFSMRKVKWFRELVSSLSVDNSASYYLDYIVDGFIEMAAYLLTYKGKLPQGAPTSPFMLNLTVSYLKILDRIREFLKQNNIDSQVSIYADDIVISAKERINFGLIRGLIGVVEASRVFRINRAKILRFDINQTAPLITGFRLIRIRSVNRKLTESWLARLPRKIKATVEERLFYNPQSPFINITLPQKQIKKIRGIIHRAIYQPGLASKVNGYVAYLKDIYGEHLPRQIVEPYKKYLLVNQKDPEVV

SEQ ID NO: 7250 - protein, 347 aa, unidentified
  source 1..347: note = Related to LBQA01000005.1; note = Candidatus Moranbacteria bacterium GW2011_GWE1_35_17
MNTIQEKAIIVLSSLLSNKFSPEKIKEILTSGISYRYKPRKKKDGSIRDCYAPAEDLKALQQSILSEILHNIPVHKNLCGFVPGVAMKNGVEAHLRETREKKIVGRWIVKVDIKNCFPSVKIKVLKNMFEDIFTGTLYAYGVDNPAVFFEFCDILIKLTTHKGGLIQGAPTSPYLTNLVISWAGIVDDLEHYCNTRHGYDLIFSIYADDITVSPTITNKASVKKIIHAIEKSRIFRVNPKKTTQNDNRHRSHRITGMSIHQEFDQFGPSEAWTTLSRKKQKFYRGRIQKVIQFLQQGCEPSIKEHGVSINQARGYITWTRHVCGERIPSCLKKVIAVFEELVNKQAL

SEQ ID NO: 7251 - protein, 366 aa, unidentified
  source 1..366: note = Related to DOKE01000013.1; note = Candidatus Moranbacteria bacterium
MKNSKYYLSLFLKFLPILEKMKITSAMADGLIYTYYTKEPYYRTYEILEKNGKIRKIDEPCDALKLIQQELNRYFYRFPTHKSLKAYIENCEGAKETALTHQFTVWGAKPGDRQSKPPRWLLKMDLKDFFPSIKTRTVENVLFLNFLRDKDNQQLLIRLSEKLNKKFGLLFKQFIELLIWLTAGNGCLTQGAPTSPYLANLVWTESGVIEKILDYLHSRKKEFNLAIYADDISVSFLERKYPRGVIKNIAKIINDSEYFKINPKKTKLNRLKHGAHLVVGISIGKTSHFEPSFGIPQKFINTLRGELHKTITIIKTETRPIEQIHEVSIPMMRGKIGWVKSVYGDRRLPSKIKKLVEEFEILSRII

SEQ ID NO: 7252 - protein, 425 aa, unidentified
  source 1..425: note = Related to JAGONZ010000028.1; note = Candidatus Buchananbacteria bacterium
MARPTALDVLSALIGLDRQIIELALSETESYQKIEIPKRNNGRRIIHIPSEILALVQKYLLECLYSWEVHDYMHGCVIGRSPVSNAAKHLRLNKKENVRPGTGEQFLYMTVPRHVLKLDLSNAFHAVTKDAVHQMLTSALSSTWAANLHLKQGDTDVEKKRWDIINHVRSNGYFVEPLASLITQLTTTEGLLPQGAATSPYLLNMVICASGLMERVAKACKPRRGRFTVYVDDITISTKEPEIGEGFIAAMIEAVERGGRFTVNPKKTSLTDSRHRAPVITGVTLGTNADGTGRLSIEQSHLNTIRRILWCAANLLEQGIKPDFDEHGFSLDHALGHAAWVDNVYQDKAPHPLVAKPLARFRKAFLCRALGPLGTQLSLPFGEEQPKQGLRSSNRRQLLQELLDQLLDRPVEERIRAIDEFNTQH

SEQ ID NO: 7253 - protein, 343 aa, unidentified
  source 1..343: note = Related to JAHIRB010000007.1; note = Patescibacteria group bacterium
MQKSRKDAVEILANLMRLQSDFIFDALKNRNYQQILIPKRSGDVRKLHAPGEELKLVQEVILQFLYRWKVDARQFGFVLGGSPIRNAKYHIRNEFYVPHWVLKLDLENAFPSVTSTVLRKEYTRVFNPETFKELSGIDEKQFTAFIQLMLDLTTYRERLPQGSPCSPYLLNLVLVWTGVTKGVLEYCEKKGLRASLYGDDFTISAKTSNMWFSKTFFRKINSAVSRSGCLRLNHDKTHLICSRNSAPIITGVKITESHDNGAKLTLTQSTLNHWRGVIHRVTEILYWNNRLPRLEQDGVTFNQALGYVNWIEDVYRESEVPLSVRKPIKSFKVQSSRFDRRRG

SEQ ID NO: 7254 - protein, 399 aa, unidentified
  source 1..399: note = Related to SOKK01000088.1; note = Patescibacteria group bacterium
MSRKQDEVKIKNPFPAQPLLQPRTLTKIYKERRDEMDALDFLGHIVKDRQTIQEAWRIRREYKDVYVLKGNGEVRILSVPPIKVKKAQKMILEWLRDGNFISSHPRIHGLVGSSCFNFIKGHCGTSQYFYSFDIKHAYDSTPVPLIYENLLRILSNKESLLLRAYFESETGKGIQELAKTIIELTTYSQASPKRTENEKQLSFLKRGSNSILPQGAPTSPALFFVVLKTMMEKIERDVNLSEHKLSCYGDNFLISSPSPINPEVADHVLAIVKSFGFTPHKTFQHNIKQGALKICGYTIAPGNGGKDKTRIGIDKSTIRRIRALCCKAQYTTRYKDPRLYRRLQGCLAWITPVYGGNRHNLPNQIKKPLRKIGTPLKCQSKQSKRSFLLKKQRPKKRRA

SEQ ID NO: 7255 - protein, 348 aa, unidentified
  source 1..348: note = Related to JAHJGP010000039.1; note = Patescibacteria group bacterium
MRQTRIDEWFSETKQKKKLIAKIQKVSALTKTRPESFWEKLEKALPLRKDYREAKIPKRSGGYRTIYMPSPELKKVQKNILRYLQEIWQVHYGPVHGLSPGGSCVKHARIHSASRWIFQFDIKNAFPSTNIITLRKLLSQIIPVEVNLGENATKIAYTRAELIIKLTTFQEGLPQGAPTSPFLFYIVLTSRKIIPATTGGEIRLTGLFYKLWSACPRGYKISCYVDGFVISGPKPISPKTQEKIFKTIRKESFEINQKKTRIQDCRHGTVMICGLAVDGKGRISLPKKTIRKWRGIIGKARFDPENLELRQKIEGFVASLKPIYEKGTPPQITKPYNRYQRELVKTTS

SEQ ID NO: 7256 - protein, 366 aa, unidentified
  source 1..366: note = Related to JACQXN010000004.1; note = Candidatus Portnoybacteria bacterium
MKKFSSFDGLLSLLEDCRQCEIKYRIKKMPKKGGSKRIIHVPSKEVKEIQWEILDIVKAWQVDECQFGFSPGKSCVDNALFHIHGYDINASGRKIQIRGVPRWVLKTDIEDAFPSVKRKHLETLFRDLFLPLKSYPAFVSATSPDRVDKIYKKLVYQFARLATFKGRMPQGSPCSPYLFNLVLLQSGIVKKLKDKAGERAKKTKGCQVTAYKISFYGDDITVTSFKDRIPNRFIKEISAIVEEGGIFRLNNEKTQRSSKKYRSILINGITLNDKWKEGGPCFLGLSKKIRKTYRGKIHRVTVILDSGRLPELEIDGINLEKAMGIISRIKDVYRNESLPSDLERVLIKFQEARNNLIRRTINIVCI

SEQ ID NO: 7257 - protein, 416 aa, unidentified
  source 1..416: note = Related to DPTL01000176.1; note = Elusimicrobia bacterium
MWISQDLIEKTKEALYEKTKDERVLWASPLEIVCLAKQKKCKVDFNTLLRSFSANHCTAEDVANLFNYLNSHGEGNVEREMLLKVIAEPEERKVLQEVKCLIDRYYPKRKKNPLEGIPKIKQFVTRFRNKERHYRSFAIPKRNGGRRIIEAPTQELANIQRLILKKILYRNQIWNSNSSVHGFVPGRNILSNASLHKEATVIVRIDLKDAFRNTKEEMLVKHLKEYFTEKGAKILVRLCTYKGHLPQGAPSSGMLLNFVLGELDGKLKKIAGFMGWRYSRYADDLTFSCVEFNKHTVGIGKLIERVKSMIKDYSYRVNEEKIRVFKKNRAMRVTGLVLNSGKPTISRKFRRNVRAKVHNFVTKGIGNEKEVLGYISYINLANKKYAKKLLRMMEKLPSTHVPRQDAIGISSGVASE

SEQ ID NO: 7258 - RNA, 1461 nt, synthetic construct
  source 1..1461: mol_type = other RNA
atggataagacggaaattgtgcagatcgcgtcacagatgagtacccgtgaagatctcctcgcattgctgaacaggattaagcaggatgagattcgcgaaagcggctttgacgccgacaagttctatcctttcacaatgaaacagctgctttactattgcaatcctaatcacgccttccaccggtataggcagtttaagatcaaaaagaaatcgggggggtttagactcattaccactccacgcaatagaagcttcatgatgctgttgcgatccgtgaatgaaattttgaaggcgatctacacacccagcgattatgccatgggctttacagaaaaacgctccgttgtgaccaatgctgccgtgcataggaatcagaactacgtcttcaatatagatctcaaagactttttcccctccgttgagcagggaagagtcatgaagagacttactctggaaccctttaatttttcaccccaaattgccctccttatcagcggtctgtgctctatgcgggtcaaacgagagcaacccctggaaacaaagagatatgatctagacaagcagtttatgtacgtactgccgcagggcgctcccacatctccagtcataacaaacacaatatgtgatacgctggaccgcaggctggctgggttggcaaaacgcttcggtttgcggtacacccggtatgccgatgacattactttcagctctatgcactacgtgtactccaagaacagtgagtttatcaaagagctaattaggatcatcaacactcaaggcttcatgatcaacgaggctaaaacccgactgcagaaactgggttcccggcaggaggtgactggaattattgtgtcggacaaacttaacgtcaccaagaagtacgtaagggaaatccggtcactcttatatatctgggacaagtatggctatagcgctgccatgtctagattctttccaaagtacaaagcagagaaggggcacatcaaaaaagggaatccggaactgactaacgtcctagacggaaagttactgtatcttaaaatggtaaagggggataccgactcagtgtatattaagctgtacaccaagtttcaggagctcgttaatcgcgatagcggccctgacaagaccaattcttacggaataagttacattgagtctttccctatcttagagttcgagaaggataagaacaccaacatcacaatctttcacaaggacggaaacaaaagatacgcaaccttcaggatgggcgagactcatcaggtggccagtattaacaaagacgtgacgccagacgacgaacaacagaaagagaagctggcaatatcctgttgcaagaattttcgtggcgagcaattctggcttatacatctcctggataaagttactgtgttcaaaccaaagcctgtggatatcgatgaattaaacaacgacttggacctgctcctgggaatctga

SEQ ID NO: 7259 - RNA, 1461 nt, synthetic construct
  source 1..1461: mol_type = other RNA
atggacaagacacaaattgcacagatagcctcccagatgtcgacgagagaggacttgcttgcccttctcaacaggattaagcaggatgagatccgggatctgggctttgacaccgacaagttctatccttttacaatgaagcagctgttgtactactgcaatccgaaccacgccttccataggtaccggcagttcaagattaagaaaaagagcggcgggtacaggcaaatcacagcacccaggaatcaatccttcatgatcctcctgcagtctgtcaatgagatcctcaagagtatatacaccccaagtgaatatgccatgggctttaccgagaatcggtcggttgtgacaaacgcagcggttcacagagctcaaaattacgtgttcaacattgacctgaaggatttctttccaagtgtggagcagggacgagtgatgaaacgccttaccctcgctccattcaatttttcccctcagatcgctctggctgtgtccgggttgtgcagcatgcgagtaaagagagagcagcctttagagacaaaacagcacgacctagacaaacagtttatgtacgttttacctcaaggagcacctactagcccaattataactaacatgatctgcgataccctagatcgcagactcgcgggactggccaagagatttggtttatgttatactcgttacgctgacgacatcaccttttcctctatgcactatgtgtattctgaaaagggggaattcagaaatgaactggcgcggattataagcacccagggctttgtaatcaatgaggccaaaacccgactccaaaaactggggagtaggcaggaggtgactggcgtaatcgtcagcgaaaagctaaacgtaactaaaaagtacgtgcgcgaaattcgcagccttctctatatttgggataagtatggctactccgcagccatgtcaaagttttatcccaagtacaaggccgagaaaggtcacgtcaaaaaggggaatccagatcttacgaacgtgctcgatggtaaattgatgtatctgaagatggtcaaaggagatgacgatagcgtctatgtccgtctgtacaccaagtttcaggagctggtcaatcgcgacacaggctctgacaagacaaactcatacggaattacctatgtggaaacaatgccccttatgaaattcgagaaggacaagaacactaacatcataatctctcagaaagacgttaacaagcggtacgccaccttcgaactggggaaagtgcatcagatcgcttcaattaacaaggctgtgactcccgaggacgaacagcataaagaaaaactggcaatctcatactgtaggaatcccaaaggcgaactgttctggctgatccatttgctggataaagccacaactttcaaaggaaaaccggttgatgtggatgagctgaataacgacctcgatgccctgttgtctacgtga

SEQ ID NO: 7260 - RNA, 1461 nt, synthetic construct
  source 1..1461: mol_type = other RNA
atggataaaactcagattgcgcagatagcaagtcagatgtccaccagagaggacctcctggccctgctcaaccgcatcaagcaggatgaaatccgcgagctggggctagatgctgataaattctacccttttacgatgaagcagttgctttattactgcaatcccaatcacgcattccaccgatatcgacagttcaaaatcaagaagaaaacaggaggatatcggcagatcgacgcccctcggaataagagctacatgatgctcctgaagacagttaacgaggtgctgaagtcaatctacatcccgagtacctatgcaatgggcttcacggaaaagcgtagcgtcgtaacaaacgccacagtgcacaaaggacagaactacgttttcaatatcgatttgaaggactttttcccttctgtggaacagggacgcgtaatgaaaaggctgaccctatccccattcctattttctccagaaattgccctgctcatttcggggctctgtagcatgagagtcaaacgggagatcttagtagaggacaagaaacacgatctggacaagcaattcctgtacgtacttccgcaaggcgctcccacctctcccatcatcacaaacatgatttgcgacactcttgatcggcggcttgccggcctcgcaaaaaggtttggtctgcattacacaaggtatgccgacgatatcacatttagtagcatgcatcatgtgtattcaaaagagggcgaattccgcaaggagctcgagagaattattgaatcccaagggttcactatgaacgataagaagactaggctgcagaagcttgggtctaggcaagaagtcacgggcatcatagtcagtgacaaacttaatgtgaccagaaaatacgtgcgcgaaattcggtcactgttatacatatgggaaaagtacggatacaccactgctatgtccagattttatcccaaatatatcgctgagaagggacatgtgaagaaggtcaaccctgacatgactaatgtgttggacggcaaactgatgtacctgaaaatggtcaaaggcgattcggattccgtgtacattaatctgtatacaaagtttcaggagctggtggcccgagattccggttcagaaaagaccaattcctatgggctgacctacattgaaagcgttccattgctgaagttcgagaaagataagaagaccaacgttacgatcagcaaaaaagacgggaataagcgttatgctacctttaaactaggtgaggtgcaccagattgcgactattaacaaggccgtgactcctgacgatgagctgcacaaggagaagttggttatcagctactgtaggaacccaaagggcgagacattttggctcatacatttactcgacaaagtcaccacctttaaaccctatccagtgaacatagacgagctgaataacgacctcgactctttgttatctacatga

SEQ ID NO: 7261 - RNA, 1461 nt, synthetic construct
  source 1..1461: mol_type = other RNA
atggacaagacacagataacgcagatcgctagccagatgagcacgagggaggacttgctggcactgttgaacagaatcaaacaggatgagattcgggagcttggctatgatactgataaattctaccccttcaccatgaaacatctgctgtattactgtaatccaaaccacgtgtttcacagataccaccagttcaagattaagaaaaagagcggaggctttcgccagataaccgctccaaggaatcaatcctttatgatgctgctgcagacagtcaatgagatcctgaaggcaatgtattcgcctagtgattatgcaatgggcttcaccgaagaaaggagtgtagtgaccaacgcgtccgtccataagggacagaactacgtgtttaatatcgacctgaaggactttttcccgtctgttgaacaacgacgagtcctgaagagatttggggcaaaaccctttaactttaaccctgaaatcgctctccttctctctgggctctgctccatgagagtcaagcgcgagcaggccgacgagacacagactcatgatttggacaaagaattcgtgtatgttctgcctcagggagccccaacatcccctatcattacaaatatgatttgcgatacccttgatcggcgcttagccggactggcccgcagatttggccttcgctattcacgttacgctgatgacataacgttcagttcaatgcattatgtgtatgccgagaagggtgaatttcgaaaagagctggcaagaataatcgggtcacagggattcaccattaacgatacaaaaactcggctgcagaaacggggctcaaggcaggaggtgactggtatcattgttagtgataaactcaacgtgaccaagaagtacgtgagggagatccgttccctcttgtatatttgggaaaaatacggctactctgcgaccatggccaagtttctgccgaagtacaaggccgagaaaggtcacgtcaagaagggcaacccagacttgactaatgtgctggacggtaagctcatgtacttgaaaatggtaaagggggaatccgatattgtttacgctcggctgttcgagaagttccagcagctagtggcgcgtgacagcggaggggataagaagaacccctatgggatcacatacatggagacagtgcccctgctcaaattcgagcaagacaaaaataccgaggtagccatcttccacaaggaagaaggaaaacggtacgctactttcgaattcaatggcgtcaaacaggtggtatctatcaacaaggacgtttctcaaaatgacgaaatgcaaaaagagaaactagccattagcaattgtaggaaccctaagggcgagcaattttggcttattcacttagtgaacaaagtcactgtttataacctcaagcccgtggacatcgacgaacttaataatgatctagacagcttactcagcacctga

SEQ ID NO: 7262 - RNA, 1446 nt, synthetic construct
  source 1..1446: mol_type = other RNA
atggataaggctcagatagtccaaatagcctcccagatgagcacgcgcgaggatctgctggccctgctgaactccattaagcaggacgaaatcagcaagtcctgttctgacggtgataagttctacccatttacgatgaagcacctgctctactattgcaatccgaatcacgtcttccacagatataggaagttccggatcaaaaagaagagtgggggattcagacagatcactagccccagaaatagatctttcatgatgctgttacagtcggtgaacgaaatcctgaaagcaatgtacaccccatccgattacgccatgggctttactgagaaaagatctgttgtgactaatgctcggattcatcagggacagaactacgtgtttaatatagatctcaaggactttttcccctctgttgagcagcctagaatctggaaacgcctgcaactggccccatttaacttccctatcagtattgcaaatgtcctagcaggcctgtgttccatgcgcgaggtccgaaaggatatcgacggcaaggacgtcttcgtgtatgtgctcccacaaggcgcacccacaagccctattattaccaacatgatctgcgatactttggatcgtaggcttgtcggccttgctaaaaggtttgggctgcactacagccggtatgctgacgacataacattctcatctatgcattacgtttacgccaagaatggagagttccgaaaagaactcattcgtatcatcaaatcgcagggctttaccattaacgaggagaagacaaggcttcagaaacaagggagtcgacaggaagtaaccgggattgtggtatcagaatcaaaactgaacgtgcctaaaaaatacgttagggagatccggtccttgttgtatatttgggagaagtacggttatagcgtagccatgagcaggtttctgccaaagtacaagttggaaaaaggacacgttaagaaaggtaatccggatcttatcaatgtgttggaaggaaagctcatgtatttaaagatggtgaagggcgatatggaccctgtgtatgttcggctgtattccaagttccaggaactggtggccaaggacttttcattgaataaaaccaacagctatggaataacctatatagagacaattcccctccttaaattcgaggaggataacaacacaaacgtgatcattcatctgaaagactgcaacaaacgctacgcggtatttaagctaggcgggatcaatcagttcgcgtctattaataaaaacgtgccctcagactacgaacagcaaaaagaaaagcttggtattagtaactgtcgcaactccaaggggaaacaattttggctcatccatctggtggataaggtgatcgtccagaacagtaacatggtcgacatcgacgagctgaataatgacctcaatctcttactagacatctga

SEQ ID NO: 7263 - RNA, 1449 nt, synthetic construct
  source 1..1449: mol_type = other RNA
atggataagaaccagatcgcccaggtcgcgaaccaaatacaggaacgcgaggacctgttgagtctgctgaataaaatccgcaaagacatagttggagacaacggctctgagtccaaatttttccctttcaccatgaaacacctcctgtactactgcaaccctaatcacacttttcacagatatacgcagttcaagattaaaaagaagtcaggagggttccgccttatcacatctccaaggaacagctcctacatgtttctgctgcagtccttaaacgaattactcaagagcatgtatacaccggctcagtcggcaatgggctttacagagggaagatctgttgtgactaatgctaatgtccataagggccaaaactacgtgttcaatctggatctaaaggattttttcccatccattgagcagcctcgtatttggaagcgccttcaactcgccccctttaactttccttctagtatcgcgaatgtgattgctgggttgtgcagcatgaaggaaactcgaacggacactaccggaaacgacgtggttacttatgtcctgccacagggggctcccactagtcccattatcacaaacatgatatgtgataccctagatcggcggctgctgggcctgtcaaaacgcttcgggctgcgatatacaaggtatgccgacgatataacattctcttcaatgcactacgtctatgccaaggacggcgtgttcagaaaggagttaacaaggatcattgaatcgcagggcttcactattaatgaggctaagacccgactgcagaagttgggtagcaggcaggaggttacagggatcatcgtctcagacaagctcaatgtgagcaagaagtacatccggaatatcagaaatcttctgtacatttgggagcggtatgggtatagcgtcgccatgagtcgtttccttcccaaatatagagccgataaaggacacgtgaagaaaggaacccctaacctgatcaacgtgctggatggtaagcttatgtacttgaaaatggttaaaggtgagtttgactctgtgtacgtgcggctacatgacaagtttcaggagctcgtcaagagggattttggggcagagaagactaatagcctcggcattacgtacatcgacacaaagccgctgttagaattcgagaaagaaatgcaaaccaccatttcctttcagcacaagaagaacgaaaaaagggcagcatcatttttgatcgagggcattacccattgtgcctctgtgaataaaaatgtgacccccgattccgaacaacagaaagagaaactctccataagcaactgccagaacgaaaaaggcgaacaattctggcttatccatctcgtagataaaaagaccgtattcaaatccaagccagtagatatcgacgagctgaataaagacctcgacagtctgttgaacacctacaatggttga

SEQ ID NO: 7264 - RNA, 1464 nt, synthetic construct
  source 1..1464: mol_type = other RNA
atggataaaaaacagatcgttaagcaagcatctcagcttaaatcgaaagaggatctgctgaatctgctgaatcgcataaaacgggatgaaatcgaggagatgggttttgatgccttcaaatttcatcccttcactatgcgccatctgaactattactgcaacccaaacaatgtctttcaccggtaccggcagtttcacattaagaaaaagtccggaggttccagggtcatcactgctcccagaaaccgtagttttatgatgatgctccaggcagtgaatgagatactcaaggccatatactccccttccgattacgccatgggatttaccgaggggagatcagtggtgactaatgctaccattcacaagggccaaaattatattttcaacatcgacctgaaggatttcttcccctctgtcgagcagagcagggtttggaaaagattacaactgaagccgttcaatttttccaagcagatggcgaatattatcgctggtttatgctctatgcggcaggtgaaggatgttattgacgaaacaaaggagcacaacaacgacaagaaattcaaatacgtgttgcctcagggcagtcctgtcagcccaataattacgaatatgatttgcgacacacttgatcgcaggcttgcaggactcgcccggaggtttggcctccactattcaagatatgcggatgatattacattctcttcaatgcactatgtgtacgccagcaacggaaagttcaggactgaactatgtcgcctgattaccgaacaaggcttcaccatcaacgaagacaaaacccgtttgcagaagctgggagcccggcaagaggtcaccgggattattgtaagccaaaaattgaatgtgacgaaggagtatgtaagagacatccgaagtatcctatacatctgggacagatacggctataccgctgcaatcgcacagtttctgccgaaatacacagcggctaaaggtcatgtgaagaaaggcaatccagaccttcagaacgtcatagacgggaaactgatgtacctcaagatggtaaaaggggacgaggatagcgtttatacccgattatattctaagttccagtctcttatccagcgagacactagcagtgaaaagaccaatagctacggaatatcatatgtggagacaacaactgtttccaagtttgagcagatcaacaaaaccacaatcaacttcgtgcaggacggcgacgggaaaaggcatgccgagttcaccctggggggcaagaaacagtacgccacgttcatgactatcgtgaagactgacgaaattaaggataacttggctatctcgaattgtcgcaatcccaagggcgaaatgttttggctgatccataaggtggataaggtcaccgtgccagccaagcccatcatcaatattgacgaactgaacaacgacttggatacactgctcaacctccctcacgggtga

SEQ ID NO: 7265 - RNA, 1461 nt, synthetic construct
  source 1..1461: mol_type = other RNA
atggacaagaaacagatagtaaagcaggtgtcccagataaaaagtaaggaggatctgctcaatttactgaactgcatcaagagagacgaactggaagagatgggttttgatgcctccaagtttcatccattcaccatcaggcatctgaactactactgtaaccccaacaatgtgtttcacagatacagacagttccacatcaagaaaaagagcggtggcacaagggttatcactgctccgcgcaatcgcagcttcatgatgatgcttcaggctgtgaacgaaatccttaaggccctttactccccaagtgactacgccatgggcttcaccgaggggcgctctgtcgtaaccaatgccaccatccataaaggccagaattatgtcttcaacatagacctaaaggacttctttccttcagtggagcagttccgagtttggaaaaggattcagctcaaaccatttaactttccaaagcagattgcaaacattgtggccggactgtgtttcatgcggcaagtgcggaacgttattgacgaaactaaagaacatgataacgacaagaagttcaaatacgtcctgccgcagggtagccctgtctctcccatcataaccaatatggtgtgtgatactctggatcggagactggcaggactagctcggcggtttgggttgcattatagtcgatatgccgacgatattacctttagctccatgcactacgtatatgcgcccaatgggaagtttcacaccgagctctatagactcatcactgaacaggggtttattatcaacaaggataagaccagactccaaaaacttggcagccgtcaggaggttacagggatcattatttctcagaagctgaatgtcacaaagaaatacgtgcgagatatcaggaacatcctttacatttgggaccgctatggctatacaacggcaatttctaagttcctccctaagtataaagccgctaaaggacacgtgaaaaaagggaatcccgacttacaaaacgttatcgacggcaaattgatgtatctgaaaatggtcaagggcgacgaagattccgtgtatgtcaagctgtacactaagttccaggagctcgtgaatagggacagcagctcagataagacaaattcatacggtatcacgtacatagagtctttgccttttctcaagttcgagaaggataagaacactattattacgatccaccacaaagactgcaataagcgctacgcgacttttaaaattggagaaaccacacagatcgtaagtatcaataaatcggtgacccccgacgatgagcaacaaaaggaaaagctggcaatatcttattgcagggactccaaaggagagcgtttctggttaattcacttggtggacaaaatgacagagttcaagcctaaaccagtggacatagatgagctgaataacgatttggatctactgctgtcaatctga

SEQ ID NO: 7266 - RNA, 1455 nt, synthetic construct
  source 1..1455: mol_type = other RNA
atggacaagaagcagatagttaagcaggctagccagctgaattccaaagaagacctcctgaatctgctaaaccggattaaacgggacgaaattgaggagatgggctttgatgcgagtaagtttcatccattcacgatgagacacataaactactactgcaatccaaacaatgtgttccacaggtatcgtcagtttcacattaagaagaaatcaggaggtacccggattatcactgcaccccgtaacaggtcattcatgatgattcttcaggccgttaacgaaattcttaaagccatctatacaccttctgattacgctatgggattcacagagggtagatctgtggtgagtaatgctactatccataagggacagaattacgtgtttaacatcgatctcaaggacttttttccctcggtggagcaattccgcgtgtggaaaaggctgcagttgaaacctttcaatttcccgaaacagatcgccaatatcattgccggcctctgctccatgcgacaaacccgcgagataattgatgagacaaaagagcacaaaaacgataaaaggtacaagtacgtcttgcctcagggaagcccagtgagccctataattacgaatatgatatgtgacaccctggatcgcagactcgcagggttagcgcacagattcgggctgtgctatagccggtatgccgatgatatcactttctcatcaatgcattatgtctacgcccccaacggcaaatttcgaactgagctgtgtaggatcatcagtgatcaaggttttaccctgaacgaagacaagactcggctgcaaaaggtaggggcacggcaagaggtaacgggcattatcgtctctaagaagttgaacgtaacaaaaaagtacgtccgcgacattcgaaacattctatacatctgggacagatatgggtataccgcagctatcgccaagttcctgcccaaatacaaagccgctaaaggccacgtcaaaaaaggaaatccggatctgcagaatgtgatagatggcaagctcatgtatcttaagatgatcaagggcgaagaagactccgtctatatcaagctgtacacaaagttccagagcctcgtaaatcgcgacacttccttggataagacaaatacctacggaatctcctatgttgaaaccactcctattcttaagtttgaacatacaaacggcaccatcgtggttttcgtgcacgacgagggcgggaaaaggcatgccgagtttatcttaggggaaaaaaagcagtacgctaccatcatgtctgtcgttaaaaccgaggaggtgaaggaaaacctggcaatttccaactgtagaaacagtaatggtgagatgttttggttgatacacagcctcgacaaggtgactacattcaagcccgaaccagtggatatcgacgagctaaacaatgaccttgacttactgctgtctacctga

SEQ ID NO: 7267 - RNA, 1440 nt, synthetic construct
  source 1..1440: mol_type = other RNA
atggacaggactgaaattactaagatggccatgcagatgaaaactaaggaggatctgctatcactcctgaatctgattaagcgggcggaacttgaagaaattggactccaagatcagttccaccctttcaccatgaagcacatcaattactattgcaacccaaataacgcctttcatcgatatcgccaatttaaggtgaagaaaaaaagcggcggcttccgactgatcaccacccctagaaacagaagtttcatgatggtgttgtcagctataaacgagctgctgaaatctctgtatactccttctgactacgccatgggcttttctgagggtcgcagcgtggtaagcaacgcctcgatacacaaaggacagaattacgtattcaacatcgacctcaaggactttttcccttccatagagcagccaagagtttggaagagattacagttggcaccctttaattttcccgagaagattgctagtcttatcgccggcatgtgtagcatgaaggagattaggtctttcgaagacggccatcaggagacattctacgttctaccgcagggtgctcctactagtccaatcatcacgaacatgatttgcgacaccctcgaccgccggctagctggattagcaaagcgattcggcctgcattatagcaggtatgctgacgatatcaccttctcttccatgcattacgtgtaccaggaggatggggattttcgtaaagagttgaggcgtatcattgcagaccagcattttacgataaatgacgataagacacgccttcagaagaaaggagcacggcaagaagtgacaggaatcatagtgagtgataagctgaacgtcacacaaaaatatgtcagagacgtgcggaatattctttatatctggaatcggtatgggtatccgagcgccctggccaaatttattccaaagtacaaggaggagaaggggcacgtcaaaaaagggaatcccaacctggaaaatgttattgacggtaaactcatgtacctgaaaatggtcaagggtgaagaggattccgtgtaccaaaggctccacaacaaattcgtcacactggtggagaagatgaaggaaaagtcaatcaccactgagcagaaagtaacgtacatcgagacatgggctctgttggaatttgagaaaaaatactccactgaggtggtgatcaccacatcagaaaatagccacaggtacgcgcacttcatctttgggtccaagaaagcaaaggcctcggtcaataagaacataatccccgatgaggagaaagacaaaaagcagttagccatctccctgtgtatcgacggcaaaggggacaccttctggtttgtccaccgcattgataaggttatcgttcccaagaagaccgaagtggatattgatgaactcaacaacgatttgaacctcctgcttaatatttga

SEQ ID NO: 7268 - RNA, 1605 nt, synthetic construct
  source 1..1605: mol_type = other RNA
atgttattccttttatgctacgacgtgtttatgctctacatcatttgctacatctacatcaagaagattgtgtctgggtgggatctcagtcggccactaatcaatatatttgaaaggagaaggcagatggacaaagaacagattcggcagaccgccctgcagatgaagacgcgcgaggacctgctgaccctgctgaacagaataaagagggatgagatggagaaactggatttcgctgataaatttcacccttttaccgcgaaacacatgaattactactgtaatcccaaaaatgccttccaccgctatcgtcagttcaagatcaaaaaaaagagtggtggctttcggcaaattatggccccgagaaatcgatccttcatgttcatgcttgactgtctcaatgaggtgctgaaagccgtttatactccaagccagtatgctatgggctttacagaaggcaggtctgtggtgctgaacgcttcgaaacacaagggtgctaactatgtcttcaacatcgatctcaaagactttttcccctctatcgagcagcctcgggtgtggaaaaggctgcaactccagccatttaactttcccgtaccggttgcctcagcaatcgcaggcttgtgttgtatgaaagagacaagagaaatgagtgatggaaccaagaaggacttctatgtgctgccacagggagcacctacgagccctattatcaccaacatgatctgcgataagttagatcaccggttgggtgggcttgcccgacgctttggtttgaactacactagatatgcggacgatatcacattctcttcaatgcataacgtctaccaggagaattccgagtttcggaaggaacttgccaggatcattgggaaccaaggattcaccatgaatgagcaaaagacacgactgctaaaacgcgggagccgccaggaggttactggcataactattagtgacagattgaatgtcagccagaaatatgtccgtgatatcagaaacattctgtacatttgggaaaagtatggctatgcagtggcatattccaagtttctgcccaaatataaggaagaaaagggacatgttaagaagggcaatcctgacctgatgaatgtgattgacgggaagctcatgtacctaaagatggtgaaggggaaagaggatagcgtatacaaacgaatgtatgccaaattccagatcctcgtcgaaaagtcctacgacatcaaaaagaccaacgaaaagaatatcacatacatagagacgactcccctgctcgaattcgagaaaaagattggctccccagtagagattgtgatcagcaaccaggagtcccaatcagaggctgagaaaaagaaaaacgacaaaggcaggtacgcatattacaaactcgcgaacggatctaagatcaaagctagcataagtaagtacctttcagacgccgaaattaagaccaaggataagctggccatatcgacatgccgtgatgctaagtctaaggagttcatgttcattcatcgcgccggaattgtcactgtgccaccccctaagcccatagacatcgacgagcttaacaatgaactggactccttgttgtcaagctga

SEQ ID NO: 7269 - RNA, 1479 nt, synthetic construct
  source 1..1479: mol_type = other RNA
atggataaggagcagattaagcacattgctctgcagatggagtcccgtgaggacctgttgagtctgctgaacagaataaagcgcgacgagatggaagaattgggttacgctgacaaattccacccctttaccattcgtcacatgaattattattgcaaccccaaaaatgccttccatcgatacagacagttcaagattaagaagaaagccggtggcttcagacagatcaccgcacctcgaaatcgctccttcatgttcctgctcgattgcttaaatgaggtgctcaaggccgtgtataccccatcccagtacgctatggggttcactgagggccggtcggtggttacaaacgcgtgcaagcacaaaggggccaactacgtattcaatatcgaccttaaggactttttcccaagcatcgaacaacctcgcgtgtggaaacggctccagctgcagccatttaattttcctgtttcagtggctaacgctatcgccggcttgtgttgcatgagagaaacaaggatcacgagcgacggcatcaagaaagattactacatcctaccacagggggccccaaccagtccaataatcaccaacatgatttgtgataagcttgaccacaggcttggcggactagctcatcgcttcggtttaaactatacacggtatgccgacgatatcaccttttctagtatgcataatgtgttccaagagaactcagatttcagaaaagagcttctgaggataatcggagatcaggggtttgtaatgaatgagaagaagactcggttgcagaagcgtggttctagacaggaggttactggcatcatcatatctgataaactgaacgtcagccagaaatacgtgcggaatatacggaatattctgtacatgtgggaaaaatacggctatactgtagcctatgcgaagttctttcctaggtacatggaggagaaaggacacgtgaagaaaggaaaccccgacctggtcaacgttatcgacggcaaactcatgtatttaaagatggtcaagggcaaagatgactcggtgtatcagcgcctgtacgcgaagtttcaatctctcgtggcacaaatgagggatccgaaaaaaacaaacgataagcatattgcctacgtcgaaaccatgccgctcctggactttgagaaaaagataggaagttcagttgaaatcgtcatcccccccaaagaagaaaagaacagcgaaggagagatgagccaatctgggaaagggaggtttgcatattatctcctggtgggcacaaagcagctaatcagcatttctaagtacctttccgaaactgagattaaggcaaaggacaagttggcaatttcacagtgtcgcgatggaaaagggaaagagtttatgctcattcatcgaattaacatcgtcacggtccctccccccaagcctgtggacattgatgagctgaataatgaactggactccctgctgagctcctga

SEQ ID NO: 7270 - RNA, 1554 nt, synthetic construct
  source 1..1554: mol_type = other RNA
atggacaaggaacagattgccaaacttgcccatcagatggaaacgaaggacgacttggtaaccttactgaatcggataaaaaaggaggaaatggcagagatgggctttgctgacaagtattatcccttctcccagaaattgatgaactattactgcaatcctaagaatagtttccacagatataagcagttcaagatcaagaagaaaagcgggggcttcagacaaattaccgctccgcgcaataggtcctttatgctgatgttgtcgtacgttaacgtgattctgaaagcactatacacaccatctaagtatacaatgggatttactgaagggcgctctgtcgtggacaacgctcaaaaacatctgggcatgaattacgtgctcaacctagatttaaaggacttctttcccagcatcgtgcagcccagagtctggaagcgactccagctgaaaccttttaatttccctgttccagtggcctctgccatcgccggactgtgttgcatgaaagaaattcgagaagataccgatggaaagaagactgagcactttgtactgccacaaggagcccccactagcccgattattaccaacatgatatgtgacaaactggaccacaggctggcggggcttgctaagagattcgggctaaactatacgagatatgcagatgatatcactttctccagcatgcacaatgtttatcaaaagcacggtgagtttttcgcagaactctaccggataatcgaaggtcagggctttaccgtgaatgaaaaaaagacacgtctccagaaaaacggctccaggcaggaggtcaccgggatcactgtcagtgaaaagctgaatgtgacccagaagtacgtgaacgacctgaggaatattatctacatttgggaccggtacggttattctgtcgcctattccaagtttttccccaaatacaaacaggagaaaggccatgtgaaaaaaggaaatccagatctggtaaatgtgatcgacggaaaattgatgtatctcaagatggtgaaaggcgatgaggactcagtgtacaaacgcctccacgggaaattcatcaagttgctttcaaacctgaacgatcccgcgaagaaaactgagcagaacatcacatatgtggacaccctgcctctactcgaatttgagaagcggaataacaccgaggtgctggtctgtttctcagaggagaaatacgagctgacctttgataatggcatcgtggtgcagatgagcgaggaacactacgagattctgaaagataaaacacctaaggaggagataaagagtacgaggttcgtgccttcccggcgctacgcctactttaagctgcataacaagaaggtctacgtttctatcaacaagagtgttaaaccagaggaagaacacaataaggagctgctggctatatctgtctgccgtgacagcaaaaacaaggagttctggttgctccataagttagataaggtaacagtcagcacacaagttgaacttgatcttgacgagctcaataacgaccttgattcattactcaactcgtga

SEQ ID NO: 7271 - RNA, 1053 nt, synthetic construct
  source 1..1053: mol_type = other RNA
atggagcgcgagcagatagctaaaatggcagctgccatggcagataaggaagatctcttagacctgctgaacaaaatcaaacaggacgagatgatcgctacaggtttcggcgataagttctatccattttctatcaagcacatcaactactattgtaaccccaacaattcattccacaggtaccgccagttcaaaattaagaagaaaagcgggggagagagaattataacagccccacggaatcggtcgttcaaactgattttgtcctacatcaatgagattctgaagtccatgtataccccatctacatatgcgatggggtttgctgagggtcggagcatagccgacaacgcgaaaaagcatagaggcatgaattatgtgtttaacctggaccttaaggatttctttccgagcatcgaacaagctcgcgtgtggaagaggttgcagctcgccccctttaactttcctctgcctgtggctaacattattgccggtatgtgctgtatgaaagaagtcgtgcaagcagagggtgggtcacagacggcccgttatgtgctgcctcagggagccccaacttcccctatcatcacaaacatgatctgcgataacctcgatcgtagacttgccggagtggccaagcgatttggcctcaattacacccggtacgcagatgacatcactttctctagtatgcataatgtctaccaggaaaatggggagttcagaaaggaagttaggaggattattgaagagcagaagttcactataaacgataagaaaacccgcctgcaaaagaaaggcagtcgacaggaggtgaccgggatcattgtgtccgacaagatcaacgtaaccagggactacgtaagagatatccggaatattttgtacatgtgggagaagtatggatatggcgttgcctttgcaaaattctttcccaaatacaaagcggacaagggccacgttaagaaaggcaatcccgaccttataaatgtcctggacggaaagttacaatacctaaaaatggtcaagggggaagaagacagcgtctggtga

SEQ ID NO: 7272 - RNA, 1461 nt, synthetic construct
  source 1..1461: mol_type = other RNA
atgaaacgtgagcaaatcgcacaactcgctcggaatatggagaatagatctgatctgctcgccctgctgaaccgaatcaagcacgacgatgtagtcgaagagggcgtgcagttctttccctttactatgaaacagattagattctactgcaatccaaaccacgcctttcataggtatcggcagtttaagattaagaagaagtcgggaggctttcggttgattaccacaccccgaaatcgcacctacaaaatgcttctgcagtacgtgaatatcatcctgaaagctttgtactccccttctgactacgcaatgggcttcacagaagggagatcagtggtgacaaacgcggagaaacacctgggacagaactacgtgctgaacttagatcttaaggacttcttcccctccatagatcaagcgcgagtatggaagaggcttcaactggcaccgttcaactttccagtggagatcgccagtattattgccggcctctgttgcatgaagtttaaagatgacgaagtcgaaaagacacgctatgtgttgccacagggcgcacccacgagcccaattatcaccaacatgatttgcgataagctggacaggagactggttggtttggccaaacggttcgggctccattacacccggtacgctgatgatattacattcagcagcatgcacaacgtgtaccagcctaatggcgacttttggactgaactcaggaggatcatcgccgaccagaacttcaccatcaatgaggacaagacgagattacagaaaagggggagtcggcaggaagtcaccggggttatggtcacagagaaactgaatgtttcccagaagtatgtacgcgacatacgcaacattctgtatatatgggagagacatggatttaacgtcgcctatagcagattcttccctaaatataaaagcgaaaagggccacgtgaagaagggaatgccagatctagtgaatgtgctcgacggaaagctgatgtacttgaagatggtaaagggagaaaatgatcctgtgtatcttcgcctgtatcgtaagtttaaggcactagccgaccaggctcgtgatatactcactgctaacaacggggggatcaattatatcgaaaccacacctatccttgaatttgagcagaagaataacacggaggtggttattctgtggactgaggacaaaaccgacggtgataaaatgatccccgcccggcgctacgcctacttcatgctggacggcaaaaggatcaaggcttcagtcaacaaggtgataactaaagaagaggagtcccagaaagagttactcgcgatctcatcttgtcgagatggtaacgataaacctttctggcttgtccataagaaagacaaagttactgttttcccgccagaacccgtgaatattgagcagctgaacaatgagctcgacgctctattgaataagcaagacggttga

SEQ ID NO: 7273 - RNA, 1491 nt, synthetic construct
  source 1..1491: mol_type = other RNA
atggataaaaccgagattgcagctttggcccaccgtatggagagtaaggatgacattctggccttactcaatcatctcaagcaagacgagatggaagaaatgggtcagattgacaaattctatcccttcacaatgaagcacatcactttttactgtaaccccaaccacacgtttcacaggtataagcagttcaagatcaaaaagaagtccgacggctatagacagatcaccgcacccaggaaccaatcgtttatgcttctcttgagatacgtgaatgagatatttaaagctgtgtacagcccctcagactacgcgatgggctttaccgagcagcggagcgttgttaccaacgctaacgtgcataagggccagaattatatcttcaatatcgacctcaaggactttttcccttctatcgagcaacctcgtgtctggaagaggttgcagctggagcccttcaatttccccataccagtggctaacgttctagcaggaatctgcagcatgaaggaaacccgcactctagagaatggcacgaagaaggacttttatgtactgcctcagggcgcccccacaagcccaatcatcacaaatatgatatgcgacactctggatagacgactggccggactcgccaagagattcggtctgcggtacaccagatatgccgatgacatcaccttttcttctatgcacaacgtctaccaaaaggatggtgatttccggaaggaactggtgaggattattcaatcccagggctttaccatcaatgagaaaaagacacgcctgcagaagataggaggcaggcaggaggtcactgggattatcgtgtcagataaacttaacgtaacacagaaatacgtccgggacattcgaaatattttgtacatatgggaccgatatggatacggggtaacatactcaaaattcttcccgaagtataaggaggaaaaagggcatgtaaagaagggaaacccagacttagtgaacgtcctagatgggaaactgatgtacatgaagatggtgaaaggtgaaaatgattcagtgtacaaacgcttgcacgataaattcgaaaaactggtgagagaaactcgcgatcctttaaaaacgaccgctcacagcattacttacgtggagacaacaccactgctggattttgaaaagcaaaataccaccgaggttatcattactgaatccgagactagcgtcgaacagacaatgaccgattccggggagcaggcacgcccacatcggtatgcctatttcatgcttgatggcaagaagatttttgcgagtgtcaacaacggcattaaacctgagatggaaaaacggaaagaacagctctctattagtatctgtagggacaagaacgacaaacagttttggcttatccacctgtccaaaaaggtgacggtgcctccattcgagccgatagacgttgacgagcttaataaagagctggacgccctcctggatatcggacatgggtga

SEQ ID NO: 7274 - RNA, 1191 nt, synthetic construct
  source 1..1191: mol_type = other RNA
tatgctatgggcttcgcagagggtcgatccgtcgttacaaacgccaacgtgcacaaaggacagaactacgtgttcaacatcgacctcaaagacttcttcttttccatagagcaaccaagagtgtggaaaaggctgcagctgaagccctttaatttccctcttcccgtggctaatgtcattgcagggttatgtagcatgaaggaagtgagagagctggaggatggtacgaaacaggaaatatttgttttgccacagggcgcgcccacctccccaatactgaccaatatgatctgtgataagctggaccaccgtctggccggactggccaagagatttggtcttcattacactagatacgccgatgacatcaccttttcttctatgcataatgtgtatcagcctaaaagcgaattcatgaaggagttacaacgcattattctggatcaggggtttcacattaacaacaaaaagacacggctgcagaagttgggaagccggcaagaagttacaggcatcattgtctcaaataaactcaacgtgacgcagaagttcatcagggatatccgcaacatcctctatatgtgggatcgctacggatatagcgtggcctatagcaattttttccccaagtacaagaatgagaagggccatgtaaaaaaggggaatccggacctcattaacgttatttgggggaaactgatgtacttgaaaatgatcaagggcgaagaggactcggtgtataaaaggctccacgacaaattcatttcactagtcgaaaaaaccttcgacgagaacaaaactaccgatcaacatatcacttatgtagagactacccctatatctgagtttgagaagaggaataatacacagatcttcatcgagatttctcagccatacgtggagctcgaaaaagatgagaataatcccgataagactaaggaagtggaaaagacaagtcaccgatacgcgtactttatgcttaacggcaaaaagatttacgcttccgtgaataagtgcatcaaaaccgaagaggagtcaaagaaggattatctggcaatctccacctgccgggacgccaaggggaaaccgttttggctggttcacaagatagacaaggtcacagtacctagtcagcttgctgtcgacatcgatgaactgaacaacgaattagacagtctattgaacatgtga

SEQ ID NO: 7275 - RNA, 1524 nt, synthetic construct
  source 1..1524: mol_type = other RNA
atgaacaaagggaaaataataaagtatgccactgtgatgcagaccaaggtggacctccttaagttgctgaattccatcaagaaaatggaacttgaggattgtggcctgagcaaggaattccatccaatcactatgaagcagctgaattattactgcaacccaaaacacacctttcacaggtacaagcagtttgtcatacccaagaagacaggtggaaagaggattataacagccccgcagaaaggttcattcagattaatgttgagcgctctgaaccagcttttcaaatttttgtacacaccctcagattacgcaatgggctttaccgaaggcagaagtattgtgacaaatgccgatgttcacaaggggcaaaattacgttttcaacatcgacctgaaagacttctttccttcgatacgccagccgcgtgtctggaagaggatccagctccccccattcaatttcactaaagaggtggccaatgttatcgctggtctttgcagcatgcaaattaaaaaggaggatggaacgttggactatgtattacctcagggggctcctaccagtcccattatcacaaatatgatttgcgacaagctagaccgcagactggctggacttgctaagcgctttgggctgcattataccagatacgcggatgacatcactttttcttccctgcattacgtctatagcctcaatggggaattccgcaaggagctggagcgaatcatcgccgaccaaggattcaccattaacgataaaaaaacacgtctccagacgcgggccatgcggcaagaagtgactgggatcacggtcagtgataagttaaacgtaacacagaaatacgtacgagagattcggaatctcttatacatctgggaaaagtatggctatgttgatgcagtgagcaagtttctaccaaagtataaggtggaaaagcagcgaaaaggcaatcctgatctgattaacgtgctgtctggaaagctgctctatctgaaaatggtcaagggcgaggaagacagcgtctatatcagactctcacagaaattcaacaaactggtggcagacttcatggacgtgacccggagatcagccactggcctcatgtacattaagacatacactatcgacgagtttgagaagcggtttaacaccaaaatcaagatcgagactttcgagacaaacacaaaagagaaggagattaacgtgaaaaccgagaacgaaggccaggcaaaaaaaaagacccacaggtacgcatctttcattttgtccaacgaggagggcgaagatatcaagcagaacataagtattcggaggaatgttaagtggaacgacgaccccaagaccaaacgcaaactggccgtatctcaatgtcagaagggtaatgccaaacctttttggcttctacactacagggctgaaaaacaagcggtggaacagaaggatgtctccatcgaggacctgaacaatgtgctggacaatctcttgtccactctggatgatggaacgaccatttcttga

SEQ ID NO: 7276 - RNA, 1449 nt, synthetic construct
  source 1..1449: mol_type = other RNA
atggataagactagaatcgcacggctggcccatctgatgaaaggcaaagatgatctgctctccctactgaatgacatcaagcgagatatgatggctcaggccggtgccggcggatcattttatccgttcaccatgaagcacataaactactattgtaatccagggaacacatggcatcggtacaaaagttttcagatctccaagaaaagcggaggtacgagacaaataacagcaccccggaatgaatcttttaagctcattctccgctgcctcaatgagcttctcaaagccgtgtactctcccagtgcgtatgcaatgggcttcaccgagggtaggagcgtagtgacaaacgctgaagtccacaagggcatgaattatgttttcaacatcgatctcaaggacttcttcccctctattgaacaggccagggtttggaaaagattacagatcgcgccatttaacttcccagtccctgtcgcaagcgttatcgcggggctgtgttctatgcaggacgcccggactatggacgatggcaccacagccgtgaggtatgtgttgcctcaaggagcccctactagccccataatcactaatatggtttgcgacaaactggacaggcgtctggcaggtctagccaaacgctttggggtgcgatacacacgatacgccgatgacataaccttctcctcaatgcacaacgtttaccaggtgggcggggaatttcgtcaagagctgcagagaattatcgctggccagggctttaccatgaatgaggctaaaactcgtcttcagaagcggggagccaggcaagaggtcacaggtattgtggtcaatgataagctgaacgtgacccaggcttacgtacgcagcattcgcaacatcttgtatatctgggacagacatggttacggcgtggcttatgccaagtttttgccagtgtataaggccgataaggggcatgttagaagagggaaccccgacctagtgaatgtgattgatggaaagcttatgtacctgaaaatggtcaagggagatgctgatagcacatacctgcgactccgcgccaaattcgataagttgtccggcgacgtgcatgaccccagtaagaccacggaccacgccattacatacgtggaaacgaccccactgcctgagttcgagaggcggaatgccactaccgtggtcatcgctactcccgaaccgtgtgacggcggagctgcagctcacaggtacgcatattttgagattggggggaagaaggtatatgcgtccgtcaacaaagctgtcaagcctgaagatgagggacggaaggatttactgtctatttcgtcctgccgcgacaaagatgacaaaccattctggttagtgcacctgtcatcaaaaactgtgacccctgcactcgtagacgttgacgcactgaacaccgagcttgacagtttgcttgactga

SEQ ID NO: 7277 - RNA, 1341 nt, synthetic construct
  source 1..1341: mol_type = other RNA
atgaataaagaactattccttgaggagaaatacatcaagacgaagaagaagtacagaaagatagtaacatacgtggacggcgagaacttgcttagagagaagcacgaacggatcgtctcactgctcaagcaggaatgcagtgactcaatttttgcgaaagcttatattgagcacagcagcattgttaagaacgcaaaagcccacatgtataatgatatattcctcttcttcgacgtgaaggacttttttccatctatacaccaggcgcgggtctggaaaaggctgcagctaaagccactgttcttcaaacaacctatagccaatattctggctggactgtgttctatgaaagagaaagctgaagacgggagcatcaggtacgtactgccacaaggcgcccccactagtccagtcatcaccaacatgatttgcgacaatctggatcgccgtctggccggtttggccaagcgatttggtgttgtgtactcacgatacgccgatgatatcactttctcctccatgcataacgtgtataacacaagcggggaatttaggaaagaactgaaacgcatagtggaggggcagggcttcaccatgaatgaggcaaagacacgtctccagaaacttggcagtcggcaggaggtgactggcatcatcgtgtctgataaattaaacgtctcccagaagtatgtcagagacatccgaaatattctttatatctggcgcaaatatggatacgacactgccttcaacaagttttttcctaagtataaggaggccaaaggccatgttaagaaaggaaaccccgacatggtgaatgtgctcgatggtaagttgatgtacctgaaaatggttaaaggggaggacgattcagtatgtaaaaggttgagatcccaatttgatgaactctgtaactcgctgcacgacgatacgaaaactactcaacaaggaatcacctacgtggaaacactacctgtgctggaattcgagcgcaagcacaacacaaccattgccatcatgaccacgaaaccgaaggaatttttcattgtacagaagaatcaggaagctaccgaggatacccagaaatccatttctgaaaacttcatcccccatcggtacgcaagctttaagcttggagggagaatgcagaaagctagcgtcaataagagtctcaagaaggaggaggagacacagaaagatctcttatccatctctaactgccgggacgcaaagggcaagttgttttggctggtgcataggagcgacaaggttaccgtgccgcctgcaaagcccgtcgatattgacgagctgaatgatgacctggacaagctcttaaattga

SEQ ID NO: 7278 - RNA, 1500 nt, synthetic construct
  source 1..1500: mol_type = other RNA
atggataagaatagcattagcaaggccacacaacagctggaaaccaaagaggatctgctccgactgcttaaccaaatcaagcaggatgagatgacagagtacggtatgtccgataagttctacccctttaccatgaagcacttgaactattactgcaatccgaataactccttccaccgttataagcagttcaagatcaagaaaaagtccggggggtttaggctgatcactgcccctcggaaccagtcatttatgctgttgctgcgctacgtcaatgaggtgtttaaagctgtgtacaccccatccgattacgcaatgggcttcactgaaggcagaagcgttgttaccaacgctaataaacataagggtcacaactacgtgttcaataccgatctgaaagatttctttccttccatacatcaggcacgcgtgtggaaacgacttcagctgaaaccactgctcttcaagcaatcaatcgcaaacatacttgccggactctgctccatgaaggagaagacagaagacggaaatataaagtttgtcttacctcagggcgcgcccacttctcctattattaccaatatgatctgtgacaacctcgatcgcagactggccggactagccaaaaggttttccgtggtgtattcgagatacgcagatgacatcactttctcatcaatgcacaacgtctaccagacttcgggggagtttagaaaagagttgaagcgaattatcgagagtcagggctttacgatgaacgaagccaagacccgcctccagaagtttggcagccggcaggaagtcacagggattattgtctccgataagctaaatgtgagtcagaagtatgttcgggacatcaggaacatcctgtacatatggcataagtacggctatgacacagcgttcaacaaatttttcccgaagtacaaagaggccaagggacacgtaaaaaaaggtaatcccgacatggtcaatgttctggacggcaagcttatgtatttgaaaatggtcaagggagaagacgatagtgtttataaacggctgcgctctcaattcgatgcactctgcaattctctacacgacgacactaaaacgactttgcagggcattacatatgtggagacgctccccgtgctcgagttcgaaaaaaagaataacaccactatcacaatcgtaacgaccaagcctaaagagttctatacagaacataccagccaagaagccaccgaggacacacaaaagtctatatctgagaatttcatcccccacaggtatgtatcattcaaactgggagggcggatgcagaaggctagcgtgaataaaagtttaaagaaagaggacgaggaccgtaaggaacttttaagtattagcaactgtagggacgctaaagggaaactcttttggctggtgcatagatctgacaaagtgaccgtgagcccagctcagccagtagatattgacgaactgaacgacgatcttgataagttgctgaactga

SEQ ID NO: 7279 - RNA, 1452 nt, synthetic construct
  source 1..1452: mol_type = other RNA
atggataagaatgatatcgctaaagcagcccagttgctcgagacgaaggaggacctccttcacctgctgaacaaaatcaagcaggatgaaatggccgaatgtggcatgtctgacaagttctacccctttaccatgaaacatctcaattactattgcaatcccaataactcctttcacaggtacaagcagttcaaaataaagaagaagagcggcgggtttagactgatcaccgctccacggaaccagtcattcatgctactgctcaggtatgtgaatgagatctttaaagccgtgtacaccccttcagattatgcaatgggattcacggaaaatcggagtgttgtaacaaatgctaatcttcacaagggccgtaactacatcttcaacattgacctgaaagatttctttccctctattcatcaagcgcgcgtgtggaaaaggctgcaactgaagccactgtcgttcaagcagcctattgcaaatgtcgtggccgggctctgctctatgaaggaaaagatggaagacggtagtattcgctatgtgttaccgcagggggctcccaccagccctatcatcactaatatgatttgcgataacctggatcggcgactggctggactagccaagcgatttggagtcgtatactcccggtatgccgacgacattaccttttcaagcatgcataacgtctatcaccccatgggggagttccggaaagagttgaagagaattgtggaatctcaaggcttcgtgatcaacaaggataagacccgactgcagaaactcggctccagacaggaggtaactgggattatcgtgagtgacaaactgaacgtttcccagaaatacgtgagggacattaggaacatactttacatatggagaaagtacggctatgccaccgcatttaacaaatttttcccacgctacaaagacgcaaaaggacacgttaaaaaaggcaatcctgacatggtgaatgtgttagacggtaagttaatgtatctgaaaatggtgaaaggtgaggacgattcagtgtatatgcgcttgaagacacagttcgatgagcttcggcataagctgcataacacaagccaagcgactccacgcggaataacatacgtcgagacaacccccgttttggaatttgaaaagaagaatggtgccacgatcgagatcactcgctccaaaccgagtgagaaggccatcgaaccatttgtcagccacagatacgccactttccctcttggcggaaagagacagtgggcgtctgtcaacaaaacacttaagccagaggaagaaactcagaaggatctcttggcaatcagccactgtcgtgacgctaacgggaagctcttctggctgattcaccgtgctgataaaatgatggttaggcctcccgagtccgtcaacatagacgagctgaataaagagctcgacgatctactggcctga

SEQ ID NO: 7280 - RNA, 1431 nt, synthetic construct
  source 1..1431: mol_type = other RNA
atggaaacaaaggaggatctacttgatctcttaaacaagatgaagaaagatgagatggccgaatccggcatgtctcacaaattttttcccttcactatgacctaccttaactattactgcaaccccaacaatacgtttcactgctacaagcagtttaaaatacgaaaaaagtccggtgggtttaggcagatcaccgcaccacgcaatcggggcttcatcctgctgctgcactatgttaatgagatattcaaagcggtgtactcaccttccgaccatgctatgggatttacggagggcagatccgttgtaacaaatgccgggatgcataagggacagaattacgtgtttaacattgacttgaaagacttcttcccctcaattcagcaggcgcgggtatggaaaaggatacaactgaaacccctttgtttcaagcaatctattgcaaacatgatcgctgggctgtgttctatgaaggaaatcctcgaggacgggagcaatcgctatgtattgccacaaggagcccccacatccccgattttgactaatatggtatgtgacaaactcgatagacgactggctggcctagccaaaaggttcggcttgaacttttcgaggtatgcagatgacattaccttctcgagcatgcacaatgtgtatcaggggaatggtgagttccgcaaggagctgaaaagaatcattgaagatcagggattcaccataaacgaggcaaagacacgtctgcagaaactaggcagtagacaggaagtcacagggatcatcgtgagtcataagttaaacgtgactcagaagtacgtcagagatatccgcaacattctctacatctggaaaaagtatggatatagcactgccttcaacctcttcttcagtaaatacaagcaggacaaaggccacgtgaagaagggcaaacctgatatggttaatgtgctcagcggcaaattaatgtacctgaagatggtgaagggtgctgaggattcagtgtacgttcggcttaggactcgcttcgatgagctgaccattgcccttaaggatgcgcacaacacaacaacccaaggtgtcacctatgtggaaaccatacctctgctggagtttgagaagaataaccacaccgatgtcgtgatcacgacatttaaagctcgggaggaggtgaacgccgaggacgaaaataaggtgatcgcacaccgttatgcctactttaccctggggggacataaagaactcgcttccgtgaacaagtctctgcggagcgaagaagaaaaagacaagagccctctgtcaatctcctcttgccgagacgccaagggaaagccattttggttgattcataggagcggcaaggtcgtcgttccgactctgtctccagtcaatattgacgaccttaacaatgacctcgacactctgctcagtatctga

SEQ ID NO: 7281 - RNA, 1449 nt, synthetic construct
  source 1..1449: mol_type = other RNA
atggacaagacccatatcattaaacactcgttgcagctgcaacagaaggaagacctcctcaatcttttgaatcagctcaaattcgatgaaatgaatgcgatagggatcggcgacaaatatcatcctttcatccttaagcatatcgattattactgcaacccaaataacacgtttcaccgctacaggcaattcaaaatcaagaagaaaaccggaggcttcagggaaatcactgctccccggaaccgcagttacgttctactgctgcggtacgtcaacgagatcttaaaggccctgtacatgccttccaaatacgccatgggttttacagatgggagatctatcgctacaaacgcaggtaagcacattaacagtaactacatcttcaacattgacctcaaagatttctttccgtcaatcaatagggcaaggatcatcaaaaggctccagattcgcccttttaatttcagcccaaagattgccctcctgattgccggtttgtgttgtatgcgtaaagaactactctctgacgacgggaagatcttttacagttatatattgccccaaggagccccaacatcccctattattacaaatatgatctgcgacaagctcgaccatcagctggctgggttagcaaagcgattcggtttaacctacacccgatatgcagacgatattacctttagcagcaatcacaacgtgtatcacgataatagcatctttagaaaagagctggagcgaattataaagtcccagggctttaacatcaacgaaaagaaaacccgtttgcagaaactaggacatagacaggaggtgaccgggattattgtgtccgataaactgaatgtgtcacagcactatgtgcgggatattcgcaatatactgtacatatgggatagatacggctacaacatcgcttatgcaagattctttagcaagtataaagcggagaaaggccacataaaaaagggcaatccaaacctgattaatgtacttgacggaaagcttatgtatctgaagatgataaagggagagaaggactctgtctatcagcggctttattccaagttcaaaatgctgagcaattacatcgacaacaataacccgatctcaccccagtccgtcaagtatatagagacaatgacaattagcgatttcgaaacgaaaaacaacactgagattgtgttcaagatcgacgataataactcaactcccaagcggtccgcctactttactctgaatcgcactaagatctctatctccatcaagaagaacataagcaactcaaaactgaacaaagagcacctggccatctctacttgcatcgacgctaataacaggcaattttggctcattcatccaattaacgttgaaagaaccccttctcccattgatattgatgccctgaataatgacttggagagtctgcttaatctgcagtacggctga

SEQ ID NO: 7282 - RNA, 1446 nt, synthetic construct
  source 1..1446: mol_type = other RNA
atggatcgtaagcagatcgcacagcaggcctcccaactcaaagacaaaggtgacctcttgaacctgcttaatttaataaagaaggcggaaatagaggatatgggcttcgattcttctatgtatcaccctttcactgagaagcagttgaacttctattgcaaccccaaccacacatttcatagatatcggcagtttaagatcaagaaaaagtcagggggaacccgccaaattacagctccccggactcagagtttcatgatgatgttgagtgcagtcaatgagctctttcgaagcatctataccccttcggaatatgcgatgggctttaccgacgggcgcagcgttgtgacaaatgcgagcgcacatctgggcatggattacatcctgaatattgacctaaaggatttctttccgtcaattcatcaagccagagtgtggaagagattacaagttccaccatttaacttcaaccagccagtggccaacttactggccggcttgtgttgtatgaaggaatcttgcgaggacgaaaatggaaacaaaaaggacgtgtttgtacttcctcagggggctcccacctctcccattatcacgaatatgatctgcgacaagctggattactacctctcccgactcgccaaaaggtttaacatgaattataccaggtacgctgacgacattacttttagcagtatgaggtacgtatattcaaagaaaggtaaattcgtgctggagctcgagaggattattaaggagcaaggattcacaatcaacgaggcaaagacaagactgcagaaaaggggtgatcgtcaggaagtgaccggcataatcgtcagtgataagctgaacgtcacgcagaagtacgttcgcgacgtaagaaatatactctacatgtgggaccgctacggatacaatgtcgcttatggaaaatttttccccaagtataaggaagagaaaggccacgtcaagaaagggaatcctgacctgattaacgtcatagacgggaagttgatgtacctgaagatggtgaaaggtgaaaacgattccgtgtacgagaagctgcatgccaaattccagaagcttgctaacaaggatgtgatttccgagaaaaccaatagcaaaggcgtaacctacctagaaactatcggcgtcaaagagttcgagaagaagaatttcaccacagttacatttgccatctccgagaaaggaaaacactatgcttacttcatgctgaacgataagaaaatgctggtgacggtgaataagactctgactatcgaagaagagcaggataaagacgttctcgcaatctctagctgccgggggaaagacgagaagcctttttggcttatccaccggaaagataaagtgatggtgccaccgccacccgccattgatgtggacgaactgaacgccgaactagactcacttctgaatacctgttga

SEQ ID NO: 7283 - RNA, 1464 nt, synthetic construct
  source 1..1464: mol_type = other RNA
atggaccggaactacatcgcccagcaggcggctaagatggaaactaagcatgatctgttgagcctgcttaatagaatcaaaatctcttggtttgaggatatgggaatgacggtcaaattccatcctttcaccatgaaacagttgaactattacagcaaccccaaccataccttccacaggtactcccagtttaagatcaagaagaaaacagggggctttcgccagattacagccccccgctcgaaaacattcaagttaatgttgatgtgtctgaacgaaatgttcaagagcatttatagtccaagcgattttgctatgggctttacagaaggacggtccgtggtgtcaaatgcatcaatacacaaggggcagaattacatcttcaatatcgacctgaaagactttttccctagcatttatagagtcagagtgcgagcacgtctccaagcaaaaccattttgtttcaatgagaacatagctatgctcctcgctggtctttgcagtatgaagatctcttcaggccataacgatgggagggattacgtcctcccacaagggagccctactagtcccataatcactaacatgatttgcgataacctcgatcgcaggcttgccgggctggcaaagcggttcggtttacggtacagtcgatacgctgacgacatcacctttagcagcatgcataacgtgtatcagaccaatggtgagtttagaactgagctccggcgaataatcgaaggccaaggcttcactatcaatgaagcaaaaacccgcctgcagaaacagggctccaggcaagaagttaccgggctgattgtctctgacaaactgaacgtgacgcagcactatgttcgcgacatcaggaatattctgttcatttgggaacactacggttataatgcggccttcacaagatttttccccaggtataaggcggagaaaggccacgtaaaaaagggagtgcccgacctgattaatgtgcttgacggcaagctcatgtatttgaagatggtgaagggagcagaagactccgtttacatccgtctgttctctaaataccggaccttagccgataaggctcacagtatagataacaccacagaacacggagtaacttatgtggagactattcctctgcacgactttgaggtcaataactcaaccgaggtaattatcgattgggtcgtcccaacctccgatgacgagaatggccagccgaagccaaagaggagaacggcttcatttacactggacggaaagagagtttacgcctctgtaaataagaacgtgaagaaagaggacgaacagaaaaaagagctactggccatttccaattgccgcgatgccaagaacaagcaattctggttgattcattacgtgaataaagtgacagtgccgcctgccgaacccgttaacatcgaggagctatccaatgagctggacgcccttctaaactcttga

SEQ ID NO: 7284 - RNA, 1425 nt, synthetic construct
  source 1..1425: mol_type = other RNA
atggaccgagagtttattataaattatcacggggactttctgaccctgcttaacaaggtgaaaaaggtgatgctggaggagaatgggatgggggacctatttcatccattcagtctcagacagatcacttactattccaaccccaaccacacgaagaatcggtatcagcagttcgagattaaaaaaaagaccggtgggatgaggcttattactgccccacgcaacaagacatttaagatgatcctgcagtgcctcaacgaaatattcaaagcaatctacaccccctcagactacgcaatggggttcacagaaggccgcagttcagttacaaacgcttcaatccataaaaaccagaattacgtgttgaatatcgaccttaaggatttctttcctagcattacgcagtcaagaatctgtaatcggcttcgtactaaacctttcgaattcccggataaaatagctctagtcatttccggcctgtgttgcatgaaaataacaaccaaggatgaaaatggcaatgatgtagtaaggtatgtgctgcctcaaggagccccaactagccctgtcatcaccaatatgatctgcgacaaactggatcggcgcttagccggggttgctaagaggtttggcctgaagtactctcgttatgccgacgacattacttttagctccatgcataacgtctaccaaaaggacggcgagttttggaatgagttgaatcgcgtgattaccgctcagggattctctatcaatgagaagaagacaagactgcagaccaaacgaatgagacaggaagtgactggcatcgtggtaaacaagaaactcaacgtgctgcagaaatacgtgcgcaacattcggaacatcttgtatatctggggcaagtacggattcattgctgcgcagtctaggtttctgcccaaatacaaagcagacaagggtcacgtcaagaagggcaatcctgatatgataaacgttctcgagggaaaattgctgtatctgaagatggtcaaaggagaggacgatagcgtttatcaaaggctccgggagaagttcgatagattgaagaatgacgcactgggaattttaaagaccaacaccttttccaacgtgacatatatcgaaactctcccactttcggattttgaaaacaagaacggtgaagttgtaatcacctacagcgaaaaaaagcacaaacgatacgcgtacttcaatctcgacggcaacaaaaagctcgtgtctgtgagcctagatattacggaggaggaagagaaagccaaggacaatttcgccatttccctgtgtcaagacgccaagggtaagaggttctggctgctgcacaaaaaaacaaaggtcacagtgccgacccccaagcccgtcgatcttgatgagctgaacaacgacctcgatagtttgttaaatatctga

SEQ ID NO: 7285 - RNA, 1452 nt, synthetic construct
  source 1..1452: mol_type = other RNA
atggtgaagaacaccatcgccatgcaggcccggcagattacgtcaaaggaagacctgcttaatctgctaaaccggatgaagatggacgaaatggcagagagcggcatggccgactccttctgtccctttacgatgaaacacataaactattactgcaatcccaacaatgtcttccaccgctacaagcagttctgtatcaagaaaaagtctggaggcacccggcaaatcacggccccaaggaataaatcattccgactgatgctgcagtacgtgaacgagatattcaagtcgctgtacgaacctagtgactacgctatgggttttactgaagggaggagtgtggtgactaacgcgaatatacacaagggacaaaactacgtatttaatatcgacctcaaagacttcttcccttccattgaacaggcacgtgtttggaaacgtctccagctggagcccttgaatttacagaaacaggctgctaatctcctggctggaatgtgtttcatgaaagtgtcctccgaagatggggctgtcaagtttgttttgccgcagggagcccctactagtccaatcttaacaaacatgatttgcgataagcttgacagaaggctggggggcctcgcaaaacggtttggcctgcactatagtcgttacgccgatgatataacctttagcagcatgcacaatgtctacaaaatggatggagcgttccgcaaagagttggagcgcattattaacgaccagggctttaaaatgaacccggagaagactagactgcaaaagctcggggccagacaggaagtaacagggctcattgtctcagataaacttaacgttacccagaaatatgtgagggatattcgaaacatcctgtatatttggagcagatacgggtacgatactgctttcaacaagtttttccctaagtacaaggctgaaaagggtcatgtcaagaagggaaaccccgacatggccaatgtactggacggcaagctcatgtatttgaagatggtgaaaggcgaagatgacggcgtgtatctcagactgaaaaccaaattcgatattcttgccagaaggctgaacgacacatccaatgcgtctgcccgcggtgtgacatatgtcgagacaactgcactactggactttgagaagaaaaatggaacatctatcgaaatcactatgtctaagcgcccagagaatgccaccgagtcatttacaccccataggtatgcaatctttacccttgggggtaaaaaccatatggcttccgttaataagaccttgaaacctgaggaggagaagcgcaaagatatccttagcataagccactgccgggatgcaaagggcaaacaattctggctgatccatcgaaccgacaaggtgatggtgcggccagacgagctggtgaatatcgatgagctcaacaaggaattggacgatctattatcttga

SEQ ID NO: 7286 - RNA, 1227 nt, synthetic construct
  source 1..1227: mol_type = other RNA
atggacagagaggagatagcgaacacaatccgtttgatcgaaacaaaaaacgattttctggagctgctgaaccgaattaaaagagagaacatcgatttcgcagacaaccaggatcagaagacctatccatttaccatgcggcaacttaacttctacataaaccccaaacataccacaggcagatacaaggagttctacatcaagaagaagtcaggaggcatgcgtcggataacggcaccacgcacaaaaacctttcaattaatgttaagcgccgtgaacgagatcctcaaagccgtctacgtgcctactcagttcgccacaggttttgtggaaggccgctctatcgttgacaacgctgtcccacaccagaatcagtattatgtgttcaacacagacctgaaggactttttcccgtctattgatcaggcccgcgtgtggaaacgcctccaagtgaagccttacatttttcccgaaaagatcgccaatctcatcgctggtctatgctctatgcaaatgatctccaaagaagatggagaagacactataaggtatgttctaccgcagggagcccctacgtcacccattttgaccaatatgatttgtgaaaggctggatcgacagctcgctggtcttgcaaagagatacgggctgcggtacacccggtacgcggatgacattaccttctcgagtcttcacaatatttatcaggagggaggcgagttcagaaaggaactggagcatatcatcaaagagcagaggtttactatcaacaatgagaaaactcgactgcagaaggccggcgagaggcaggaggttactgggctcgtcgtaaaccaacgggtcaatgtgccaaatcagtacgtgcgcaatattcgtaacttattgtacatttgggacaggtatgggtatgatgttgcttacaattgctttctgcctaagtatcagaaagaaaaaggacacgtaaagaaagagaagccaaatttgagcaatgtgatcgaaggtaagctgctgtatctcaaaatggtcaagggggagaacgatcccgtttacagaaggctgttcgacaagttcaattcccttaccactcccgaccatgcacaagagattgaaatgtccgaaggcgtaagcatagagcagcttgtggctctcatggaacctgacattagtgacatcgataagctgaacaatgatctggacgaactgttgatgcggagctatggcgggtga

SEQ ID NO: 7287 - RNA, 1200 nt, synthetic construct
  source 1..1200: mol_type = other RNA
atggaaaagaaaattttggcaacaaaggtgcgaagtctggccacagtgggagattttttgaccttactcaaccagatgaaacgcgaagatcagggagttgaggaggacccccatcccttcactctcaagcatatcaactactacagaaatccctctcacgagggaagatataggtcatttaagatccctaagaaaagcggcggttgtagggtgatcagtgcccctaggaataagacctttaggttgatccttcgctacgtaaatgagatgctcaaagccctgtataccccaagcgaatacgctatgggtttcgcagaaggcagatctgttgtcactaacgctcagatccacctacggcagaactacgtgttcaataccgacctgaaagacttctttccctccgtggatcaagctcgcgtgtgggctagactacagattaagccgctctccctccagcgaccaattgcggggattattgccggactgtgctctgtcagactggagacagacgaaggaactgtgcgatatgtccttccgcaaggggcccctaccagcccaatcttgactaatatggtttgtgatactctggatcgccgtctgggtggcgttgcaaagcgctttggtctgcgctattcaagatacgccgatgacataaccttctccagtatgcacaacgtatacgaggtggggggcgatttcagatccgagttgcggaggattgtcgaagaccagcgatttgtcatcaacgagaagaaaacgcgcctccagaagcggggggctagacaagaagtgacagggctcacggtcggtgagcgtctgaacgtgccccaatcgtacgttcgggggattcggaacttgctgtatatctggaggaagtatggcgagggcgaggcgagggctcggtttgaagagagctatatggccgaaaaggggcatctacgtgagaaatgccctgacatgatactggtactggagggaaaactgtgctacctgcggatggtcaaaggccccaacgattcagtgtacaggcggctgtccaccgacttcgaccgacttctccacgcggatgagggcgctgtggagcctcttccatctggcggagaaaggctgttagccgaaggcttagcacttacagcaagcgccccagtggatctcgaagccttaaatttcgacctggaccagcttctgaataatgggtga

SEQ ID NO: 7288 - RNA, 1611 nt, synthetic construct
  source 1..1611: mol_type = other RNA
atggacaagcagaccgtgattaataaagcacaggacctggaaacacggcatgatctgctgaacctcctgaacgagatcaaagcggatatgcttggaagtgccgcctaccccttcagcatgaaaaagttactgattctttgtaaccccaaaaacgacggggataagaagcaggagaggtacaggaccttcagtattccgaagaaaagcggaggtgagagaactatctccgctccctgtggaaaccttaaatggatgcaactctgcttgaacgagatattcaaagctttgtatacatccagtccatacgcaatgggattcgccgaggggcgctcaatcgttgataatgcacggatgcataccaaccagaattatgtgttcaatatcgatctcaaagacttttttccctcaattgaccagaccagggtatggaaacggttacagcttgccccgttcaatttcaatccaaagatcgcctccattatcgccggcttgtgcagcatgcgcactattagataccgtgagaacctaccttttgaggaagccttcgtgctcccccaaggtgctcccacatctcctctgctgacaaatgctatctgcgacactttggatcggagattacacggcttagcgaagcggtttggcctgcattacagtcgatacgccgacgatatcaccttttcaagcatgcacaatgtgtatcagcccggctcggacttcagaaaggagctggagaggataatttttgaccagcgctttacgatcaacgccaaaaagactaggctacagcactgttctgttcgacaagaagtgacgggaatcactgtcggccagaagctgaatgtgacccgcaagtacgtcaaagacgtccgagcgattttgcacatatgggagaagtatgggatcaatgcagcctacgctaccttttatccgcgctataaatccgagaagtgccagctccatcgaggcgaaccaaacctggaaaacgtcatcagcggtaagctttgctatcttaagatggtgaaaggggagacagatccagcatacgcaaggctaagtgcccagttttctcgtctcactagctccgcaaatcctacccagaagcctcgcgacattgactatctcttcacaatgccactgcttgcttttgaaaaaaagttgggatgtaagctggaatatagaacaaggacgcatgacaacaagccttacgcctgtttccacttccaagacagatttttcgtggtcgccgtttcaaaaaatttggatgtgaacaacctccctgaaaacgtcgaaatatccctcacccggatggcggttccaattccattctacctggctccaggtgagcctatccccgaggtgaaacctaccaaggctcaagttggctacctgctccacaagccctatactgggaagaagcgtaaagcagtagataatgatcaatccgcttcaacaggggtgcctgactctctgagagagtttgtgctcgatctggctaccaagtttcccaaactgcagctacaggacgaaatgggcataattgccggccagcaggaagacgatatgctgtctcggctggtagatagcaatttcgatctgtctatcctgccatga

SEQ ID NO: 7289 - RNA, 1617 nt, synthetic construct
  source 1..1617: mol_type = other RNA
atggacaaacagactataaaggaaaaggcgaaggcgctggagactaggtttgatctccttaacttactaaatgaggtgaaagccgaccttttgggcagcacagcctatcctttcactatgaagaagctcctgatcttttgtaaccctaagaacgacggggagaaaaagcaggagaggtatcgatcttttagcatccctaaaaaaagtggaggtgagaggacaatctctgcaccttgtggcaatctgaagtggatgcagctgtgcattaatgaaattttccaggccctctactcccccagtccctacgcaatggggttcgctgagggtcggagcatagtcgataatgctcgaatgcacacaaaccagaactatgtctttaacattgatcttaaggacttcttcccctctatagacatcaaaagggtctggaatcggctgcagagagcaccctttaatttcaatgcaaaggtggcctatactatcgccggattatgtactatgcgtacaatccactatcgtgaggatctgccttttgaagaggcattcgtgcttccacagggagcccctaccagtccactgctcacaaatgccatttgcgatacattagatcgcaggctgcatggactggcaaagagatttggcctccattactctaggtatgctgacgatattacattcagctccatgcataacgtgtaccaaccggatggcgatttcagaaaagagctcgaacggataattaccacgcagaggttcatgattaatgctaagaaaaccagactccaacactgcagtgttcgccaggaggtgacagggatcaccgttggccagaaattgaacgtgtctcgaaagtacgtgaaggatgttcgagctatccttcatatctgggagaagtacggaatcaacgccgcctatgccaccttttaccccagatataagagcgaaaaatgccagctgcaccgtggtgagccaaacatcgtcaatgtcatctcaggcaagctgtgctacctaaagatggtaaaaggagaaagcgacagtgtctacacgaagctcttcgcgcaattcactcgcctaacctctaccgaaaaaccagttactaagcctaatgacatcgactacctgtttaccatgcccttgatagcgtttgagaaaaaacttgggtgtaagttagaatatcgcacgcggtcacatgacaacaagccttacgcctgttttaatttccaggatcggttcttcattgtcgccgtatcaaaaaacatcgacattaataacctgcccggaaatgtggaaatctcattgacccgcatggctgcaccattgcccttttatgtggctgaaggggacccgattccagagattaaaccaactaagattcaggtaggttacctgttgcacaaacactataccggcaaaaagcggaagaatgagatagtgacaattacctccgatgagtccaacgacgtttcggatggcctgcgcgaatttgtgctcgggctcgctgagcaataccccgaattccagtttagagacgacatgggcatcatcgaatcccaacaggagaacgatattctgagcagactggtggactccaacttcgacctgtccatcctgccgtga

SEQ ID NO: 7290 - RNA, 1617 nt, synthetic construct
  source 1..1617: mol_type = other RNA
atggataaacagaccctgattgaaaaggcccaggcactcgaaactcggcgggatctcctgaaactcttaaacgaggtgaaagcagagctccttggctctagcgcctatcccttcaccatgaagaagcttctgatcctttgtaaccctaagaatgacggtgataagaaacaggaaaggtatcgctccttctcaatccctaaaaaatcgggtggcgagcggacaatctctgccccctgtggcaacctgaagtggatgcagctctgcctaaacgagatcttcaaggcactgtacaccgctagcccatatgccatggggtttgtcgaaggccgctccatagtagacaacgcacgcatgcacacaaatcaaaactacgtgttcaacattgacctcaaggacttctttcccagcatcgaccaagctagggtctggaagcgtttacagctcagtccgtttaattttaacgccaaggtcgctagcgtcattactgggttatgctgtatgagaacaatacggtaccgggtggatctgcccttcgaagaggcatttgttctccctcaaggagcgcccactagcccactgctgacaaatgcgatttgcgacactttggacagacgcttgcatggactggctaaacgctttggtttacactactctagatatgccgacgatatcaccttcagtagtatgcagaacgtgtatcagcccaatggcgatttccgtaaagaattggagaggatcatctctgatcagcactttaccatcaattctaagaaaaccaggctgcaacactgctcccagagacaagaggttactggaattactgtgggtcagaaactgaacgtggccagaaaatacgttaaggatgtacgagcccttctgcatatatgggagaagtatgggattaatgctgcgtatgctaccttttacccaaggtacaagagcgagaagtgtcagctgcatagaggggagcctaacatcgtgaatgtgatatctggcaagttgtgctacttgaaaatggtcaaaggggaaaccgatccagtgtatacgaagctcttcgcgcagtttacacggctcacaagcactgaaaatcccgtggcccaaactaaagatatcgactacctgttcacgattccgttaatcgccttcgaaaagaaactagggtgtaaactggagtaccgaaccaggattcacgataacaagccttatgcctgcttccagtttcaggacaggttctttattgttgctgtcagtaagaatctcgatattaacaatctgcccggcaacgtggagatatccctcgttcatacggcacactacaatacaaatttccatagtagcgaggacaccgatttgaactttaaaatctcccagcttaaagtgggatacctgcttcacaagcactatacaggaaagaagcgaattgacgaagcttcagcaccatccccaaatacaaccctggacgtccctgactcactgcgtgaattcgtgctgggactggccgaacagtttccagagcttcagctaagagacgacatgggcatcattgagtcccagcaagagacggacatactgtcacgcttggtagattcgaacttcgatctgtcaatcctaccttga

SEQ ID NO: 7291 - RNA, 1593 nt, synthetic construct
  source 1..1593: mol_type = other RNA
atggataaggagacacttgtgtcaaaggctagggctctggagacacccaaggattttctgtacctcatgaatgaaattaaggccgacctactgggggataactcatatcctttcagtgtccgccagttgcatatactctgcaaccccaaaaatgataagaaaaggtacttcagcttcgagatcccaaaaaagagcggcgaatccaggcaaatctgtacccctagcggcaacctgaaatggtttcagatttgcctgaacgagttgtttaaagccctgtatactccatccccatacgccatgggatttgctgtagggaagtcgatcgtggacaacgccaggatgcacactaatcagaattatgtctttaacatcgacctgaaagacttcttcccttcaattgatcaggccagagtttggaagcgactgcagatcgcacctttcaatttcaatgcaaagatcgcaggaatcatggcagggctgtgttctatcaagtccttgcgttactccggagaagagccatttcaagagtgcttcgttttgccccaaggtgctccgacctctcccttgctgaccaacgccatttgcgatacactggaccgcagactccacggtctagcaaagcgctatggtctacattacagcagatatgcggatgatataactttctcatcgatgcacaatgtgtaccagtccgactctgtgtttcggaaggaactgcagagaataattacagagcagcgcttcactatcaatccaaaaaaaacacggcttaaccactgttctctgcgtcaggaggtgacgggccttaccgtgggtcttaaaatcaatgtctcaagaaagtacgtgaaggatatcagagccatcctacatatctgggagaagtacggctataacgccgcctatgctactttctatccgcggtacaagtccgaaaagtgtcagctccacagaggggagcctaacctggagaacgtgattagtgggaaactctgctatttaaagatggtgaagggcgaatccgaccccgtctattctaaactgtactcccaattcattcgactgaccgaagcaaccattatcgcacaagataagcacaacatagactacctttttactatgtcaaagtgcgacttcgaaaataaattaggcgtgagcattgaattccgggagcgcgccgacgacaaaaaaaaatacggctgtttctacttccaggacaggttttttgtggtagcggtcagtaagaacatcgacatcaataacctcccagagaacttacagatttctctgacccgcatgcagaagcccgtagaattttatttaaggccgggagaacctagggctgctgcgcttcccacaattacccggatcggatatctccttcataagcctctccggggctacaaacccgagcccaaagctgggaacattagcaatgatatatctaacgagctgaagagctttgttataaatctggccaatacgtacccagagctccagttgaaagacgatatgggaattattgaaagcagtaacgaggataatctcctcgcccgattggttcagagcaattttgacctgagtatcctgccttga

SEQ ID NO: 7292 - RNA, 1542 nt, synthetic construct
  source 1..1542: mol_type = other RNA
atggagaaaagataccttaccgaaaaggcgcaggctctgaatactacagtggatctgttcaaccttctgaacgaaataaaatgtgacattcttggagacaactctttcccttttaagtggaatcggttcctggctctgtccactccgggtgactacctgcatcggtactattctttcaaaatccctaagaagagcggcggctttagatcaatatatgccccgctctacaatctgcggtggatccagatatgcctcaatgaaatctttaaagctatctacaccccatctccatatgctatggggtttgcagccgggagaagtattgtagataatgcacgaatgcataccaaccaaaattacgtgttcaatattgacttgcaggactttttccacagcatcgatcgacatcgtgtctacaagcgcttacagtttgccccctttaatttcaaccccgaaattgccaacgtgattgccggcttttgtacaatcaagtcttttgttcgctctggcgggagtagctcgatcgattgttatgtgctgcctcagggcgctccaaccagtcctctcctgacaaacgccatttgcgacactttggaccggcgtttgcagggactggctaaaagattcggactgcactactcacgctacgcagacgatattaccttttcctccatgcacaatgtttaccaggagcagagcgagtttaggcaggaattagagaggataattgcggatcagggttttactatcaatccaaagaagacgagactgagccattgttccaagcgccaagaagtcaccggactcgtggtgtcccaaaaagttaacgtgaaccccaaattcgtcaaagatatccgagcaatcctccacatctgggagaagtacgggtataatgcagcctacagctccttctatcctaagtatctcagcgaaaagtgccaacttaaccgcggctatatgaacctagccaacgtcatcagtgggaagctgtgctttctcaaaatggtaaagggagccaaagaccccatctacattaagttgaacgagcaatttgcatcgatcctgaagtcacagaaatcaacgaagggcgagagtgaacggatcaaatatcttatgacaatgaccaagagagacttcgagaaaaagatcggaaccaaaattcacttcaatcggtctaggtatgatgctaagatttacggctatttctactaccacggtaaatcatttctggtggccgtcagccagaatctcgatataacaaatctgccagacgagactcagatatctttgtgcgaattcgttaagtatctcgactgtgagtatgatagcgatcccaggaaactaaagtcctcccaaaggtattacggtgtggtataccttttacacaagccacattacggcttgaacatgaagaacaagaagattcccaaacaggtgaaagagatggtgatcaatttcgcgaataggttccctgaactggagctaaaagacgagttcgggattatcgatgagtataacaagacacagattgacaaaaactga

SEQ ID NO: 7293 - RNA, 1635 nt, synthetic construct
  source 1..1635: mol_type = other RNA
atggacaaggaattactgataagcaagattcggaataccactacccgatggaagttactcgacctccttaacgagatcaaggcagaccttgctggcactgccgcctaccctttcactatgtctaagatgatgagactctgtaacccccgaattggactggatcgctaccactcattcgaaatccccaagaaatctggtggcgtcagactgatctttgcccccgaaggcaatctcaaatggatgcaactctgtttgaacgagatcttcaaagcactgtacaccccgtctccctacgctatgggcttcacccaggggcgaagtatcgtgagcaatgccgtgaggcacttgcatcagaactacgtttttaatatagacctctgcgacttctttcccagtatctcccaagctagggtgtggaaacgcctgcagttgcctccattcaatttcaccaaggatgttgcttcagtagtggcgggcctgtgtagcatccgcatgctagacatagttgatgggaatgtccggttagtgtcatacaaacttccacagggggcccctacgtcgccattgctgacaaacgccatctgcgatactctggataggcgactggccggactggccagaaggtttggactacactacactcggtacgctgacgacattacattttctagcatgcacaacgtctatcaagacggctctcccttcagacacgaactggaacgcattgtaagcggccagcattttaaaataaacgctaagaagaccagactaaaccatcgcggggagaggcaggaggtaactggactcacagtcggagaaaaagtcaatgtcgcccgtcggtacgtgaaagatgtgcgggccattctgcacatttgggaaaggtatgggatgaatgcagcagtcgcgaagttctacccccggtataaaacagagaaaggtagtctgcacaacggcgacccagatatggaaaacgttatcgccggaaagttatgttatttgaagatggtgaagggacagcatgaccctgtgtatgtgaaattacaggagcagttcgatagactgacgtcagcgaagcctgaggctcatgacttggaaatttcctgggagtacttgcaaacgctgcccacatccgattttgaggcgcagctgggggtgaaaattgactacggaattagcaatctcggcaagcagtacgcctcctttgttttcaacgggaaaaagatctatgcatctgtgagtaggaatatctccatctccaacctcccaaagagtctttacatcagcctctgcagacagatcgattataaggtcaagtatactggggaagccagccagaggcacgccgtgatcgacccaggcacaccttatggccgtatgatgctgggttgcccccttcctgaggacctggctgtccgctatatttacgttgtacaccgggcccttccgaaggacaaacccctcaagtatgtgcatacccctcaggtggcaccggagctgaaagatatagtggggaagctcaatgagctgatgccaggcgcactgacagctgatggtgctctgctggcaggtgatcgtcctaaagataccctaacccaattggtggagtccggatttgacctgtcaattcttccatga

SEQ ID NO: 7294 - RNA, 1635 nt, synthetic construct
  source 1..1635: mol_type = other RNA
atggacaaggaactgctggtcagcaagatacggtcgactaccactagaatggagttgctggacttgctgaacgaaattaaagtcgacctcgccggcagtgccgcatacccattcacaatgcagaagatgatgagactgtgcaatcccaaactgggagaaaacagatatagaaggtttgaaatacccaagaaaagcggaggagtgcggacaatcttcgcccccaacggcaatctgaaatggatgcagctgtgcctcaatgaaatttttaagactctgtacaccccttcctcctatgcaatgggcttcactcagggcagatccattgtcgataacgctaaaaagcacctaaaccacaattacgtgttcaatattgacttatctgacttcttcccttctattgaccaagcgcgtgtgtggaagcggcttcagatgccaccattcagtttttccaaagagattgccaatgtgattgctgggctttgtgccatcgagatggtttatgatgaggacgacaaggatcccgtgaaaacctacaagttgccacagggcgcaccgaccagtcctttactcacaaatgcgatatgtgatacactagacaggagactggccgggctcgccaaacgattcggcctgcattatacaaggtatgctgatgatatcacgttctcatctctgcacaacgtataccaggagggttctgcatttcggaacgagctggaacgcattgttatcgggcaaaactttcgaatcaatccgaggaaaacaaggttgcaacataggagcaaacgtcaagaagtcaccggtctgtcagtgggagaaaagatcaatgtttgcagaatgtacgtgaaggatctgcgcgccctcttgcatatttgggaaaagtatggcatcaacgctgcaatcgctaagttttacccccgctacaaggctgagaagggatatatacataaaggggagcctaatattgagaacgtcctctccggtaagctttgttacctgaaaatggtaaaggggaagtttgatcctgtgtattgcaggctacaggagcagttcaataggttaacgttgaccagtacgaataaaaagaacgtcgaactgagttgggaataccttcagaccacacctgtaaatgattttgagacacagctgggggtcaagatcgagtacgcggtgagcaagcggggcaaaccctactcatattttatgctcaaaggtgagcgtattatgatctccgtgtctcagaacattagcatcgacaaactcccaaagaacctctacatatcgttatgccgccaggttgattacaagctccgctatactaaacaacagttctctgtgcccgaggtgatcgacaacactaccgcctacggccgaatgaaattgggatgtccacgcatggaggacctggcagttcggtatctttatgtgatacaccgacagctaccgaagaatcaccccagcaagtacatccggacccctgaggtgactcccgagctgaaagacgtcgttaacaaacttagcgaactgatcccaagcttattcgatgtagactgtgtgcaggccaccgacgtggagcctaaggatactctgaccagactggtcgaatccgggtttgatctctcaatcctttcatga

SEQ ID NO: 7295 - RNA, 1635 nt, synthetic construct
  source 1..1635: mol_type = other RNA
atggataaagaactgctgattagcaagatccagaacaccaccactcggtgggagctgctcaatctgctcaatgaaattaaggctgatctagtgtcaagtaccgcgtaccccttcaccattcaaaaaatgatgcgtctttgcaatcccaagctgggaaataatcggtaccgaaaattcgaaatcccaaagaagtccggaggcgtaagaactattttcgcccctaacggcaacctcaagtggatgcagctgtgtctcaatgaaatctttaaagccctatacaccccatctccatatgcaatgggttttgtggagggtcgatcgatagttaacaatgcagaaaagcatctgaagcagaattacgtattcaacatcgatctcagcgattttttcccatctatcgaccaggcaagagtatggagacggctccagctgcccccgtttaactttagtaaagaggtcgcaaatatcatagccggtctatgttccattgagatgaaaaaagagggggacgagacaccgcccgttaagagctataagctgcctcaaggggcccccacatctccacttttgacaaatgctatctgtgacacattggataggagacttgctggtctggctaaaaggtttggattgcgttacactcggtatgccgatgacattactttctcatccatgcacaatgtgtatcaaaacgggtcacagttcaggatagaattagagaggattatctccggacaacatttcaagattaaccccaaaaagacccggctgcaccacagaggtcagagacaggaggtcactggactgacagttggcgaaaaaatcaacgtgtgtaggtcctacgtgaaagacattcgggctatcttacacatatgggggaaatatggcattaacgccgctgtcgcaaagttctatccacgctacaaagctgaaaagggctatctgaacaaaggggagccaaacatcgcgaacgtgatctctgggaaactctgctacctcaagatggtgaagggcgaaatggaccctgtgtatagtaggcttaatgatcagttttcaaggttagtggacaccaactccggcgcgaaagatatcgaaatatcctgggaatatttgcagacactttctacagatgactttgagaagcaattgggcgttaaaatcaagttctcagttagcaaacagtccaaacagtacgcctacttcattctgaaagatgagaagatcatggtcagcgtcagtcgcaacatatcgattgatcacttacctaagaatctttacatcagcctctgccgccagatagactacaagctgaaatacaccggggaactgtataccagaccagacgtgatcgacaatagcactgcctatggacgaatgaaactgggctgccctatcccgggcgatcttgccgtccgttacatttacgtgattcatcgcgccatcgcaaaggacaagcccacgaagtatattcatacacctgaggtggcccctgagatcaagaatgttatcaacaagttgaacgagtttatgcccggggctttcaccgtgggacgcgtagagagcacgtctgtcaagcctaaggacacgctgactcgcctcgtggagagtggatttgacctgtctattctgccctga

SEQ ID NO: 7296 - RNA, 1818 nt, synthetic construct
  source 1..1818: mol_type = other RNA
atggaaaacaatgaaatcgtggcccgggtttcaaaaatatccgacgtcgagtctttatacaaattactcgatgacatccgtaagagtgatagagagacttacattcggaagatggactttaccctggcccacatcaaaaggtatgctaatcccaacctgacatacaaaaggttcagccttgtgaatattccaaagaaatctggaggaacaagacaaatttgcataccaaacgttcgcctcggcgttatactccattgcctaaatgaggtgttcaaagccttatatacgcctaacgaattcgccacagccttctgtgttggcagaagcatcgtcaacaacgcaaaggtccacatcggtcataactacgtctacagtatcgacctggaggatttctttgggagcatccagcaggcccgtgtgtggaagaggctgcaactgcctcccttcaacttccgacagcctctcgtcaatgcaatagcagggatgtgttgcgtgaagatgcagcctagtatcaaaaataaccgctcgaccgctgattatatcctgccacaaggtgctcccacctctccgctcctctctaatgctatatgcgacactctggatcggcggctgacagggctggccaagagattcggcctttgttattctaggtacgcggacgatattacattctcctccaatcacaacgtgtttcaggacaatagtgatttttgcaacgagcttaaccgaattatagccgaccagaagtttactatcaatgtcaaaaagacccggctccaaaagcgcggcagtaggcaggaggtgacagggcttattgtgtgtgagaaggttaatctgtgccgtaaatacgtgcgatctatcagacagatcctgtacatctggaaatggtatggagtccatgatgcgtactcctcatacagaaaaaacaacaacatctctgagtacaaaggcgaagaaggattcaaactgatcatactgggcaagctgaattacctcaaaatggtgaagggggaaaccgaccccgtatatatcaagttgcgcactgaatacgacaacattgtgaatggtacctaccaccatcagtcatctagcattcacttcaagttcgtgaatactcaaagcctagaggactttgagtcagagcacgggaggattggcattgccgtggggaaaagcggcaagaggtatgcatattggaagaaactgaatcggtacttgcgatttatctccatttccaacagcattaaggaatttaaccgcgaagatctgtgtatttctgagtgcgctaccgctggaggaggcaagttttatcttttacggaacaagagtaagcgcaaaaaatacactgacgtactggaggcagattttaaaaagtccttgatctgggaaacctgtagcaagctgagccagtcaaagccatatgaatttgacatcgttactatgtggaatagcggtatgtttgatgtaggtgaatactcccacgacgattcgtaccattatattaatatcgcggaaacgcagtataccggaacgtggacaaacctccagcaggaactcacaagagagctgaagaggatctgcttcgatatcaaattcattaatggacagacctcctttattgtgaaagggaagtcaattggccttagtctacaatggccatggaaccccccctatgaggaggagctgaataacaccgcagtattggtgcaggccaagatcccgaagaacaagtatcctgagatggaggcttttataaaatcctacttcgagttggtcgtgtcagaacagatgtattacgacagcttgaatattttctga

SEQ ID NO: 7297 - RNA, 1581 nt, synthetic construct
  source 1..1581: mol_type = other RNA
atggaaaagaacgttatcatcaagagagccagcaatctggagacaaaagaggacctcttgcttctcctgaacgacattgtgaaggatgagctgggtaaagacgatgcctttagcttttctatgaagcagcttatgtactactgtaaccctaataacgtcagaggcagatactctcacttttctatcccaaaaaaatctggcgggtgcaggaacattgcagtgccttcccgaggactcggtaatctgctgcactacgtgaatatcatgctaaaggccatttatcagcccagcgattacgctatgggcttcgtcgagggcaggtgtgtagtcgataacgctatgcgccacgtgggccaaaactatatattcaacactgacctcgagaatttcttccccagcattgaacaacctcgagtgtggaagcgctttcaattatccccctttaatttcaagcgtccgatagccaacattctggcaggactgtgctgcattaaagagaagaatgacgacggatcctttatctacgttgtgcctcaaggcgctcccacctctccactgattactaacagtatctgtgacgtgttggaccggcggctgaatggccttgctaggaggttcaacttacattattctagatatgccgatgacataacattctcgtctatgcacaatgtgtataaggttggaggagatttcagaaccgaactcaagcgtatcgttgaggaccagcattttcggatgaaggaatcaaagacgaggttacaaaagatcggggagcgacaggaggtgacaggtttgatagtgtcctcgaaagtcaataccagtgcagcgtacgtggccgagattcgcaacctcttacatatctgggaaaaatacgggtacaatgaagtgtacaagcggttctaccctaagtataaggcagacaagggctatatcaaaaaaggtgaaccactgttggagaatgtgctgtacgggaagctccagtacctgaaaatggtaaaggggtacaaagatagtgtctatgccgctctccaggcaagatatgaccggctgaccagtcccattaatgcctcctcagagcagaaatatgattacttgcgctcctttacactcgccgaattcgaggagattgtcggcaaccagattcggtattccctgtccaaaaacggaaatctttacgggagggtgaacctaaatgacaatgacatcatcgtgagcatcacaaacgctgcgaaagttcagctggtcaaaaacaagatcatcaccgatgaatcaatgattgctagcgtcaaaactagcaagtcaactatcccagccaacagtcgccccgggctttacgtagtccttacggcgaagaatggcaaaagcctattttggatgatgacctattacgatccgactgtgaccgacatcgatctgtcatctgtatcagtgagcgagttggttgatatatgggagcaggaaggaatcaacgctgccattgaggcatatgaaaacggaatactgttcaaacaggataataagtcctttgaaaagctgaaaggtgggaagcagaagttctatcgtccaagtagcttttga

SEQ ID NO: 7298 - RNA, 1785 nt, synthetic construct
  source 1..1785: mol_type = other RNA
atggaaaagtctgagatcagaaagcgggcaaccgagatcgaaagtaaagaggacctgcttctcctgttgaatgatattgtgaaggatgagttgggaaaggacgatgccttctcttttagtatgcagcagctgaactactactctaacccaaataacgtgaggggtagataccaccatttctccatacccaaaaagtccggcggaaagcggaatattgcggctccatcaaaagggctgggacacattctatattacgtcaacatcctgctcaaaagcatctatcagcccagtgatttcgccatgggctttgtggaaggccgctgcgttgtagacaatgctatgcgccatatcggccagaactacgtgtttaacactgacctcgagaacttttttccgagcattgaacaacctagggtatggaagcgatttcagctgaaaccgttcaacttcaaacaacccattgcaaatctgctggccggtttgtgttgcatcaaagaaaaacacgatgacggcacctttaaatacgtcgttccacaaggagcccctacgtccccactgatcactaatgcaatttgtgacaccctggaccggaggctcaatggtcttgcaagacgttttaaccttcattattcccgttatgccgatgatattacctttagctcgatgcgcaatgtctttaaggccggcggcgacttcaggatggagctgaaacggatcatcgagggccagaatttcaagatgaatgaggctaagacgagactgcaaaagaaaggcgaacggcaggaggtcacagggctgacagtctctaataaggttaacacttcatcagcctatgtggctgaaattagaaacattctgcacatctgggaaaagttcgggtataatgatgcctacaagcgattttacccaaaatacaaggaatccaaggggcacgttaagaagggagagccactgcttgagaatgtcctttatggcaagttacagtacttgaagatggtgaaaggggtgaaagaccctgtctatgtggctcttcaggcaaggtatgacaaactaacatcccctgtaaacgcggaagtcaagcagaaatatgattacttgcgaagtttcactctcgcagaatttgaggagatcgtggagtgccaaatctcatacgcgctcagtaaagaagacaacctgtacgggaaggtgatcttaaacggcaaggacatcattatctctatatcaaacgaggctaagacacagctcgtgaagaacaagattgtgactgacgaggccctcgtcgcatccgtcaagcctattaagaacgtaatttcggtgaatagcaaacctggactatacgttgtgctgaccgccaagaatggaaaggcccccttctggatgatgacctattatgatcccacagttactgatattgacctctctcaggtaagtgtggctgaactcgtgaatatctgggagaaaaacggtatcgacgccgcaataaaagcttacgaggacgggatactgttaacctcagaggacgccagcatggccaacaaaaacagcaaggacaaaaaaaacacccccatgcagaagcgcaaatctgctagcagcaaagacgagtccgtgtacatgggggacatcgatttcatagatgtggccgatattgcggcaatagaagaagaaatcaagagcggaaacctgggtgaggttaagctgtctttcagcaaaaatgacgaagctgataattcaggcaatgatgagttagatacaataatcgatgaggggtccttcgatgacttgtga

SEQ ID NO: 7299 - RNA, 1779 nt, synthetic construct
  source 1..1779: mol_type = other RNA
atggagaagtctgtgataagaaaacgcgccgcagaactccagagcaaggaggacctgcttctccttctgaatgaaatcgtgaaggacgaattaggcaaggatgacgccttttcctttagtatgcagcagcttacctattacagcaatcctaataatgtacgaggtcgataccggcacttttccatcccgaagaagtctggcgggaagcgcaatatcgctgccccttcaaaggggttgggccatattctctactacgtgaacatcttactgaaggctatttaccagccttccgactatgcaatggggttcgtggaggggagatcggtggttgataacgcgatccgccacatcggccaaaattatgtcttcaacaccgacatcgaaaattttttcccctctattgagcagccacgggtctggaagcgctttcagctcaagccctttaactttaaaaaaccaatcgccaacatcttggctggcctgtgctgcattaaagaaaagaatgatgatggcaccgtgaagtacattctgcctcaaggagcacccactagtccgctaataacaaacgccatttgtgacacactggacaggaggctctctggtctggccaggcgtttcaacctgcattatagccggtacgccgacgatattaccttttccagtatgcacaacgtctataaagaggacggggacttccggaccgaattgaaaaggataatagagggccaaaatttcacgatgaacgaggctaaaacaagattacagaagatcggagaacggcaggaggtgactggtctaacaatttcgaacaaggtcaacgcatcaaccgcatatgtcgccgagatacgaaatctcttgcatatttgggagaaatacggatacaatgaggcgtataagcgcttctatcccatttataaggagtcaaaaggtcacgtgaagaaaggagagccacttcttgaaaacgtattatacggcaagctgcagtatctgaaaatggtgaagggttacaaagatcccgtctatgccgcactgcaggcacgttacgacaaactgacatcccctgttaacgccgaggtggaacagaaattcgactatcttagatccttcaccctcgctgagtttgaagagattgtagatggtcaaatcaattacgccttgtctaaggagggaaacctgtatgggaaagtggtcctgaacggcaaggatatcatcatcagtatcagcaacgatgctaaatctcaactcgtgaaaaataagatcgttaccgacgagacgctggttgcttcagtaaagcccacaaagagcgcaatacctgttaacagcaaaccaggactgtacgttgtcttgactgccaaaaatggaagagtaccattttggatgatgacttactacgaccccacggtcaccgacattgacctatcagaagtgcccgtgaccgaacttgttaatatctgggaaaagaatgggatagatgccgcgatcgaggcttacgagaacggaattctgctcaagggggaaggcgccaacaaagcggccaaggatgctaagggcaagaaaaaaactaaaaaacctcagaagggggtgttcctgccaagtatgtccgaaagcgtctccctggatgtggactatatcgatgtggctgacattgccgcagtggaggaggagattaggtcaggaaaaccaactaagctgtctagtagcttcacagacgagtacaatgatctcgattctgatgaattggacactatcgtggatgaaggcagcttcgatgacctgtga

SEQ ID NO: 7300 - RNA, 1689 nt, synthetic construct
  source 1..1689: mol_type = other RNA
atggagaaacgagaaattgcccagcgggccagcatgttgcagaacaaagaggaccttctccagctattgaacgacattctgaaagatgaaatcagctccgatcactccttctcctttagtatgcgccaattgagttactactgtaatcccaataacgtgagaggtaggtatcgtcactttagcatacccaaaaaaagcgggggccagaggcacatatcagctccaagcagaggactctcacatattctgtactatgtgaacatcatgctcaaggcggtgtacctgccatccgactatgctatgggcttcgtggaagggcgttcagtagtcgataatgcttctcggcatattgggcagaattatgtgttcaacacagacctggaaaactttttcccatcaatcgcccaacccagagtctggaagaggttccaacttgcacctttcaactttaaccagcaaatagcttctattctggccgggctatgctgcatcagggaaaagcaggaggacggcaaatttaccttcatcttaccacagggcgctccgacttcgcctttaatcactaacgccatctgcgacaaacttgacagacggctgagtggactcgcacgcaggtttagactgcattacagtaggtatgccgatgatataaccttttcttcaatgtgtaacgtgtaccatgagaatggcgactttcgaactgaactgaagcgaattattgaagatcagggtttccatatgaatatcgcgaagacacgattgcagaaaagaggcgagcgccaggaggttaccggattaactgtctctaatcgcgtaaatacctctcgcgagtacgtcgccgaaatccggaacctgctccacatttgggagaagtatggttacaatgatgttttcaaacggttctatccgcagtataaagccaacaaaggccacgttaagaaaggggagccgatgcttgaaaacgtgctctacgggaaacttcagtatctgaaaatggttaagggttacaaggatcccgtctacgccgcactacaagcccggtatgacagactcacaagccctgtgaacgctgaagcaaagcaggggttggactacctccggagttttactattgccgaattcgaggagatcgtgggatcccctatctcgtactatctgtccaaagacaacaaaatttacggcaaatcaatgctgaatggcaaggagatagctatatccattacgagggctgcaaagcaccaactcgcgaagtcaaagatcatcaccgatgaaagcctgctggccagcataaagcctgttaaatataacgtgaccgctaattctaatcccggactcttcgtggtcttggccgcacgcaatggtcacacccccttctggctgatgacctactatgatccaactgtgacagatattgacatgtctaatgtgccccctacagagcttattaacatctgggaggagaagggaattgatgcagcgatcctggcatacacggagggaaaagaccagggaccaaataagaagcaggagaagtccaagaagaagggcaagcgtagtgagacaaagaagctggtaagcaatatcgacctgctggattttgacatcgatggggctctggacatcgatgatatctctagcttggtcgccgactttgatgaagcctccgcaatttcccttgacgacttatga

SEQ ID NO: 7301 - RNA, 1521 nt, synthetic construct
  source 1..1521: mol_type = other RNA
atggaaaagcgcgagattgtccaccgggcttcccagctgcaaaataaagaggatctgctgcagctgctaaatgatatcgtgaaggatgaactctctaacgaacgggcattcagtttctctctgaaacaattgagctactattgcaatcccaacaacgttcgcggcaggtaccggcactttagcatcccgaaaaagtctggaggccaaagaaatatcgccgctccttcgaggggattgagccacctgttgtactatgtgaatattatgctgaaggctatatacaggccaagcgactatgcaatgggctttgtggaagggagaaacgtggtggataatgcctcacgacatattggccagaactgtgtctttaacactgacctggaaaattttttcccatccattgctcagccccgagtttggaagaggtttcagctcccacctttcaatttcaataagcaggttgcgagtatactagccggactttgctgtattagggagaagcatgtcgatggaaagctcacctatattctgccacagggtgcacccacgagccctctcattacgaacgcgatctgcgacaatcttgatcgtcgtctatcaggattggcgcacagatttgggttacattattcacggtacgccgacgacctgaccttctcgtctatgcataatgtctatcaggaaaacggcgagtttcagacagagctgaagagaatcatcgaaggtcaggggttccgcatgaacatcgggaaaacaagattgcagaagcttggggaacgccaggtggtgacaggactgaccgtgagtaacagagtcaacacctcaagcgaatatgtcgccgagattcgaaatctgctgcacatatgggagaaatacggatataatgacgcctttaagaacttctactcacactacaaagacaagaaagggcatatcaagaaaggggaacctatgttagagaatgtactctacggtaagctccagtatttaaaaatggtgaaaggctcaaacgaccctgtttatgccgctctgcaagcccgctacgataagttaacttctcctgtcaacgctgaaatcaaacagtccttggattacctccggtcttttactatagccgagttcgaggagatagtgggcagccccattaactaccggcttagtaaggataacaacctttacggtcaggcaatgctcaatggcaaagagatcgccatctctattacaggtgccgctaaacaccaactggctaagtccaagatcataacagacgagacacttctcagttccatcaagccaattaagtatagcgtgacctccaagagcaaacccggactcttcgtagtactgaccgcaaggaatggccacgccccgttttggatgatgacttactacgacccaaccgtaactgatatcgacatgtccaacgtgcccgcctccgagctggtggacatctgggaaaaagagggcattgacgctgcaatcaacgcattcgaggaggggtttctggaagatttcgtttga

SEQ ID NO: 7302 - RNA, 1662 nt, synthetic construct
  source 1..1662: mol_type = other RNA
atggaaaaaagcgagcttctcaagaaaattctcgccctgcagacaaaggaggaccttctacagctgcttaacttaatcgtgaaggatgagttacgacaggagaacgcattcacgttttcaatggcccaactgatgtacttttgcaatccaaataacgtgcgcggcagatatacacacttctccataccgaaaaaactcgggggaaaacggcaaatcgcagcccccaccgctggactgcgcaacattctgtactacatcaacatcatgctgaaggctgtgtacactccaagcgactacgcaatgggattcgtggagggacgcaacgtcgtgagtaatgccaccctccacgtaggcaagaactatgtctttaataccgatcttgagaacttcttcagctctatcgaacagcctagagtttggaagcggctacaattgccaccctttaacttcagccggccaattgccaatataattgcaggcctgtgttgtattcgagaaaaacaggagaatggtcagttcatttatgttttgcctcaaggggcccctacttcgcccctgttgacaaatgccatatgcgactccctcgaccggaaactggcaggcttggcgcggaggtttggtttgcactacagcaggtatgccgatgatatcacattcagttccatgcataatgtatatcagaacaaccgtgaattcatcacagagctcaaacacatcatcattggccagaatttccatataaatgaggcgaaaacgcgtcttcaaaaacacagggagaggcaggaggtgactggcctgactgtaaactcgggcgtgaataccagtaagaagtataaagctgagattagaaacctactacacatttgggaaaagtacggatacaaagaagcctataaaagattctacccccattataaggagacgaaagggcatactaagaagggcgaacctatgttggagaacgtgctgtacgggaagctgcagtacctgaggatggtcaaaggagctaaacatcccgtgtatgttgcattacaggagagatacaataagctgactagccctataaacggccactctaaggaaagttttgactttctccgcgctttcagcctgtcagactttgaaataatgaccaataatcctgtgcaattcgctatctcttcaacccacaatctctatgcctacactatgcttgaggggaagaagatactgatctccctcactaatgcagtcaaggagattctgatcaagaagggagatatcacaaacaatacagctacctctcacgaagaaatcatcaagtcatacatcccctttaactccacaacacagctgtacgtggttctgactgccaagaaagggcatgctccgttctggctcatgaccgactatgatccaacaacgaccggtctgcacttctgctctatgccaatttcccagttaattgatatctgggaaacaaaggggattgacgaggccatcgcgacctatgaaaaaaactctacctttaccaaagtcaagaatatcgagagttccagcgagaaaaacgaatcagtctttgataaattccccattaaggaaaactccgacgaagacattcagtttttgcataagctctttgaggacggtacccagaagaacgataccctgtttaccctttga

SEQ ID NO: 7303 - RNA, 2373 nt, synthetic construct
  source 1..2373: mol_type = other RNA
atggataagggcgagatagcgaagaaagccagaatcctccagaccaaaactgacctgctggctctgttgaatgagattaaagctgacgatttgggcgagaaaggctacccattcgtgctccgccagatcaactattactgtaaccctaagaacacaaaggggaggttcgtgaccttcgcgatcttaaaaaaaagtggtggaatacgcaacatcgccgcacccagcaacgggctcaaaatgctgcagacctatctgaacgttatcctgggcagcctgtatactcccagctcgcacgtaatgggcttcgtgaaagggcggtccgtaataactaacgcctcacgacatctgaatcagaactacgtgtttaacatcgacctgaaggacttcttctcttctatcccacaggcaagagtttggaagaggctgcagctgccccctttctcctttccccaggagattgctaatgttatagctgggctgtgttgcatcgaaatgattgtgcaggatgagcaaggacaggtgagaacaaagtatgtcctgccacaaggcgccccgacgtctcctgttattacaaacatgatttgcgacacgttggaccggaggctgtccggcttagctgccaggtttggcttgaacttttctcgatacgccgatgatatcactttttcaagtctgcactatgtgtattcagagaacggggcttttagaaaggagctgaaacggattgtggaagggcagaacttcactataaatgaagccaaaacacggctgcagaagaagggggatcgacacgaggttacaggactgatagtgagcgatcgcgtaaatgtctcaagaacctacgtacgcaacctacgttccctactatatatttgggaaaaatacgggtatgatgctgcgaacgaaaagttcgtctattattacctggacgacaaacccgcgagctctacttgcatgcctaatatggtgaacgtcattgagggaaagctccagtatttgaaaatggtcaagggtggcgataatcccgtttatctgaacctctactctaagttcgaactcctccagtacatttaccataataaggacaatggtgaagagcaaagcatgagcgatgtggagtccatgctccaccagagctcaatgagcgtggaaggtgttgtcgcccagtggaagaaccgggacatctttagtatcacaggtacgctgttgaatgagtgtaaacgctctgtttcgccgctcattgtcaagaaggtggccgccagcttgatggcatatctctcggcctctctggtgaacaatatcaaaaaacgagcagagctccagtggtacatgctgagggatataaatgatgctatgaatggccagcctcgcacaaggaaaatagacggtgaggaggagaagatccataggccgaagcttgtcgtggcattccttaagcaattcacaagcaccgaaaaccttaagtataccacccacacctgggaacgaatgattgacggcaagtacaagtggaccgactttgatcagttttttcactcctacgagtctgagctaaaggataagacggggtccgggattcctatcttcgacatctacaactgcaacattcacctttacaacctggtgcggaatttcttactcccaccatccaaggaggaatacccatggcagaccgattacgggctcaaattgagttactgtacacctgagggagtcatccagaattggatgaaagagaatcctgataaacaacccatggaaattccactttcagtgtttcccgaatcctatcgccctaagcagagggtgcaaggtcaaaccttagtggactttagagacgtgattgacattttcaagaacgctattgagtaccgggatgacaatttgtattgggacgtcagtgacatcttcaaactaacagactttagtctggacgattcagttcttgatactcttagtggcataaccttttacactgacactattcttgtacgggaagcactcaaaatcattgccgataatatcatcgttcgcccccagcatagacatttgaaagtacaggcaatcaggggaaaggacggagatcagaaatacgtctcattagaaatcctgcacgtcgaatcctttagtaataagagcctggacgatgacaagctgcaacttaaaggcaataagggccagctctccgcagtcaagcaaaagctggtgagcctttgcgatttttccgtggagtctagattccgtaaaggagacgagatgggagactatagaatcgattacttatactctgaagaggtgaatgccgaaccccgtgtgaccaaactggacgccccagctgagggattcaagtatatcctcaaattctacctgtga

SEQ ID NO: 7304 - RNA, 1431 nt, synthetic construct
  source 1..1431: mol_type = other RNA
atggaccttccccagataaaaaagaaggccacagagcttgaaacaaaggaaaatttgctggatttgctgaatgagatcaagcaggaggacctccaggaacaggcttatccattcacaatcaagcagctgaactactactgtaatcctaacagaaccaagaataggtatatcacctttgaaatccccaaaaaggcgggggggactcgggtcatttcctcaccaagtaacggccttaaatccatcctccactaccttaattatatcttacagtcaatccacacaccgagcaagtttgcaatgggctttgtgaaaggcaagtcaattatagacaacgccagccaacacacaaatcagaactacgtgtttaatatcgacctgaaggacttctttccgtcaattcatcaggctcgagtttggaaaaggctgcaacttccccccttcaatttcaacaaggagatcgcctctatcgtagccggactgtgctgcatgaaggtagagccacaggaagaaaacgagaagcccctgtatgtgctgccccagggtgcaccaaccagcccaactatcaccaacataatttgtgataacctggataggcgattgggagggctggcaaagagattcggtttaagatacagtagatatgctgacgacatcactttcagctccatgcataatgtttatcaaaacgactctgacttccggaaggagctagagaggattattaccgatcagcacttcacaatcaatgagaaaaagacccgcttacaaaaactagggagtcgccaagaggtgacgggcctcattgtgtcccataaaattaacgtcactaagaagtacgtgcgcgagatacggagtctcctgtatatgtgggaaaagtatgggtacaatgtagcctattgcaaattcttccctaaatacacagaagagaaaggccgtatttacgaaggtattcctgatttgatctcggtcattgcgggtaaactcatgtacttgaaaatggtcaaaggagacggcgataccatgtacacacggctctttgccaagtttcagaaactggctaacaaagaaactattgccgagaaaaccaatctggcaggagtgacgtatcttggcacgataggcattctggagtttgaaaagtatatctccaccaccatcatttttgagataactgagaaatgcaacctgtacgcctacttcaagttcaacgagaaaaagataatggttagcgtgaacaagtctctcaagcactccctgactttggaagaagctatggataaaggggagcttgcaatctctctctgtcgtggaaaagaaggaaagcctttttggctgatccatcgcaaagataaggttttggtgcctcctctcccactagtggatgtcgacgagctgaatgtgaagttagattctctgctcctgtttagctga

SEQ ID NO: 7305 - RNA, 1521 nt, synthetic construct
  source 1..1521: mol_type = other RNA
atggaacggagcgaaatccactaccaagcctctggagtcaaaactacactggatctggcccagctgctaagcgagattaaagaagacgcactcggcataataaaagctcgagcattccaggagaaacagattacgtactattgcaatccgaagagaaccgacaggaagaggtacatcaattttaccatccccaagaaatccggaggcgaacgcaccatctcagctccagtgaggggcttaaagagcatactcttcagtttgaacacacttctccaagcgttgtatgaaccttctaagtatgctatgggatttactcagggccgatccgtggttgacaatgccaagatccatatcgggcagaggtatatttacaatattgacctcaaggacttctttccctcgatagataagagccgcgtctggaaacgccttacactgcccccatttaactttaactcagatatcgcccacaccatcgccggtctatgcactatgcgcatagtcgaagatggcaaagagcggttcgttcttcctcagggtgcgcccacttccccaatcctgactaacgccatttgtgacaccctggatagaagattaggcgcagttgccaaacggttcggcttgaggtacagccgatacgccgatgacataacatttagtagtatgcactatgtctacggcaaggattcagaatttatcaaggagctgcatcgtgttatcaagtctcaaaatttcaccatcaacgaatcaaaaacacgcctccaatccctggggtatcgccaggaagtgacaggcgtgattatctccgataagatcaatgtcgctaaaagatatacgcgtgagattaaaaccttgctacacatctgggacagatacgggtatatggctgcctgcgagtcttacaccaaaagtcatcatgtgaagaacgataactttaagagagtaggttacccaaagctggagagcgtgatcgctgggaagctccagtacatgaagatggtgaaaggagcagaagacgccgtataccaaaccttgcagaccaaatttagcactcttgtaaaagggattaagaagatcgagtttacaattgggggtcgggatatcgcctaccttcagaccatgacccgggaacagttcaggaaagagaagctggcggacattacaatagacgcaacgaataaagtggcttattatgagttcggagatcagaaacacaatattgtcattagccggtctatttctgaggacattctgagtcagctcgctacttcacctgcaaatgacgaatgttggaataaataccgaatctccctgtgtgagaacaacaatgtgcagttttatctgctccacaagtgcttcaaggagagaaagttccgggtgaggacggatatcaagctggaggacatagacaacatcttcacttacttagattcccctaacaatcgcaacgagaacaacaagatcacagacaaaaagtcctcgaatattttcgagagggtgattggatggctgcgtagatga

SEQ ID NO: 7306 - RNA, 1494 nt, synthetic construct
  source 1..1494: mol_type = other RNA
atgatttcgacggatgagatcaaacacgatttcgcagcgatcgaggcccctaaagacttgttaaacctgttaaacaaggtgaaaagaagtgtgctgggcggcaaataccacccattctcctttgatcagctgttctactattcaaatccaagacgcgaggacgtcgtgagataccatagctttaccatcccaaagagaagcggaggaaccaggaccatttcatcacccgttgctggcctaaaatcaatcctgacaacgttgaacgatatcttccaggctatttaccgtccctccaagcaggcaatgggctttgccgccaaacggagcgtcgtcaccaacgctcagatacatgttgggcaacgctatattttcaacaccgatctgaaggacttctttactagtattaacaggtctagggtgtggcgccggttaacactaaagcctttttctctgtccgatgacattgctgatattgtcgccggcctttgcaccatgcgcgacagagacgcgaacggtcgggtacgatatgtgttgccccagggggcacccacgtctcctatcattacaaatatgatctgcgaccgcctcgatgctaagctagccagattggccaaaaggtttggactgcgatatagcagatatgccgacgacatcaccttcagtagcatgcacttcgtttacggcaaaggtggacgattcatctccgaactgcacgacatcatcaccgccgagggcttcgaaatcaatgatactaagacacgtctgcagcatctgggcataagacaaaaggtcacaggactggtggtcagtgaacgggtgaatgtgtccaaggagtacgctagggaactcaagctcttgattcatatttggcttcggtatgggtatcttcacgctctggacagctacacacaaaagcaccaacacacaaagggggggattgccaatctggaggccatcattaaggggaaacttaattacatgcggatggtgaaaggtgcaaacgacgctatggtacagcgcctgcaggccgcctttaacgaactgaaacacgattcaatcaggctggaacaccgctttgacagctggcttccaactcttacatttaatgccacttatactcgatcggagatagaggccttagagggtatcagcctcaaactgagagttgataccactaaggtgtgtgcttacctcgcaattgatggaaatgagtacccggtaactatcagtcgtcatatatcatccgcgacgaggctggaactcatgcactctgagtctaactctgcagtgtggcgaaaccatcggatttccatatgtagcaatgaggcaggctcctttatcctgctccataagaggctgcggaggtataagccgaaagccgaagctgaaaccgagtcttacaaggtgatcgacatagacacctttatagcgatgctcaatgcaactgagcaggatttccatctcgaaacattgtgcctcaacgcacctttctga

SEQ ID NO: 7307 - RNA, 1512 nt, synthetic construct
  source 1..1512: mol_type = other RNA
atgaataggcaggagatccagcaggcggtggcggcaataaaatccacagaggacttcgtgctactcctcaataaagtcaagagagaagcccttgggggtaaagcctatgacttcaagctgaaacagattacctactactgtgacccgaagcgagaaaacatcgagaggtaccggcatttcaccatccctaaaaagggcggtggcgagcgccaaatatctgcacccgtacctccactgaagagcatactattctccctcaacaccatcctgcaggcaatatatgagccttcgagccacgtaatggggtttgtgcagggacgcagtgttgtcgacaacgcaaaaatgcacattgggcaaacctatgtgtacaatatcgacctcaaagactttttcccctctatagataagtctagggtgtggaagcggttgacattgcccccgatgaacctttccagtgatcttgctcatctcgtggccgggctttgcacaatgcggctggaagaaggtgagaacgttcgttacgtcctgccccagggagctccaacaagcccagttatcaccaacatgatttgcgataacctggacagacagttgctgaagttagccaaacgctttggcctgaggtacagcagatacgctgatgatattacattcagctcaatgcattacgtgtataacgaaaatggtgcttttgtgaaggctctgcgtcggatcattgagaaacagcggttcacgatcaatcccagaaaaacaaggttgcagcagcctaaccagcggcgagaagtgactggcctggtggtttcagataaggtaaacgttacccgccaatacacccgagaactgaaaactcttctccacatctggcaaacttacggatatatggacgctcgcgagtcatacaggcgagccagaatcaagtcgatgactgtatttgacaaaaaagagggctttgaccttgcagccgtcgtgtccggaaagctcttatacatgaaaatggtgaagggggaggatgatcccgtctatcgccgtctgtataagcagtatcgggatgtctacgtgaataagcagagcgaaatctacgaagctcaggcaacatacattgagtatattcagactatgaccaaggccgagttcgaagaaaaaatgcagacgcgcatcagtattaatctggacaagtccctcaattgggctgccacctacggggagggcgagtcaagaggaaggctcagattaagctccaagattaccaaagaagtcctggccgagctagcggccgatactacaggcgaaggcgcttggtctaagtattgcatcagtttgtgtaataacggcgcctctcagttctatatggtccacagaccattggtgccaaaacaatatacgactgccgttaggtttctgatggaagagctccaagccgagctggaggaaatcggaattgacaacctgctggaggagctggacgatttaaaggcaaatcctgagaagctgaatgtggtgaagaccctttga

SEQ ID NO: 7308 - RNA, 1512 nt, synthetic construct
  source 1..1512: mol_type = other RNA
atgaatacccaggagattcgccagaccgtgaaggctatgaaatccacagaggaccttctgcatctacttaaccaggtcaagcaggatgccctcggagataagtcacatcccttccacctgaaacagattacatattactgcaaccccaaacgggagaacgtggttaggtatcgacacttcacaatccccaaaaaagggggcggagagcggcagatttccgctccagtcaatgggctgaaaagcatcctgtttagcctgaacaccatcttacaggccatttacgaacccagttcctacgccatgggctttgttgcaggaagatctgttgtgaacaatgctaaaatgcacatcggtcagcgctacgtgtataacattgacctgaaggactttttccctagtatcgacaagtctagagtttggaagagactaactctcccaccgatgaacttgtcaagcgacctggcacacctggtggccggtttatgtaccatgcgtcttgaagagggtgaaaacgtcagatatgtgctccctcaaggcgcacccacgtctcctgtgattaccaatatgatttgtgatagcctcgaccgtcagttggcaaagttggccaaacgatttggactccggtactccaggtatgctgacgatataacgttcagcagcatgcattatgtctactcggagaacggcgccttcgtgcaggccctgaataaaatcatcgagaagcaacactttaccatcaatccaaggaagacaaggttgcagcaacccaaccaacgccgggaagtgaccgggctcgttgtatcgaacaaggtgaatgtcactcggcaatacactcgtgagctgaagactattttgcacatctgggagaagtacggctatatggcagcgagagagagttatcgaagggcacgcatcaaatccatgacgttcttcgataagaaggacgggtttgatctcgctccggtcgtgcttggcaagctactgtacatgaagatggtgaaaggggagaacgacagtgtgtacaagaggcttatgggacaatatcgggatctcacaaaggcggacaatggggtaacctatcaagcaaaacataccaagctgacttacctgcagacaatggctaaggcggagttcgagagacagctgctcacatctctgatgatagatgtcgaagccccaaagctgcgcaaggtgtacttcgcggaaggcgaatccaacaggtacttgcgcactagcggcaaaatcactgatgaagtgcttgctgagttagccgccgatgtagaaggcgtagggatatggtcaaaatacagaatctctttgtgcgacaatggacattcacagttttacatgctccacaaaaaactggtcgaggtgcagtatacagaagctgttctgcttcagctggaagagctgcaggccgaactcgaagagattggtatagacaatctgatggccgagtttgccaatttccaggctcaccctgaacagtatgaggtcctgttaaccctatga

SEQ ID NO: 7309 - RNA, 1611 nt, synthetic construct
  source 1..1611: mol_type = other RNA
atgggcagagaacagattcgaactgccgctttggaaatcaagaatattaaggacttgcggcgcgttctgaacttggtgaagcgtgacgctcttggagataaagctcaccccttccaccttaagcagatcacatattattcaaatccgcgtcgagccgaagtggttagatacaaagactttactattcccaagaaatgtgggggcgtccggaatattagtgcgcctgtagcaggactgaagtcaatactcacctccctcaataccatcctccaggcaatctacgagcctagcaaatacgctatgggatttgtgccaggacggtccgtggtggataacgccaagatacaccttggtcagaactacatatacaacatcgacctacaggacttttttcccagcatcgataagagccgcgtgtggaaacgcctgacacttccgccattcaattttaccagtgagctggccgatgtgatagccgggttatgtgcaatgagaatggagatcgagggcaatggctctaggtgcgttctgcctcaaggcgcccccacatctcccactctcactaatataatctgcgaaaagctcgataggcagttgggagggctggcaaagaggttcggcgctcgctactctagatatgcggatgacatcacgttcagttcgatgcagtacatctacgccgccgatggggagttcatggcagaacttcatcacattatcgccacgaaccgctttactatcaacgaaaaaaagaccagactacagaagaaaggcgagagacaagaagtgaccggcctggttctgagcgacaaggtaaacgtgatgaggcgatatgctagagagctccgaacactgctgcatatttgggagaaatacggacatctggctgcttgtgagagttacatgaaggtcaggaaagccaacccagtgtatcgccacaaaggtggtatgcctactttagacgccgtcctcatgggcaaactgcagtaccttaagatggtgaaaggggaagaagataccacctacaaggccctctacgcaagattctgtaaactgacaaataaggcaccccaaggagtaaaatatccaactccctactcatcccatattgtctatctgcatacaatgtcacggtccgaattcgaagaggcgctcaggacgaccattaaatatcgggaagacaaggagccaaagctgtattttgtaataggggacgtggagcggcccatcacatggtcccactctgtgccgattggccagctgctagagaacagcgaggacgggtataagctgtggggtaagtaccaaatttctctgtgcgacaatggtaccacccaattctatatgttacacaagcggcttgtcgctccaccatatacaaacgatgggcgtaaactcaccgaaaggttgcagaaggagctagcagcgttagtcgacagcgatatcttcactcaggtcttgggcgttgatgaggaacctatgtgccctaaaatcgatccctccgagggagagcagctggctttgaaaaatgagaagtggaacgacgccctggatattatggccaggctggaggacatggacattcctgagcctccagaagtgaccctctga

SEQ ID NO: 7310 - RNA, 1377 nt, synthetic construct
  source 1..1377: mol_type = other RNA
atgcgggacattagggatctgaggagtctgctcaatcgtgtcaaaagggatgccctgggcgacaacgctcacccattccatctgcggcagatcacatactactcagaccctcggagaactgacgtggtgcggtataagtcattcgccatacctaaaaagagtggaggggtgcgcgcaatctcagctcccgttgccggactaaagtctatactcacaagcctgaatactatcctgcaagccgcatacgagcccacccggtacgctatgggatttgtggaagggagatccgtagtggataatgccagagtccacctcggccagaactatgtatttaacatcgacctcgaggatttcttcccctctatcgacaagagtcgtgtttggaggaggctgactctgccgccatttaacttcagcgtcgaacttgcagacgttgtggcagggctctgcacaatgagagttgaggcagagtgtgaaggcgataagcctagatacgtcctccctcaaggggcgccaaccagtcccacgatctcaaatattatctgcgagtctctggaccgtcagttggccggcttggccaagcggtttggcgccaaatattcgcgctatgctgacgacatcacctttagcagcatgacatacatatattctgctgagggagaattcgtcgcggaacttcgaagaattatcgctgcaaaccgctttaccatcaatgaaaagaaaacccgactgcagaaggtgggtcagcaccaggaggtgacgggactggtgctttccgataaggtgaacgtggcccgcaattacacgagggagcttcgaaccctcttacatatttgggataagcatgggtttatgaatgctacagtatgtttgatgcgagctcgggacaagaaccccgtccaccgacacaaatggggaaaaccatcgctggaggcagttgtgggcggaaaacttaactatctgaaaatggtgaagggcgaaaaagattccacttataggaacttgtacgagatcttcgaaagatgctactctagagataaaaggtactttgcccgcgaggatactaaggtcggcggtctaaagttcctgataaccatggacgtgtttacatttatggcgaccatgaatattctgctggagtacaataaaggcgggtcccccgaggttttctttaggtggggcgactataagtgtccgatttccgtaagccgcatggtgcctgtcgccaaattatttgaaaatgccggggaaggtatttgtaagatgaacaacttcgaattgtccctgtgcgatgatggttctactcgcttcttcctcctacatagacggctcccaattagcagctggatgaaattcaagttagtggacgagttgtga

SEQ ID NO: 7311 - RNA, 1590 nt, synthetic construct
  source 1..1590: mol_type = other RNA
atggaaagaacagaaatacggacgacagcattggcaatgaaaaacattaaagaccttcggagacttctaaatcaggtaaaacaggatgctttaggcgacaagtttagaccttttcaccttaatcagatcacttaccactgtaacccaaaacgcgctacccatcagcgttataagaatttcaccattcccaagaaatctggcggagaacgagtgattagcgctcccgtggcagggctcaagagcatcctcttcagcctgaatacaatcttgcaagctatctacgagccttctaaatacgccatgggattcgtgcagggaaggtcggtagtggataatgccaagctgcacctggggcagaactacatctacaatctggacctcaaggatttttttccctccatcgataaatccaggctgtggaaacgtttaaccttaccaccctttaacttcccaagtgagctctctgacgtgatcgctgggctgtgcaccatgagactggaagaggacggtaaggagacgcgatatgtgttgcctcagggggcacctacatctccaacaatcactaacattatctgcgaaaagctagaccgacagcttggtggtctggccaagagattcggcgccaaatactctcgatacgccgatgacattaccttctcctccatgaactacatatattcaaacgagggggaatttatcaaggagctgcatcgcattatagccgacaatcacttcactatcaacgaaaagaagacccgcctgcagaaagtgggcgaaaggcaggaagtaactggactcattctctcggacaaggttaatgtcgtccggacttacaccagagaggttcgcaccctgttgcacatctgggagaagttcggccacatggccgcctgcgaatcatacatgcgggccagaaagctgaacccgacacataggcataaaggaggaatgcctagtttggatgcggttctcatgggcaaactgcaatatctcaagatggtgaagggagctgaggacgccacttataaagctcttaacagccgttttgccaaactgcaaggccaggagttggccccgattaagtacgcaaaaaaaccactcgcttatgtccacactatgaatcgggaggagttcgaagagactctgtcttcccaaatagaatataaccccgagacaacccccgccctgttcttcaaggtgggcgatgacatcaggcctataacggtcagtcaaaccgtgcccgtgaaagaactatttgcgaaaggggacgaggcggccgaactctggaggaagtatcagattagcctttgtgataacggtatctcattgttttacatgctgcacaagaagctggttgccccgcagcatacaaaagctggcaagcgcaaaaccgttgagcttcaggaggaactatccgcactggtcgaatcagatatatttagccaggtcctgaatgaggataaggtagacgggaagaactataaggtggtcagtatggaggacattgcaagcgatcgcgtggagatcgctaatcgggagaggctcattgcgctgatggaggcagacattcctgagccagataatttatga

SEQ ID NO: 7312 - RNA, 1557 nt, synthetic construct
  source 1..1557: mol_type = other RNA
atgcgagacgtcagggatcttcggttgctgctcaatcgcgctaaaagaggtgccctcggcgcaaaggcgtacccaattcacctgcgccagatcacttactatgccgatccgcgacgcgaagatgttctgaggtacagaaactttcccattccaaagaaatcagggggcgagagactcatttcactgcccgtcgacggactgaaatccatcctgcgcgcccttaatacactgctccaggcactttatcagccaactgcttatgcaatgggatttgtccaagggcgttcagtggtggacaacgcacgggtgcacctcgggcaaaactacgtctataacatcgacctcaaagactttttcacctctatcgataagtctcgcgtctggcgacgtcttactctgcccccctacaacttgcctagccagctagccgatatcgtggctgggctgtgcactatgcgactcgaggagggcgataaagtgagatatgtcctgccacaaggtgcacccacaagtcctaccctgacgaacatcatttgcgagaagttggaccggcagttagccggtttggctcggaggttcgggcttaggtacacaaggtacgcggacgatattacctttagttccatgcattacgtgtactctagtgacggcgaattcgtgacctccctaaggcagatcattgagcagaatcacttcgtgataaacgagacaaagagcagattacagtaccgcggcgagagacaagaggttacaggaatcgtattatccgacagactgaacgtcgctcggcagtatactcgcgaacttcgaaccctgctacacatatggcagaggtatggatacctcgctgctcgtgaatcctatctgaatcatcacgcagagggctctaaatgccgactatgtattcgggacacacgcttagaaagtagcatcatgggcaaactccagtatctgcggatggtaaaaggtgaaacggatgccctttatatgcggctgaagcagaggtttgacgaactgatgaaggagaagggatcagccgtaaaatacgccaagtatggagaattcagctacctctataccgtggatgtgcccttgttcgaatctacttttaacacccgtatttgttacaacgcggagtctgatgtgaagttgtactttgttgacgggggggtgatcaagccaatcgcgcttagcagtaggctggacgcaggaaagctgttcgcctcggacaatgatgagaataggtggcatggcttgcagattagcctgtgtgaaagccattctacgcaattttacatgctgcatagacggctggtgaatccgctcttcagtaagcctcgccacaaaaagaggtcgagccctatggatgagtatgttgagttgttcaactccaatgccaattccgctctgatcgacgagttcttctttagaaattacggtcggagaatgacaatcgatgatttaggcgacgttgtggcccagtcagacgagagcggcgcaatatccgaactggcccacatactggatgctgacattaccgtactcgcccctaaatga

SEQ ID NO: 7313 - RNA, 1422 nt, synthetic construct
  source 1..1422: mol_type = other RNA
atggagcgtgaagtgctcataatgcgcgtggagagaatgaaggataaagaagatctgttggcgctcttaaatgacgttaaagctgacgagctgggcgataaatcataccctttcaccatgaagcagatcaatttctattgtaatcctacctctgtacccaactctaaacgctacaacgatttctttattgcgaaaaaaagcggtggtatgcggcatatcagtgcccccgtcaacgggcttaagagcatccagacttacctcaatataattttccaggccatttacgaaccaagtcagtgggctatgggctttgcccaacatcgatctgttgtgaataacgctcaaatgcacattgggcaaaattatgtcttcaatctcgatatcaaggacttttttccctccattccgcaggcacgcatttggggtaggctccaggtaaagccatttaattttaacaagcagctggctaacgtgatcgccggactatgttgtatgaaggtggtgactgaagagtcagagaggtatattcttcctcagggggcacctacttcacccttactaacaaacgcaatctgcgataagctggacttcaaattgtccaggctggcacagcggtacggcctcaattatagcagatatgccgatgacataacattctcttcaatgcataacgtgtaccagaaagaaagcagattcctgaggaccctgttccaaatcattcaggaacaggggttttgcatcaatgaggctaagactagactccagaagcgtggaagcagacaggaagtgaccggattaattgtctctaataaggtcaacgtgacgcgcaaatatacagaggacatccggaatatactgtacatctggcaacgatacggactgaccgtcgcctaccaaaagttttccaagtactataagaaggagaaaggccacgttaagcagggagaaccaacaatggaaaacgtgctggccggcaaacttgactacctgaaaatggttaagggagagagcgattcaacctatctaaaattgaaaggcacttacgacactttgatgaatcacattcttgaaggcgccgatgggagtattaaatatattgacacccactccatctccgattttgagaagaaccttaaaacgaagatcgagatcaaaaagtctaagaagggcaagcagttcgcaagtttcatcctcgacggcgatgagaaaattgtaagcatatccaaaaacgccgaggacatcacacgcgacaagctgtttatcagcctgtgcgaggataacgagaagaagcgattctattttatacaccggcagatgtggaaaagggggctcgaaacaaagcggaccgaggagaatagtttggacttggacgaaatccttgctcagctgtgcaactccaacttcgacctgtcgctgctgtga

SEQ ID NO: 7314 - RNA, 1422 nt, synthetic construct
  source 1..1422: mol_type = other RNA
atggacagggagaagatcaaactgagagtcgagcatatgaaggacaagacagacctcctggccttacttaatgacattaaggccgacgagttgggcgatagggggttccccttcacaatgaagcagattaatttctattgcaaccccttttccataccgaactcaaaacgataccatgacttctttattgcgaagaagtctggtggggctcgccacatttcagctcccgttaacgggctgaaaagcattcagacttatctgaacatcatctttcaggctatttatgagccatcccggtgggccatggggttcgcacagaataggagcgtggtggataatgcacaaatgcatatcgcccaaaactacgtcttcaatatggatctgaaagatttcttccctagtatcccacaggcccgcgtgtggggaagattgaaagtcccaccttttaactttaaccccgaattagccagcgtaatagcaggattgtgttgtatgaagcttgtcaacgaggacagcgagaagtatatcctccctcaaggcgcaccaacatcccccctgctgacaaacgccatttgtgacaagctcgattacaaactcgctaagcttgccagtcactacggcctgatctactctcgctatgccgacgatatcaccttttccagcatgcataacgtctatcagaaggactctaggtttatgaagaccctcttcaaaataatccaagagcaaggcttccaagttaatgaggtaaaaacccggttgcagaaaaaaggttcaagacaggaggtcacaggactcatcgtgagtgacaaagttaatgtgacccgcaagtacgtagaagatatacgtaacatcctgtacatatggcagaagtatgggctgactactgcatatcagcggtttattgttcactaccagctggagaaaggccatattaagaaaggcgcaccgcacctggagaatgtgatcgcgggcaagctggattaccttaagatggtgaaaggtgaagacgactctacctacgtgaagctgagaaaactatacaatgtattgatgggcgtgcctctgtacggtaattcagaaacagctatcaagtatttggatacccagcgtattactgatttcgaaaagcgaattgggaccaaagtggagatgaagttatccaagaatggaaagaaatacgcgtccttcctaatcgatggagaaaaacaggtcgccaccatctcgaagaacagcgaaaagcttgaatttacgaacctcgtgataagtctgtgcgaaaatcagcagaaagagcggttttatttcgttcacagaccttttggaaaagacgtggatgtgaaaaagaagaagcactctagcatgacgctcgatgagattctcgctaaactatgcgaaactaacttcgacctttcgtatctgtga

SEQ ID NO: 7315 - RNA, 1149 nt, synthetic construct
  source 1..1149: mol_type = other RNA
atggacaaggaacgtataatcgaaaccctgaatacccatgactgcaagacagcattgcttaccctgctgaacgacgcaaagcaggaatatttgggcgataaggcgtacccatttgagttacggcagattaccttctatagcaaccctgcaagcgatgtgaagaggtacaaagatttcgagattcctaaaaaaagcggtggcactaggaagatctcggctccagtcgaaggcctgaagatcatacttaagtgcatgaacatgattctccaggagatctatgagccatcaaagtacgccatgggatttgccaaaaataggtctgtcgtggacaatgctaagcggcacattaaccagaactatgttttcaacatcgacctaaaagatttcttcccttccattacaagagcacggatatgtgcgcgcctcaaggtcaagccctttgagtttagcgatgatatcgccagaatgatctctggtctatgtactatgaaagtgaccgacggcgagaatatcaagtacgttctgccccaaggagctccaacatccccgactctgactaacatcatttgtgacaaacttgaccataaactcgccgggcttgctaaacggtttggacttaactattcccgctacgccgatgatattaccttctcaagttctcataatgtgtatcaggaggaaagtgacttccgtaaagagctgcagagaataatcacggaggacggcttcgtgataaatgacaaaaaaacgaggctgcaaaaacgcggaggcagacaggaggtgacaggggttattgtatgcgaaaaggccaatgtcacaaaaaagtacgtcaaagagatccgaaatttgctgtacatttgggagagatacgggtacgatgaagccgtgaagcgctttcaccccaggtataaggccgaaaagggctacactaaaaaggggaaccccaacctcgatgctgtgctcggaggtaagttgctctatttgaaaatggtaaaaggggaaaacgacagcgtttacaagcgactgcagggtaagtatgatcacctcatggaggtgaagaatcctatcattaaccagacagacaatcaaaccaataatgaggcattaatctccgagctggaaaacctgttagacgaactgctgaagtga

SEQ ID NO: 7316 - RNA, 2370 nt, synthetic construct
  source 1..2370: mol_type = other RNA
atgacacagagcgatattatatccttggtatcccagctggagacaaaagaagatttgcttgcccttttaaacaaacttaagttcgaggatctaggggagcgtagctttagtttcaacattaggcaactgaattactatgcaaacccaaaccataccaagggtagataccggtccttcgaggtgcccaaaaagaagaaaggagccatgcgcactatctccgctccctccaatggactgaagatgctactccgctatgtaaacgtcatcctgcaagctctgtaccggccgggggagaataccatgggcttcgtgcacggtaggtcggtgagggataacgcgtctcggcataatcaccaaaactacatcctgaacctggacctggctgacttcttcccttcaattagtcaggcaagagtctggaaacgattacaatgcccaccctacaatttggctaaaccaatcgcagacatcatcgctgggctgactgctgtgaaggaagtgaccacggatgagagtgggaatgagtgcgtgcggtatgtcctgcctcagggagcacccaccagtccagtgctgacaaatattatatgcgagaggctcgaccgcaggttacagggcgtgggcaaaagattcggcgccaattatacaaggtacgccgacgacatcactttttcttccatgcacaacatctatcagcaggacggagagttcatgcaggaagttatcagaatcattcaagatcaggggtttgctgtgaacaaggagaagaccaggttactcaaaaaaggaagtcgtcaggaagtgaccggtgtaatagtcggcgataaagtgaacgttggccgagattatatacgatctatcagatccctcctgcacatctgggaagcattcggctacacagccgcgtcagcaaaatttcgccagcagcacctcaaggataagaatggatacgttaaaggtgagcctgccatggaaagtgtgatcgcggggaaattgcagtatgtccgcatgctgaagggctatgatgaccctgtatatcagaggctgcggcagaaattagattggttgctcggaatgagcgaccctgaagcagcgattctgcagaacccggattacaaggttctggagactatgcctttgcccacctttgaagaacagaatgcctgtcaggtgcaattttctatgtcgcccaatgggaatagatatgcattttaccatcaacgggataaccggatgactgtctctgttagccatgatattacacagacagtgaaacccttcctagccatctcattatgtcagagaagggacggcagtaggtttcacttgatccataaaccaattccacaggtccccgtgcgacaagaacccgccgtaaaggaaattgagattaggcattggcaccaacccgctatggttacgggtttcctcagaagattcaccgagaaaggtgcactcaagtacaccacccatctttggactcctgccgaggatggcagctatcaatggcaggattttgaaacattctaccaaagctaccggaaggagctctatgagaagaaagacgatcagatcaacatcaacgatctgtatcactacgttcctaccctgaatgctctgatacgcaatttccttattgagtccaagtccccaagcctgtactggtctaaagaatacaagcttgcagtgtcctatggatctccaaaaggctttattgccgactggatgcgccagaccgggaagcagccgtttgagatgcccctcgccgaactccctaaggagtatgtgcctgccgcccccgttcaggggagaacacttgtctactttaacgacgtggtggggatctttaagaatgctattgagttccgcgatgaccagttctactacgccgtcaagggtattttcaagagcgtatatcatcacgtggaccagcagaaattgagcacactgcggggcctgtcattttacaccgacacgtttcaggtcaaaaaggctctgcgcctcattgccagcaatatggagagtagaacagagtatccggaagtggaaatctcagcccagtatatagatggagacgacaactcaccacgtcggctgcgagttactattctgcaacgtgactctttctcagataagtccatctacgatgacaagttgctgctccgacacggatctggccagatgggctctatcaagtcgctgctgcgcagcctatgcgacttttcagtcgagagcagatttagggctcacgacgatttccttcactaccggatagactacctgtacacgactgacgcggacgccccaccttgtcttgtgcagctcgacaagccaactgaagggttcaagtatatactcaccttcgcactatga

SEQ ID NO: 7317 - RNA, 1548 nt, synthetic construct
  source 1..1548: mol_type = other RNA
atgacaaaggaggccatagtcaccgccgccagcaaagtgcagacaaccagggactttctcaacctgcttaacaagataaagatggacgacctgggtgataaaggccatccttttatcatgccacacttgaactactttatccatccagcccggaacaagaagtcatacaaggaattcagaattcctaagaagaccggtgggttccgcgtgattagcgcccctaaagctctgctgaagagctttttgacgtatacaaataaactgctccaggccttttacgacgctccagattatgtgacaggcttcgtccctgaaaaaagtgtagttgacaatgcagagaaacacattgggatgaattatgtctttaacactgacctccaggacttctttccgagcatctccaaatctcgtgtctgggctaccttaaaatttccaccgttcaatttcaatgacactgtcgccgatgcgatttccggcctttgctgtaccgaaatttatgtgaacggggaaacgcgtagagcactgccacagggcagtccttgttcccccatactgactaacattgtttgcaggaatttggatcggcgactacatcggctcgcaaaagagtataaccttaggttttctcgctatgctgatgatattacgttctcaagcaacagaaacgtgttccagaaagggtcagagttccggaataaactcgagggaattataacagagcagcactttatcttcaacgaaaagaagaccagattacagactaaatgtcagcgacaagaggtgacaggactaatcgtgtccgatcgcgtaaatgtcaccagggagtttgtacgcgaactagacaacctgctgttcatatgggaaaaatacggtgaggcagacgcttatgctaaatttctcctgcactacactcccaagcaaaacttccactcttacaagcccaatatgcaggctgtgatccaaggaaagctgctgtacatcaagatggtgaagggagccgataatgaagtttggaggcgtttacagagacgcttcaacaaactgtccggagcaaaaccctctacagtggaggccacactcaagtataagtacactattgcggacttcgagaagaagatcggccaggccctggattttgaactcaataaagacggcgtgatctactgcactttcagtttgaatgggaaaaagacttccgttgcactttctcattacgtccgaactcggatctcaaatattctggcaaagtctgataccgccgcccttgagaaatttaagacgagttacatgctcgtattctatgaacaagacaataccaacttctggagaatcgagcgcaaaaggacctgggtgaagaccaaccttgccgatctgatcgatacatcgtccttagcggaggcactgctgtcagcttctgctatctcggaaaagggcgacgagctgaccagcacacccatgaagagcaccgatgaggttctcgcggccctggtggatagcgactttgacttgaagatcttggatgaatgggacaaaattcggagttcctga

SEQ ID NO: 7318 - RNA, 1566 nt, synthetic construct
  source 1..1566: mol_type = other RNA
atgaataaggaggccatcgtggaggaagcatctaagttggaatctactcatgatctcctaatactgctcaacaaaatcaagatggatgagctaggagataaggggtatccttttaccatgccacagctcaattattacataaaccccattaggaacaagaagagttatagaaacttccgaattccgaaaaaaagcgggggctatcgggaaatttctgcccctaaggccattcttaaaagcttgttgacctacactaacaagatcctgcaggcactgtacgaagctcccggtagtatcaccggatttgtgactggcaaatcagtcgtggataacgcggagaagcatataggccggaattacatttttaatatcgacctccaggacttctttccatccatttcaaagtcaagagtgtgggctactctgaaactgcccccctataaattcaacgatacaatcgctgatgccatcgccggcctgtgctgcaccgagatcgttatagatggggaaaccaggagggcactcccacagggaagcccatgcagcccgatactgactaatattgtgtgcaggaatttagaccggcagcttaacaaactggctaagaaatacaaccttacgtattcccgctacgccgatgatattactttcagttcaaaccacaacgtataccaaaaagacagcgagttccggcaggagttggatgatattatcaagaagcagaacttcagcatcaactccaaaaagactcgtctccagcaaaagaatcatagacaagaggtcactggccttgtggtttctgacagagtgaatgtgaccaaagactacgtccgcgacattgataatattctttatatctgggaccactacagtgaggacgatgcatatgcccgatttctgacacactatagtcccaaacacaatctcaagcaccggatcccaaatttgtcctcgataattcagggcaggttaaactatttgaaaatggtcaagggtgcagacaatgaagtctggagacgcctacaacgaaagttcaataaattaacgggtaccaacaagtcttccaatgacgaaaacgcgaacatcaagtacatctatagcattcctgacttcgaaaagaaagtggagacacagataatcgttacgctgggatcaaacgacaatgtctactgttacttcaccatcaacaattacaagacctccgtaaacctctctaagtacgtgaaaacacgcctgaaaaacatcgttagcgaaaacaatcaggacctgcttaagcgttttatggccaactgtatcctcatcttctatgagaaagaggggagctgttactggaaaatagagagaaggcgcaaacattccatgatttcagaccctaaagactttgatctgaatctgctgctcctgaagattgaggaggtgacactggaacctaagaagtcatccattgctcagacagacaatacctctacctccaagagcacaacagatgagatcctggatgaactggtagactctgggtttgacttaaatatcctggataagtgggacaaaatcaagagttcgtga

SEQ ID NO: 7319 - RNA, 1548 nt, synthetic construct
  source 1..1548: mol_type = other RNA
atgacgaaggaagccattgtggctgcggccgctaaggtgaagtctacgcacgaccttctgattctcctaaacaagatcaagatggacgatctcggcggtaagggatatccctttatcatgccgcacttaaattatttcatccacccggcccgaaataagaagtcctataaagagttccggatcccaaagaaatctggaggcttccgagtaatttctgcccccaaaaacatgctgaaatcattcctgacctacactaacaagctcttgcaggccttttacgaggggccagaatacgtgacagggttcgtgcccgaaaagtcagtcgtcgataacgcggagcgccatgtgggcatgaattatgtcttcaataccgatctcaaagacttttttccttccatcactaagtccagagtttgggctacactgaagaggccaccctttaactttaatgatacagtagccgatgctatcgccgggatttgttgcacagaaatggttatagatggagaaacacgctgggtgttgcctcagggtagtccagccagccctatactgaccaacatcgtgtgccggaatttggatcggatgttgcacaagctagccaagaaatataaccttaggtacagcagatatgcagacgacataacctttagttccaaccgtaacgttttccacaaaaatggggacttccagaaagaactgataaagattatctcatcgcaaaacttcagcatcaatgagaaaaagacccgggtccagaataagaatcagagacacgaagtgactggcctggtggtgtcagatagggtcaatgtcactcgagagtacgtgcgtggtttagacaacctgctgtacatctgggaaaagcatggcgaagctgacgcttacgcaaaatttctggcacattatactccaaaacagaatctgcatccccataagcctaatatgcgcgtggtaatccaggggaagcttctctacctcaaaatggttaagggcgccgacaatgaggtttggagacggttgcaaagacggttcaacaaattaagcggagcgaaaccctctaccgtcgaggccactctgaaatataagtacaccatcgctgattttgaaaaaaagattggacagacacttgcttttgaacctaacatcgacggggtcattttctgtagctttaatctgaacggcaagaagacctctgtgacactgagtcaatatgtccgcactaggctctcaaacatattggtgaaaaacgacgccgctgcacttgagaaattcaagacgagctacatgctcgtgttctacgagcacgacaattccggcttctggaggatcgagagaaaaaggacctgggtgaaaacaaaccttgctgatctgattgataccagtagtctggttgaggcgccactaagcgcagcagccattcctgaggagcgcgaggagagcacaaacaccgcaggaaaatccacggatgaagtattagccgcactggtggagtctgactttgatctcaagactctggacgagtgggacaaaattaagtccaactga

SEQ ID NO: 7320 - RNA, 1365 nt, synthetic construct
  source 1..1365: mol_type = other RNA
atgaccaaagaggctatcatcgcggctgcgaaagatatcaagactacacatgacctcttgaagctgttgaataacattaagatgtccgaactaggcgataaagggtaccctttcatcatgccgcatttaaattacttcattcacccagctcgtaataaaaactcgtacaagacctttagcattccaaagaaatctgggggcgaacgcacgatctctgcaccaacccgactcctgaagtcattcttaacattcaccaaccgactgctccaggccttttatgaagcacctgactatgtgaccggcttcgttcccgagaagtccgttgtggacaacgccgagcgccacattggtatgaactacgttttcaacactgatctaaaagacttctttcccagtataaccaaatctagagtgtgggccacgctgaagcatcaacctttcaactttaatgacacgatcgctgatgccattgctggactctgctgtacagaaatggaaataggaggtaagagccagtgggtgttgccccaagggagtccctgctcacccgtgctgaccaatatagtatgcaggactctggatcacaagctgcacaagttagccaaaaagtttaatctgcggtattcccggtacgccgacgacatcactttcagtggcaatcgcaacgtgttccataaagacggtgagttcattaaaaagctgaaccgggtcatcgcacagcagaactttactgtgaatgaaaagaaaacccgtatccagaataaaaatcagagacaggaggtgacaggcctagtggtgagcgatagagtgaatgtcaccagggagtatgtcagatccttggacaacctcctttatatatgggaaaagcatggagaatctgaggcatacactaaatttattgtccactacatccctaaacagaacccgtacaaagagcggccaaatatgagaagcgtcatcctcggcaaacttcaatacctgaaaatggtaaagggttccgataacgaggtctggaggcgccttcaatcacgctttaatcagctgtccggcgttacccctagcattgaatctgccgtgattaagtatctttacaaggtgtcagatttcgagaagaagattgggcagaagctgaaattcgaaatctttgacaagaaagtcgtacgttgtttttttcccttgaacaatcagcacacagatgtaatgctgagtcgatatgcccggacaaggtttagcaacctcatagtgcaggatgactttgttaagcttgagcaaatcaaaagtagctacatgctgatcttctatgagcagggagggtctggattctggaggattgagagaaagaggcggcagaagctgaagacatga

SEQ ID NO: 7321 - RNA, 1581 nt, synthetic construct
  source 1..1581: mol_type = other RNA
atgacagacaaggcaatcgtggccgcagcctctaagctggaatccaccttcgatctcttgaccctgctgaataagattaaagaagatgagctgggtgataaggcttatccctttaagatggaccacttaaattacttcatcaaccctaaacgaaaccgtgccagttatcgaactttcaccattcccaagaagagcggaggcgtacgcacgatctcagctccggtgaaattacttaagtccttcctgacctacacaaatattctgttgcgagcattttacgaagcaccagactgcgtgactggcttcgtcccagcgaagtcagtcgtggataacgcagagaagcacgtgggtatgaattacgtgttcaataccgatctgaaagattttttccccagcatctctaaaagtcgggtctgggccactctgaaaacaaggcctttttgttttaacgacaccgtggccgatgctatcgccggtctatgctgtacctatgtgaacgagaagggagaagaggataacatcgctctgccccagggatctccttgctcacctattctgacgaacatcgtgtgtcataacctcgactggaagttgtccgggctagcccgccggtttgggctcaattattccaggtatgcggacgacattaccttctcctcaatgcataacgtgtatcaggaaggaggtgaatttatggcagagcttagacggatcattgagggccagcactttcgtataaacgaaaaaaagacaaggctacagaagaaaggagagagacaggaggtgactggccttgttgtctcagaccgggtgaatgtggcaagggagtacgtgcgcgatctcgacaatcttctgtacatatggaaaaagcatggaagagccgccgcgtttgccaaattcagtggccgatatattccgaaacaagatctcaaggcccccgcattcgacatggatcgggtcgttgccggaagactggcctacttaaggatggtgaaaggtgaagagtctcaagtatggcgccgcttgcagaagcgctataacactctgagcggcaaaaaggagaaaaccgttggaaccgacataaaatacctgaacttctacacgatcgaaaatttcagcgctgctactgggttagagctccacttggtcatggacacaataagtattccccgtgaaacacctgaagaggcgggggtcatgcgggttccagtagcctatttcatgtccggcgacaggagaatagacgtagagctcagccactatatgcagaccagacttagaaacatcctggagtcaggggacggcaaagctctggctgagttcaaacataagtacattatcgcatactgccacagttcgactgggtacttttggatgattatcaggtctatgccaaagatggggaacaatgctgacgtttcggaaaagggcgctggcttcatcctcagcgacttgttttgttccgagggggaaagcgttctgagcgacgataagtctacagatcagatcctttcccaactggtcgcctctaattttgatctgaagattctcgatcagtgggataaaatcaagaatagctga

SEQ ID NO: 7322 - RNA, 1464 nt, synthetic construct
  source 1..1464: mol_type = other RNA
atgactgataccgcaatacggcaggccgcttccctgatggaatgccagagtgacttactgtcgcttctgaatcacatcaaagtggatgaactcggcggaaaagctttcccttttacacacgatcaactctaccacttctgctctccacgaagaaatcgaaagcattaccatacattcaccatccctaagaagtctgggggagttcgcacaatctccgcacccaccaaaatgctcaaaagtttgttgcgttgcaccaacacattactgaaggcattctatgatgctcccgaggatgtgacgggttttgtgcgcgaacgttcaattgtggataacgcaagggcgcacgccgggatgaactatgtctttaatacggacctgaaggacttctttccgagcatttccaaatcgcgcgtgtgggcaaccttgaagacctctccctttaactttaatgaccgcattgccgatgcagtcgccgggctgtgttgcacgtgtctcaacggggaagacgagcctgaacggattgcgcttcctcaaggctctcccgcttcccccgtgttaactaacatcgtctgccgcaacctcgatagaagattgcgcgggcttgcacgacggttcggccttcactatacccgctacgctgacgacataacattctcaagtatgcacaatgtctatcaggagggtggggagtttatggccgaactcagaaggattgtgctaggacagcactttgaactaaatgagaagaaaactcgcctccaggtaaggtccgcccgacaggaggtcacagggcttgtggtaaacgacaaggtgaatatcagccgggcttatatccgggatctggacaacctcctgtacatatggcagagacatgggcgatccgccgcctttctgaagtttgtgggccgctacgtaccaaagggagtttggttcggacaggcccacaatatggagcgggttgttgccggccgtctggcctacatcagaatggtcaaaggtgagtgtcgggcgtggagaagattgcaggaccggttcgacaggctgatagccaggggcaaccatccagtgggcagcggaggtaaggatttcatttacaccagtttctacactcttgacaatttcatgaagttttctggattagagctgcaattcatcctggaggacggccgtccaaaagtcttctttgttaaggatggcgtgaggactgacatcactctgagccattatgtaaggaccaggttgagaaatatccttcaatcaggtagcaaggaagaactgaggaaattcacagccaggtacataattgctcattgtgcttttacctatatgagcgatgctgagggactcttctggctgatcattagaagcgtgccgcggaagaaaatcgcgtcactgggcaacaaagacctggcagagctgattactgacctatctctggaaaaagtggaggatgaggccctctga

SEQ ID NO: 7323 - RNA, 1671 nt, synthetic construct
  source 1..1671: mol_type = other RNA
atgaaccgggacgccatcatcaaagccgcttctcaaatggagacacttgaggacctgcgccgtctgctcaatgagatcaaagaggacgagttcggcgataaagcataccctttcagtgagcggcagttaaagtattacattaaccctaagcgcaataagcagtcctaccgccaatttaccatacctaagaaatctggaggagtcagggccatctctgcccctattcgtattctgaagtcactgcagctctgtacaaacaggattcttcaggctttttatgaagcacctgactatgtcaccgggtttgttcctgctcgatccgtcgtcgacaacgctgaaagacacctcggcatgaactatgtcttcaataccgatttgaaagactttttcccatccatctcaaaaagtcgagtttgggccacactgaagacgcggcccttctctttcaatgataccattgcagatgctatcgctggcctatgctgcaccgagttagaactagacggcgaaactcgcgtggcattgccccaaggttccccgtgctcaccagtccttaccaacatcgtttgccacaatctcgattggaaactgaacggactcgctaggcggttccacctccgatattccagatacgcggatgacatcacgttttcaagcaatcataatgtctaccagcccgagggggagttcatgattgaattgcgccgaatcgtaaacgaccagaggctcaccatcaatgaaaagaagatgcgggtacagaagaaggggcagagacaggaggtgacgggcctcgtggtgagcgatcgagtgaacgtcacacgggagtacgtgaggagtctggactctctgctctttatatgggaaaaacatggagaagatgtggccttttcgaatttcctgaagcactatgtgccaaagcataatcggagattccgctcccccgacatgagcaaggtaattctgggtaaattgatgtacctgaagatggtgaaaggagaggatagcccggtatggcaacggttgcaggtgtgttacgagaaccttgcccatagggagccagctgccagctcagacatacagtatctgcactcctttgcgatcgatgtcttcgagaaagggtccggagtgcagttaactttcagtatgaccgatggtaagctgaaatgtctaatggagtataagggcagagaaattagagtgtgcctgtctcagtatgtgcagaagaggttagcgccaatagtggaatcaaacaatctagaggccctcgaaaagctgaagaaacagctgcacattgggtactgtatggccagtcttcttgagacttctgtcgtaaaccatttttggctgctttacaggaaaagacccgttgtgaaggatctccccattactttgaccgaagaaaaagagattcaatcacacatcgaacgttacctgaaggagtctgcaggtgtgcgcaaagcatccgacagaaacattaatgcaggcgagagcatgaaagaatccgtgtcggttacaagcgagatcgggacagaagaaaaaaaagttaaagccgaaagcgaggccgacagcaagactggcaagactatcgacgaggtgttggacgttctggtgagcaagaactttcgcgatctgagtatactggataagtgggacaagatcaagacaaattga

SEQ ID NO: 7324 - RNA, 1554 nt, synthetic construct
  source 1..1554: mol_type = other RNA
atgacgcgcgaagcgatagtgcacgctgcgtctaagttagaaactacccatgacctcttggtgttactgaatagaatcaagatggatgagctcggcgacaaagggcaccccttcaccatgccacagttgaattactttatcaatcctaagaggaacagcagtcactacaagaccttctatattccgaaaaagtccggcggacagcgagagatctctgcacctacccacatcctgaaaagcctgcagacctatatgaacaggatcctgcaagcattctacgaggctccagagtacgtgactgggtttgtaccaagtaagtctatcgtagacaatgctgagcgccacattggaatgcgttacattttcaattccgatctgaaggattttttcccttcaataccacaggctagggtgtggggaacgctacagacacgcccgttcagtttttcgaaggaaatagcttccgcgattgccggcctttgctgtgttgaggcgcgggatgaaaatggcaagctaatccatgtcttgcctcagggctctccctgtagcccaactctgaccaacatcgtctgccataacctggactggaaacttaacggcttggccaagaggtttcatctgaaatacagccgatacgcagatgacattacattttcctccgatcattatgtgtaccaggatgatggcgagttctttcgggaattccgcagaattgtggccgagcaacactttaagctcaatgaaaaaaagacccggacacagaaacgaggagagcgacaggaggttaccggtctggtcgtcagcgatcgcgctaatgtcgcaagagagtatgtgagagatcttgataacctgctgtacatctgggagaagcatggtcacaatgcagccttcgccaaattcatagccagatatactcccaagcaggacctcaagcaatcctcacccgacatgaagtcagttatcatgggacggctgatgtatttacggatggtgaaaggagaggactctttggtttggcgtcggcttcaaaaaaggtttaatcgtctggctgataagaaggaaagctgtggtgggactaacatccagtatctccatgcctacccaatagaggccttcgaaaaagctgtaggcactgacgtgtcctttacactcgaagacgacttcgtgagatgcagctttacgctcaacgggtcagcccacagcgcaagactgggcaagtatgccaagaccaggatccggagcattctggagagtgggaacgaagacgccatgctgaaattcaaggagaaatttcacattgggttctgccatatggatggtacacctgaggaagaccacttttggcttatcttcaggcgccctcccagggccaaagggcttgagatcaccgacgtggatgaaattctaagtctcactgactacgtcggattacccgagaacggcgaaacagattcagctgactccttgacaacagatgcaactctcgaagccctggtttcttctgacttcgacctgaacaccctggacaagtgggataaaattaaatcgaactga

SEQ ID NO: 7325 - RNA, 1083 nt, synthetic construct
  source 1..1083: mol_type = other RNA
atgactaatctggagattgcacatgccgctagcagggttgccaaccttcccggcctgctggctttactcaatcggatcaaagaagacgagttcggcaatcgggtataccccttcaccttgcaggagctgaactactacatcaatcctaaacggagccggtcggggtaccggatattttctatcccgaaaaagaatggtggggatagaaccatcgcgagtccagtgaaaattctgaagagctttcagatctgtgtcaatagattactgcaggctctgtacgaggtgccagaatgcgtctgcggattcgtgcctggacgcagtgttgctgataacgcagccaggcatacaggaatgaggttcgtgtttaacgctgatctgcaggatttctttaccagcattccacaagcaagggtgtggggcgcccttaagacccgacccttttcattccctcccgtaattgcctccgcgttagccgggctctgctgtatggaagtcgatggagctgacggaccccgatatgtgctgccacaaggcggcccagcctctcctgtgatcacaaacatcgtgtgtcacaacctagattggaagttgtccggtttggcacggcgatttcatcttcactactcacgctacgctgacgacataacattttcaggggaccacttcgtgtatgaagaaggcggtgtttttctgaccgagtttcgtcgcattgtagccgagcagaattttaggctcaacgataaaaagactcgcctgaataggcgtggcgagcgacaggaagtcacaggcctggttgtcagtgatagagtcaacgtccctagggaatatgtgagagacttggacaacctcctcttcatttgggagcgctatgggagagacgccgcctatgcgaaattcctatctagatatactccgaaaaaggggcgcatggttaagaagcccgatatggaggccgtggtgcgtggtagaattagctatcttaagatggtgaagggcgcagactcccctgtatggaaaagactgaggaagcggttcgacatcctcataggacgcgcatacttctctacgactacatgctcctga

SEQ ID NO: 7326 - RNA, 1512 nt, synthetic construct
  source 1..1512: mol_type = other RNA
atgaatcgacaggagatcattgctgctacggccaagttagagacacgctacgacctcctgatcctccttaacagaatcaaagtggacgagctgggcgagaaagcccacccatttacaattagacagctgaatcacttctgtcaccctcaccgcaacacttgctcttacaaagtgttcaccatcccaaaaaaatctggaggattcaggaccatttccgctcccggcagactcctgctgagtcttctgacatacactaatcgcattttccaagcagtgtatgaagctccatcctgtactgtagggttcgttcccggacgaagcgtggtcgacaacgcgaaaatgcatgtaggcagagattatgtctttaatacagacttacaggacttctttccatccatcacgcaggcccgcgtgtgggctacattgcagttaccccccttcagcttcaacaagaccatcgcaaacgccctggcgggtctgtgctgttccgagattttgatcaatggagaaatacgaaacgccctcccgcagggtgctcctactagtcccgtcttgaccaatattatatgccagaagctggatcgaagactgacaggattggccaagcgttttcatgtgcattactcgaggtacgcagatgatattaccttctcttctgatcacgatgtttatcaggagggcggcccgtttcttacggagcttaagaggatcatcggggagcagcattttaccataaatgagagcaaaacacgggtacagaagaaaggagcacggcaagaggttaccgggctagtggtgagcgacaaggtgaacgtcactcgcgagtacgttcgggggctcgattccttactctacatctgggaacggtatggccgtaaggaggcggtgtccagctttctccggcactataccgcaaagcataatcttaagaagcaggttcctagcatggaaagggtcctccgcggaagattgatgtatatgaggatggtgaaaggcgaagatgatccagtatggaggcggctgcaaagaaaattcaacggcctgtctgaaagggaaacctttcccggtaacgatgtgaagtatgaagccagttatcgcatcgaggaatttgagcaggcaattggtaccaaggtcgaatttctgagtagtggcacagagtcaagtacctctcggccttcaaatgcccaaccacaagctgttttttcactgcatgggatcatccgatctatatacctgagcaaatactgcaaaactcgtctagaaaaggtgctcgactccgggtcagaagaggaaatggacaagttccggaaacagtgcattatatcactgtgtcatagggccgacgatcctgactaccacttttggctaatccacagacctggcagagtcaggtccagcgtgactgtgctggagattctcggggcagacgaggtgttccactcggccgagagcgctgccaaggacattcttaacaagctgatcgattcaaacttcgacctgtccgtcttgtga

SEQ ID NO: 7327 - RNA, 1671 nt, synthetic construct
  source 1..1671: mol_type = other RNA
atggtgcgcaacgatctcataatccaagaatgcagcaggctcgcctcactcaaggatctgctgtttctgttgaatagggtgaagcgtgaggagtacggctttggcgcgcaccccttcacaatggagcagatgcttcatttctccgaccctcgaaggaacagacgacattatgacactttcgcaatcccgaaacggtcaggaggacagagaaccattaccgccccccggggaatgctgaagagtttccagaaagttgcaaatcgcgtctttcaggccttttacaacgccccaccttgtgttcaagggtttgtaacagggcgttcggtcgtcggcaacgctggcatccacgtggggatgaattatgtgtttaatagcgacctgaaggatttcttcccaagcatcacccaagctagaatctggactgtacttcaagcccccccttttaattttcctaagcgtatcgcttcagtgctcgcaggtctttgctgtacggatctagagtacgtgatggccaggtgcgctgacggaggcacttctgtaaaaggtacctctaaagccaagagtgtgctgccacagggtagcccagcatcccctatcctttccaatgttgtgtgcaagaacttagaccgacgcctgtccgggctggctaagagattcggactgagatattccaggtatgccgacgacattacgtttagctctcagcacaatgtgtaccagaaggatggtccctttatgaaagaatttcagcggatcgtgcggaccgaagggttcacaataaacgaaaacaagactcgcttgtcgcgcaggggacagaggcaggctgtgacaggcctcaccgtaaatgatatggtcaacgttccacgaaagtatgtacgggacctggactgcctgattcacatttggaagcggtatggggcctcagatgcttatgcaaagttcctgtcaaggaacatggccaaagtctccggagctgggctcacatactttcccaagatggaggatgttctcaaaggtaggcttgcatacatcggcatggttaaaggccgtcactctccagtctaccaaagactactgggcaaaatggacaccgtgcgccatcggacatctctgggggcgtttcggtatgtccatagctggcgaatttctgagttcgaaagtcttactggtttttccctagatatggaaaaagatccgagcggaaagtggtactgcagattcggccctgagggccatcgcgtctttgtttgtatgtcccgatggtgcaggagccggttgaccgggattttagagacaaatgaccaggcagcgttgaacgaattcaagcgtatgaatagaatcgggttatgttttgacgccagaagcatgaatatggaggcccggtgtgagagccagatagtggacgaattgagcccatacctggatggcccatactctggacaccgcttcttctggatgattttcagaagggtcagtcctaactccggaccccacaagagttttttcgagctggtggataagcgggtgtctaaagaaggtagagagctcatgaaaactttgggcctgaaacccgtgtccatttcaaaaggccccctgctcactaacacggaccctgtgagtcccaccgactgtttcgatgacacctatgatttctacatacgcccgttctga

SEQ ID NO: 7328 - RNA, 1476 nt, synthetic construct
  source 1..1476: mol_type = other RNA
atggaaaggcaggagatcagagaggccgcatcactgatgacaaacaggcactctttgctgacactacttaactccctcaagaaggatgatctgggtgataaagctcatccgtttaccatggcacagctgaactacttctgccatcccacacgcaacgcgaaacattacaaggtctttaccattcccaaaaaatccgggggcgtcagagaaatttctgcccctgtaaagatgctgaagtctttccagacatatacgaacatgctcttgcaagcactttatgaaccaaccagtgcggccatgggattcgtgcctggcagatccgtcgtggacaacgctatgaatcacgttggcatgaattacgtgctgaatcttgacctgaaagactttttcccaagcattccacaagctcgggtgtggggtgctctgaaatcgaaggcaattggattcaaccaagaagtggcttctgcggtcgccggcttgtgctgcaccgagattgatttctatgatggtaagcccgtactaaccacagttgacctgccaaagggggccaagacggagaagcgcaacgtgttgcctcagggcgcacccactagcccaattctgactaatatcgtgtccaggaacttagaccgccgtttaaaacatttagccgcccgattcggcctcaattatacccggtacgccgacgacattacatttagctctatgcacaatgtctaccaggaggagggtgagtttatgacagagctgagaaagatcgtggccgagcagaattttaccatcaatgaaaagaagactcgattccagaagaagggaagccgacaagaagtgactgggctaatagtttcagatcgggtcaacgtcacccgtgagtatgtgcggagcataggctcactgctctacatctgggaaaggtatggctatgacagtgcctttgcccggttctttcagcactacaccttgaaggtgaatagagtgagccccccctcaatggagagggtgctgcagggcaaactgatgtacctcaaaatggttaaaggagaagaaagtcttgtgtggcagagactgcaggatcggttcgataaagtttgttccaagaaacctgttaaggtgtctgatattaactacgtggctgcgtatactatgcccgcattcgagaaacagtttagcacggagatatcgttttttgctaaggagatcccgggtaagaaagagaagggaccagtcatcagttacggggcctcctttaagtcagggaacgaagggatcatcatctccgtatccgacagctgtaaagagctcattgcatctgctatcggggacgaaaaggccgttactgatcttaaaaagatgctctatgtggcttactgtaagcgcggagaattcccttattggctcgtcatgaaaagtcgccctcgtaatatatacgcaagcactgtaaggcgcaaagagggcgacctgttcttccacggatga

SEQ ID NO: 7329 - RNA, 1824 nt, synthetic construct
  source 1..1824: mol_type = other RNA
atgaacatcatcctccataacatcatttactacttcaggctgaacggtaataaattgccggtgcacaaagaaaaaacaattcaggtctgcctagaaagatttatcaatgtatcaatgacccagaaacagatcattggaaaagtgcatggactcaaaactaagatggacctgctcaatttactgaatgctctgaaaaaagaagacctggggaaggattatcacagattcacccttgctcaactcaactactactgtaacccgaatagaactccacacaagcgttaccgaaattttacaatccccaaaaaaagcggcggcgtcagaaacatctccgcacctgtgagggggctgaagtccatgctcacttatctcaacattgtacttcaggccatgtaccagcccactgatgcagcaatgggttttgttcccggtcggagcatagcagacaatgctgccatgcatacctgtcggaattatgtcttcaatacggacctgaaggacttcttccctagcatccagcagccacgtatttggaagatcttacagcttaagcccttctcacttaacaaagagcttgcctcggttattgccggcctatgttgcatgcaggatgccaacggtaatggcgtgttgccacagggctctccctgcagtccaattctgaccaacattgtttgtcggaacctggatcgaaggctgacaggcctggccaaaaggtttaatctgaagtactctaggtatgcggacgacataaccttcagttcggactacaacgtgttccaggacgattcagagttcatgaatgaatttatgaggatcgtcgccgatcagaattttaccatcaacgaaaagaagacgcggttacaaaaatccggccaacggcaagaagttacagggttgatcgtgaacaaaaaggtcaatattgctaaggagtactatcgggacatacgcagtctgctgtatatctggagtcgatacggcaaagagcaggcatatgccaagttttgtgtgagatataaggcctctaaagcttataatgctaagaagaagggaatgcctagcatgcccgcagtgatttctggcaaactgctgtatctcaagatggtgatgggagaggacagtactgcttacgccaagctgagagataattttttgaagctgtgccctgagcaaaaaaacgtcctgaagaatacgaacctcacctatctcgccagctaccgcctggacgagttcgagagcgcttttgggactaacgtgaagtttgaatataaaccattcagcaacgtctccgggaaatccaagactatggggagcttcttactcgaagaagagatcgtatcagtatccgttaatgtgagatgcgattctatagtggataagtatctagccaacccggatgaaaaagagttggagaagatcaagcgcaggctgtacatttccctaagtgaaaggggaaacgatcgtttctggttaataacaatcgcgcgcatgaacaacgagcacaagaaatcctataaaggctcatacgtggctaaagtcaaggtgcgaccagaggaaataaagaaggaaggaatcgagctgaagcgcgaggtttacgccgaaattatacgccccaccgagattttggagaacaatgacctcgacccaacccatcctggacctcactactacaattctacataccggaaatgggtgcctgtcgacgatgagcagtttgaggatatccccgatagcgaagagatcgacgcgatgctggcatcattggtgagctctgggtttgatcttaacacacttaaggagtgggacaaaattaagaagaattga

SEQ ID NO: 7330 - RNA, 1653 nt, synthetic construct
  source 1..1653: mol_type = other RNA
atgagccggaccttcatcagcgtgggtatgaacaagcaacagatcatcgagaaggtgaggggcttaaaaactaaggtggatctgctaaacctgctcaacgcgctcaaaagggatgacctaggaaaagattgctaccgctttacacttaatcagatcaacttttactgcaatcctaatcacaatccctcacgacggtacaaggatttcacaatccccaaaaagtcaggcggggtgagaacaatttcggcccctaagggaagtctgaagtctatccttacctatctgaacgtcatcttccaagccatgtacgaaccgagcgaagctgctatggggtttgtcccaggccgcagcatcgctgataacgccgcaatgcatgttgggagaaactatgtattcaataccgacttgaaggatttcttccctagcatccaccaggcacggatctggaagatgttgcagttgaagccattttcccttagcactgagttagcgagtgtaatagcagggctctgctgtatgcaggatccaaatggcacagtcgacaaaagtggtaagatcattggtgtgcttccccagggctccccctgttcaccaatactcacaaacatcatttgtcggaatttagatcggaagctgttaggtctggccaagaggtttaatatcagatacactaggtacgctgacgatattacgttttcgagcgattacaatgttttccaagaagggtccgagtttatgaaagagttcacgcgcatcgtaacagagcaaaggttcaaaatcaatggctccaaaaccagactgcagaagagtggacagcggcaagaggtcaccggcttggtggtgaataaaaaggtgaacgtcacccgcgattattacagggacctgcgttccctgctgtacatttggcagagatatgggaaggagcaggcctacgctaagttttgcataagatataaggagagcaaaacctataagcgaaaacagaacgaaatgcccgacatcgtggcagtagtttctggaaaactactctacatgaaaatggttatgggcgaggagtctacggcctacctgtcactgaaaaacaaattcatttccctgtgtccagaacagaagcagatcctggatactaacctgcactatcttgcgtcatatagactggacgaatttgaaagggcttttaacacccaggtcgtgttcgcctataagccccagaatcgcgtcgtggggaaatctaagactatgggaacatttgttctgggagaggagaagcatgttgtggcaattaacatacgatgcgactccattatagataagtatctcagtgcccctgacgacaagttgatgaaaggtctgcgtaaaagattgtacatcactctctctgagcgtggatctgaaaggttctggctcgtgactattgcccgcatgaataatgaacattctcgcagctttaacgagtcctataaggccaaagtgcgaaacgaaattgaaaccaattcaggcgaacctgtggatgtcattgactccatgtacgaaatggacgtgtacgactgtttcccggagaacatagacattgacggccttctcagcgagttcgtcaagtctgagtttgacttcaataccctgaacagttgggacaaaattcggaaaaactga

SEQ ID NO: 7331 - RNA, 1995 nt, synthetic construct
  source 1..1995: mol_type = other RNA
atgaaggacataagtacactcaggtgcgaaattaaaaagatgagaactcatctggacctcttttatgtgctgaacgaggtcaagaagcattatgccgagactgaagggatctctttttaccccatcaaccgatcaaattttgaatactacatcagcagcaagaccaatcgcaatcagtactataaagagttcgacattcggaagaagtataatgacggcaagagacacattatcgctcctttcatgggtctgaaagatatccaaaaggcaatcagcctgatgctgcagctgatctacaccccgtacaacaatgtgaacggatttgttcagggtcgttgtattatgcagaatgcctaccctcacgtattccagaattacatcttcaacatcgacatcaaagatttctttccaagcatacaccaggccagagtctggaaaaaactccaactgcctccactgaattttcctgttgcgattgcaaacgctatagcaaacgtctgttgttatgaactgatcaatgacgacgatactaagattggagtcttaccgcagggggccccgtcttccccaattttgtctaatattgtgtgcgagagactagactggaagctgcgaaagcttgccagggagaacaatcttatttataccaggtacgcagatgatatgaccttcagcggtatgtataacgccttctcacccaagagcgaattcatcattaagctctatgcgacgatacacgaggaaaacttcgtcgtgaatgaaagcaaaacaagtcttatgaaacggggcgcccatcaggaggttactggtctagtcatctccgacaaggtaaatgtgccacgctcttatatccgggaaatccgatccctcctctatatctgggagcggttcggagaaaagacagcttcctaccgctttgcgttgcacaacagtaaccgaaaagacaaaaccctgtcagagattggaactttagagaatgttctgcttgggaagatcgaatatgtaaagatggtgaaaggcgccaatgattccacctatctggcactgaaaggcagactcgataagctgcttggagccgaactctcaaagaaagaaaaaaggcgggagagccgggagaagaagctacgtaaagtcgttccccacaatctggaagagacacaaaaatttttccacctgtttgattaccctgagggctttaagtatttgacccatgactttcccgaaggggaagagtggagtgtcgataagctgaaagagcagtgcataggtattctgaagaactactcaaattactcacagattcccacttcgctgtgggctctggtgaacgtgtttgtcatagggaagtactataagaagacagactggattgactacgaagggcatgaccagaggattacatactccgatttcgtgggaggagagggccaccctatcctcggagatcataaggaggtgatagagcgcttcaagaacactattagggtgaggatgaggtgtctgtacaatttgtgcgtaagttggaatgaccccaaatacggcctgaacatcacaatggataaaaacgagttgaacaaggcagatttctacaccaacgtgttcatccttaaaaaatccgtgcagcgtattttccaaatgttcgcttctcgcaatgacaaaaaggacgttaacattcactatcacaaggaggacattaagaatcggcgctgccatatcctcacgataacccaacaggacagctactccgagaagggggttgatgagttaagacccaaactacacggcgggggcggcgattttgctacgttgaaacacgacttgagtggctactgtaactggtctgtgttatctgtgtggaacgaaaaaccagccaagtggaacatacttagagaatcggatgtggatgagatcgaggaagtgaccgacaaaccagtaggctttacccatatcctcacattttatgggaacaaattagaggaggatatccatcactga

SEQ ID NO: 7332 - RNA, 1887 nt, synthetic construct
  source 1..1887: mol_type = other RNA
atggccaaagaattcggggtggagtattatcccatcagctgggaggattactgctacttctcatccccaaaacgatctgttcgcaactatatctccttcgagatccctaaaaagagcgggggttaccgacatattagcgcccccgtgaggggactgaaagagatccagaagtgtctgaactaccttcttgagctcatgtactatccaaaggacaacgtaaccggatttgttagaggaaaatctatcgtggacaacgcatcaccccatatcggcaagaactatatcttcaatgtggacttgcaggacttcttcccctccattgaccaggcaagggtgtggaaaaagctgcagctgcggcccctctgcctcactaaagaggttgcctctgccattgccggactctgtagcatggagatagaggatgaaaaagggaataaacggtacgttttgccgcaaggagctcctacctcgccaatgctgagcaatatcgtgtgcgaacgattagactggaagttgagcggtgtcgcgcgcaggtttggactgacttatacgcgctatgctgacgacattactttttcttctatgcacaacgtgtaccagcatgatggcgacttttgcaaggaactgagacatatcatagaggatgaacacttcaccttaaacacctcgaaagtgaagctccagaagcgtgggggccaccaggaagtgactggcttagtcatcagtgataaagtgaacgtgcctaaggcttacgtcagggagatccgctcactactcttcatgtgggagtgctacagctatgctgtcgcctcccagaaatatgccctgtatcacaatgcctatgtcaaacaccggacctatggcgagttcgtatcactcgagaacgttctggacggaaagattgaatacctgaagatgattaaggggtgtaagaacccactgtacctgacccttcgtagtaggctcgataagctgataggcaagtccacgaagaaaaataaagattgcgaggtcatagaggtagtgaataacaaaaaagaggtgaaaaagcacgacatcgaagcgacatatgaggtgttgcatttatttgaagagcccaatggattgaaattccttactcatgacttcccagatgcttcttggagtatagataagctactaaaacagtgtcggacagtgtttaatgaagaagcaaagggacacccgaacataccccagtccctgtacagtctcgttcacacattcatgtccggcgtcagcaataatatcaagggctggctaggttatgatgaaaagctgcacacggaaacttggaacgactgggagaaaaagaaagagcaccctatcaagagatatggcgacatcatcgacattttccgcaatacaattaggattagatcaccaaagctgtttgaccttattaaagcccttgaagggcagaatacacaatttgtgtttgactacgatagcaaggaattgaaaaaggcagatttttacaccaacgtctacatgcttagatggtgtctggtccatgttctgctgatgttcggtcaataccctgagcacaaggaactgaatatttcctgtacccgtagtagcatgaacggctggattgtctacactatccagtttacacaagtagggagtttcccttccgcagatattaatgatgcgatcaagagagtgaacgagggggctggggacttgggcgtgattaaagagaaaatgcggtcttactgcaattggtctatcatatcaaagtggaacgataagaatctgcggtggaacatcctccgcagcgagggtgtaaaggaaattgaggaaatcgccgagcaaacaataggctttacccatgaattcgtgttttacaagattaagtccaactga

SEQ ID NO: 7333 - RNA, 1143 nt, synthetic construct
  source 1..1143: mol_type = other RNA
atgaaccgcgagacaattgcagaaaaagcggaaaagatgaccgagaagcaggacctcctccacctgcttaatgaggtgaaggttgacatgctaggcgataaggcccacccatttagtttgaggcagctgtgttattactgcaaccctagagtgaaccgaaaaagatacactgatttcgagatccctaaaaagagcggcggaaagagacgaataagcgcccctgtcaatggtctgaagtcaatactcagctgtcttaacatcattttccaagcaatgtacgaacccagcgagaatgctatgggcttcgccgtcggaaaatctgtagtggataacgctaagatccatgtcggaaagaattacgtgtttaacacagacttgaaagacttttttccttctattcaccaggctcgagtgtggaaacgcctccagctgccaccctttaactttaatcagaacatcgcaaatgtgatggcagggctgtgttgcatgaaagtatccagcccagagggcgacaaatatgtccttccccaaggagccccgacttcccccattattactaatatgatctgcgacaaactcgatcgtaggctgaatgggctggctaacaggtttgggctcacatatacccgctatgctgacgacatcacgttctcctctatgcacaatgtctaccaggaagacggcgagttcataaaggagctgcggcgcatcatcgaagaccagaatttcaccattaacgattcaaaaacgaggctgcaaagaaagggtagtcggcaggaggttactggcctgacagtttgtgccgccccgaacgtgaccaagcagtacgtgcacaacatccggtccctgttggccatttgggaacatcacgggtacgatattgcctatagacggttcttaccaaggtatataggtgagaaggggcatgtgaaaaaaggttcacctaacctggatagtgttcttgctggaaagctgttatacctcaagatggtgaagggcgccgataaccccttgtacgcaaagctgcaatgccggttcgacaatcttatcggaaccatgaatggggaaatgacctctgatactgaactacgtttcttgtataccatgggcgcgaaggagtttgatttcacacattcgaaatga

SEQ ID NO: 7334 - RNA, 1572 nt, synthetic construct
  source 1..1572: mol_type = other RNA
atggacaaatttgaaactagaaaaagagtctccagcctgcagactaaagcggatctgttgaaactgctgaacgatttgaaggtaaatgatcttcaggaaaacgcctatcctattcccatgaaggccatcaatttttactgcaaccccgctcatgagaagcgatacaagtcattctcaatccccaagaagtccggcggacaacgggtgataagcgccccatgccggggtctgatgtcaatcttaacctacctcaacgtgatgttcgaagccatgtatgagcctgccccctgtgtttgcggcttcgctatagggaagagtgtggttgataatgcgaataatcatgtgggaaaaaactatgtcttcaacttggacatgaaagacttctttccgtctatccagcaggctagggtgtgggccaggttacaagcagcaccatataacatgaaaaaggacgtcgctaatattattgccggactgtgttgcatgaaaactagcgacgggaaatttgttttgcctcagggagcacctacctcaccaattctgactaatatgatctgtgaacgccttgaccggagactaacagggttggcgcggcgcttcgggcttagctacagtcgttacgcagatgacatcacgttttcaagtatgcacttcgtgtattctggtgatggagatttcatgaaagagttaaacaggattgtctcggaagagcattttagcctcaacgataagaagaccaggctgcagaaaaataatgtaagacaggaagtgacgggcattaccgtgaacgagaaagccaatgtcacccgaaaatacgtgcgggagattaggcagctcctctacatttggaaaaagtacggatataatgacgcctactctaaattttatccaaagtataaggccgagaaaggccacgtgaagaagggcgaacctgtgcttgagaacgtattgagcggcaagctgctctacctgaagatggtcaagggtgaggaagattccacctacctgcgcctgcgaaagcagtttgataaactttctggcgataccattctgcacaagagcacttccgatgagttcaaatacatcctgacatatgaccttagtaacttcatagctgtgaactcgatcataccatttaagctgcatatcaaggacgaggacctccagaccacagcctccggcaactacaaaggaaagatggaactcaatggggagtacatgtccgtgtttatcagcaaaggagttctaaagcagatcagaactgccgagcagggtgattatacggacatgtggaagtgctacatctctctgtgtgagagtgcaaaggggcgtttctggctcatccatcgcggcaagcacgacgaagctacacacaatcccgctccccaaaagacaatatcccagattatcgacatatgggcaaaaaagggcctggagaaggcaaaggaggtcttcgaaaacgtgcactatccgacaggggactctattgacatcaaagccattctagatgtatgggaagagaaaggtgctgacgctgcggaacagctctatgagcaatacgttaaacaatga

SEQ ID NO: 7335 - RNA, 1668 nt, synthetic construct
  source 1..1668: mol_type = other RNA
atgatcgccgagagggctgcccagatgaagaccagggcggatctgctcctgcttttgaatgacatccgccatgacgaactggccgaagctgggcgggaggaggattaccacccattcacgcaacctaagttcaacttctatataaaccccaatcatactcagggccgctatcgggagttctacatacccaaaagatcaggtggtcggagacggatcagtgctcccaggaccgggacctacaaatacatgctgcacgctctgaacctgttgctcggatctctgtacacacccagcttgagcgcaatgggattcgcacccggacgctccattgttaccggcgctgaaaagcacgtggggcagcattacgtttttaatacagatctgcgcgatttttttccatcagtacggagagcacgggtgaaagcccgactactcctcccgccctttgggtttacagaggaagtagccatcgccgtagcaggtctgtgtaccgtccgagtggaggcccctggtgatgacggccaacctgctcgtcctatctacgttctgccacaaggagctcctacttccccactgttaacaaatgccgtgtgcgaccgcctagacagacgccttaccggcctagcgaggaggtgtggcgcaaattacactagatatgccgatgatatcacgtttagctccccccacaacctatgcgttgaaggctccgccttccgcgctgagcttgccagaatattggctgtagagggattcgagatgaacgaagccaagaccagggtgcagagatccggacagaggcaagaggtgactggcctggtcgtgaatcgaagagtcaatgtgtgccgtcattatgtgcggagcctgagagccgtgctctatgtctggcgacgctacggctatgatgctgcccttgccgccctgttgcggcatgaccgagtggtgccagagaggcgtggaaggaggcgccttccagacctcaccagggtcattgaaggacgcctgttattcgtgagacaggtccgtggtacggcagacccactgtacgcccggttacaggccgcatttgacgcattggtggcttctatgagtgctcagaagtgtgaaaacggactcaccttcatttggacagttccactggaacagttcgagaagcagtatggtgcgactgtcaagattcactttttcccagcagaaccgaccagtcagcccacaagctcggactcagcagccgagacaaacgctccttctgccgatgcgcagtctgccccgactgcgatggcctcttgcaggtttactcttcctcggaaccgagctaaagggggggacacctatgatgctcaggtggagttgcctctcacggtgagtagacggctcacccctcagacacctcgtgaggggatggcagtttcattctgtagagcgacaaaaggcatcccgtttctgctcttacaccgacagggggctgtgaccgtggccattattactggctctgggatggcaggcggttcccaacccgctggaaacgccccaggcatctttgcaacactgcccgtctatgggaaacggcgcctcgccagcgccgttcaagcagatcagggcgaaccccccgtcgacgttgatgcgctgctggcagagctggaaaactaccttactgaccacaatggctga

SEQ ID NO: 7336 - RNA, 1407 nt, synthetic construct
  source 1..1407: mol_type = other RNA
atgctgtaccttctcaatgacattatcacagacgcttatggttcgcaagccgccactattaacatgtggcaatttaactacttctcaaacccaaatcggtgtaagggccggtaccgtagctttcagattcctaagaaatctgggggtgctagaaccatctctgccccttgtaaaagcctgaagtatattcttcggatcgtgaacattctcctgcaggcaatacataaacctagcacagcggcaaaagggtttgtcccacggttatctatcgttgacaatgcggcaccccatgtgggcaagaattatgtgttgaatctggacctgaaagactttttcccctccataagtgaagccagggttcgcgcccgtttgatggctaagccttttaactttactgacgaagtcgcaaccacactggctggactgtgcagctacagaccctatagtaaagagacagcccatcaacgcatagccccctgtgtgttaccacagggcgctccaacttccccaacccttaccaatgccatttgcgaccgattggatatgctgctgtctggcgtcgctcgacgcttcaacctcacctataccaggtacgccgacgacattacattctcttccaaccattacgtattcagcagggatggtgaatttatgactgaggtgagaagaatcatagccgatcagggttttgaaatcaatgagaagaagacgcgcctacagcggcgtcacgaacaccaagaggtcactgggttgactgtgaatgaaaaggtgaatactgccaggcggtacgctagagatatcagaaacttgctatacatctggaactatcacgggatcgcagacgccgagaggtcattcctgtggaactacgataaaagacagagaagggtgcccgacatgatcaatgcgatatcaggcaagctagagtacctgaagatggtaaaaggcgctaatgatcccgtctatgttaggctcagtaaaaagtttgagtccctgcagaatgggaatacagtgctgggctacaagattcataagacctggacgatcaatcggtttcgattcacgcacggatatattagtgtaggatatgagcgcaacgagcttcttgataggctgaagtacgacgatatcccggatctgttcaaaaacgcagtttgcatcgatggacctcacccgtatttctacattgagaagcgaatcaagtaccagggccagctctatttgcaccgacagtttctccgcgtgctcagaaacattgaaacagagttcctcgaattcctgaacgggggcgagtgtcgcaggacctttttcgtgtcagaatgcacccgcaaaaacaaagatgggcggttatggaagggattcctggtccatcacgcaatcagccgggacggatcccacttcctctga

SEQ ID NO: 7337 - RNA, 1728 nt, synthetic construct
  source 1..1728: mol_type = other RNA
atgaatgatctgaggactctaatctcaaagataaacaacttgtctgacctgaccaaggtgctcaattacttcaagcatcgggaaactaatagcgaggagaacctgttcactgaggatgtcctggaaagttacgccaatccttccaagaaagtagcacggaggtataagacattctacataccgaagaaaaacggcaaactccgtgagattagtgcaccaaaccggaacctcaaggaaatccttcactacttgaacatgatgctggccgaagtttaccaggccggtcccagcgctatgggctttgtgaaaggccggtctatcgtcgataatgccaatctacatgttggacagaactatgttctcaatctggatctttctgactttttcacctccatctcccagtctaggatttgtaagcgcctgcaattagccccctttaattttaatgaaaacgtcgcgaaagcaattagcggcctgtgttgcaagaaggtggtaaagggtgggaagaagggatatgcactgcctcaaggcagtcccacctcacccatcctcactaatgcagtctgcgattttcttgacaaaaaattgaggcacctgtcaacacgtaatggagtaaagtatagtcgctatgctgacgacatgacattctcatcaatgcacaatatataccaggagaatgataccttcatgaagaacctgttttccatcattaaagaagagagattcactgttaacccagataaaacacgattgcaaaaaaggggcgagcgacaggaagttacaggattaaccgtcaatgacaaggtgaatactgcccacaagtataccagagagttgagaaatgtgctgtatatgtgggagaaatatggctacaaggacacgtatacttccttctataagcactataaggcaaccaaagggcatattaagaaaggggaaccagtgctggagaacgtgatcatcggcaagttagacttccttaaaatggttaaaggggagaacgatgtggtgtacaccaagttacgatcacgctttgaggccctgaaccccaacatttacgattctaaaaacacgaatagccggtctaaagtcaattacatcgagctctatagcgtggtggaattcgagaaagcctttaagacaaagatcaagtttatcatgtccggcgaaggtaagttgagcgccgtgtacaaaaacgggaagaaagaaaactccatatacgtcagcaacgctgtgaaggacattgtcttcaccgaaaaggctaagcctcgcaaaaactgtagatttaccattagtagcatggagtctttttttgtggcactgtgccggtcgaactgcgtgaattactggatgatgctggctaatgagccagctagagagagacacatccatccaaaatacaacaatctaccgattaaccagctactgaaagagtgggaagaaaaaggactcgaggcggccgctgaccttctcagttccattctggtagatgagacgttcagctccaatggagacaggaaagagcctgctctccctaaactcggtaagaaaaagcgcaagaagaaaagctctatgggggtgcttgaagagctgatgatcgaagattacatggatgatatggagttgcaggcgtcgctgaccgacttcgaagacgaagagacaatagaatacaacacaaaggccatcatgaagctgcttaaaggagacaaggacgggaaggaggagtga

SEQ ID NO: 7338 - RNA, 1743 nt, synthetic construct
  source 1..1743: mol_type = other RNA
atgatggaacgggacaagatttttgaactctcccaaaaaatgaagacagtgcgccatctggctttcattctcaacaagatgaagtgtgaggaatttggcacaatggaatttcctatcactgcaaagcagctgagacatttcagctccccaaaaattgctgacaagagatacaagacctttcagatcaagaaaaagtccggcgggatccgggagatcaatgccccatgctatcagctgaagattatcctgtattttctcaacaagatcctcaaagccgtattcacacccaatgattgtgtgaatggattcgctgaaggtcgctccgtagtgagcaacgcccaatgtcatgtgggccatcactatgtatttaatattgacctcaaggacttcttcccatctatccctcagccacgagtctgggccaggctccaactgcctcccttcaatttttctcaggaaatcgccaatgttgtggctggtctttgttgccaccccaatgctgatggcaccaacgtgctgccccagggtgcagcaacatcacccctgttaaccaacgccatctgcgataccttggatcgtaggatgaagggggttgccaaacgatttggactccactactctagatacgcagatgacatgacattttcatcaatgcacaacgtctatcatgaaggcagcgacttcaggctcgagataaaacggattatcgaggaacaggggtttaagatgaacgagaagaagactcggctactgagggatggtcagagacaggaggttactgggctgaccgtcaactctactgttaacgtgtcaagacactacgtcaagtatctgcgatggattctgcacatttgggaaacggagggctattcgaaagcttactccaaattctatccgaagtataagaaggagaagggatatatcaaaaagggtgagccagtgatggagaacgttatagggggaaaactgaattacctgcgcatggtccgggggagtaataatgccgcatacctaaaattgcaggcgcgctacgacaaattgcagcagctggtcttcattgacaatgagacggataaaggcgaatcctacatatacgtgcagccttataagatggcggaattctgccaagatttctctacgagtatagtgttggagatcagcgccaggaacaagcttgtcggaaggtgcgtactgtgtggtatggataaaaccatcgctatttctaagtccacccaaaagaaactctgtcctgatcttgagaaaaaaaagcccggcgacgtcattactagtgacctgctccccgagtgccatgtgaccttgtgcagaagcaaaggaaagaacttctggttaatcactgagtttaagccgctgcgttcgatttacctttcaatacagaacgcacaggtgaatatagacgagttactggacatctgggacaccctaggccttgatagtgccgtgagcgcgttcatgaacagcattaacgtcagcaactttaagaacaacaattctaaagagggctcaaatatcaacgagaacggggtgctgtccaaagaaaataatccaggcgttcttgagagttctcaggaaaaacacgaacagtatatcgtggggttgggagagaaattacctcagaatacaaaaaaggtgatcgatcaacaccgccaatacgatactggaacagactccagtataattgatgttgacgacgtggactgggatgtactggaatacagcatctga

SEQ ID NO: 7339 - RNA, 1722 nt, synthetic construct
  source 1..1722: mol_type = other RNA
atgaaaactgtgaaacacctggcggtcctgctgaacaaaatgaagtgcgacgaattcggctcgcggaagcatcccattacagctaaacagctgctacattttagtacccctaagatcgcgctgaagcgatacaagaccttccagatcaggaagaagtctggcggggtacgagaaattaacgccccatgctatcagctgagcattatactgtatttcctgaaccagttgctcaaagccatcttcacgcccaacgaatgtgtgaacggcttcacagagggtagaagcgtggttactaacgcccagcgccacattggacaccactacgtgttcaatatagacctcaaggattttttcccaagtattcctcagccccgggtttgggctcgcttacaattgccaccgtttaatttctcgcaggagatcgccaacgttgtcgccggcctgtgctgtcatccaaacgccgacggcaccatgaatgttctgccccaaggagcagcaacatcaccccttctgaccaacgccatatgcgacaccctggatcgcagaatgcgcggtgtcgctaaacggtttgggttgcactattcccgttacgccgatgacatgacttttagcagcatgcataatgtgtaccaggacggttccgatttcaggttagagttgaaaaggatcatcgaggagcaaggattcaaaatgaacgaaaagaagacccggttgctgagagatgggcagcgccaagaggtgactggcctgactgttaactcttccgtgaatgtgtctaggaagtatattaaggaccttcggtggatactccacatctgggaaacagaagggtacgcaatggcttactcccgtttttaccctaagtacaaaaaggagaagggatatatcaagaaaggggagcccgtgatggagaatgtcatcggtgggaaactcaattatctgcggatggtgcgaggcgataacaacgcggcatacctaaaactgcaggcaagatacgacaagcttcaacagctcgtattcgtggataatgaaacagataagggcgaaagctatatctatgtgcagccttactcaattgctgacttttgcaatgatttcgccacaagtatttctctggaggtaagtaccaggaagaacttaatagggaaatgtgacctttttggaatcgaaaagattatcgccattagcaaatctacacagcgtaaactttgtcctaacctggacagcaaagagcccggggatatcatttcatccgagctccttaccaagtgccacgtcaccctgtgtagatcaaagggacgcaatttttggctcattactgagtttctcccccataggtctaagtgccttagcattcagaacgctcaggtggacatcgatgaactcctggaaatttgggacgagctcggcgtggaggctgccatcaaggcgtttaccgactccttcgtagctgattgtgttaatctaaaaacgactgtggagccaaaagacggtcctgcctcaaaaaatacgaatgcagtcgtccaggtcagtggaataaatccaaccgatatagagagactgttagcaatggctggacaagccgaacaggacccgatctcttttgccgagcctatctccgctgacgattgggatgaattgaatatgggcacagacgtggatgatgtcgacttcgacgatttgaacgacattgacaaggataatccaatcgcatccatctga

SEQ ID NO: 7340 - RNA, 1707 nt, synthetic construct
  source 1..1707: mol_type = other RNA
atggaaaaggccgagattagagataaagccatggttatgaaaacgactaagaacctcgccagattgcttaacacaattaaacaggaagagtttggttccaagcggtataaaatcacccctagacaactttatcactttgcttacaccaatattgctccaaatcgttataagaccttccatatacacaaaaagagcggaggtttgagggagatcaatgccccttgttatcagctaggcatcatattgtacttcctcaacaaggtgtttaagagtctgtatacaccatcttcctctgtaaccgggttcaccgagggacgctcggtttatgacaatgctaaaatgcacgtgggccaccattacgtgttcaatatcgaccttaaggacttcttcccctccatcagccaagggcgggtttggacacgattgcagctgccgccgtttaactttacacaagaaatcgcaaatgtggtcgctgggctgtgttgccacaaaaatgcaggcagcactttaaatgtgcttccccagggagcagccacctcaccaatcctgactaatgcggtctgcgacaaactagaccgccgcatgagaggggtggcaaaacgatttggtttgcattatagtaggtatgccgatgacatgactttctcctctatgcacaacgtgtaccaggaaggctcggagttccggtgtgaagttaagaggattattgaggaacaaggctttcagatgaacgacgcaaaaacgcggctgcttcgcgatggagtgagacaggaggtaaccgggctgacagtgaacagcgtggtgaacgtgtccaggaaatatatcagcgatctccggtggattatacgtgtgtgggagaaggagggatatgctaaggcgtactccaagttttatcccaagtacaaaaaggagaaagggtacattaaaaagggcgaacccatcatggagaacgttatcggcgggaagctaaactacttgaaaatgattcgaggcgaaaacaatcctgcctacaagaagctgcaggagaggtacaatagactccagcaagtggtctacgtggacaacgaaactgataagggtacatcttacgtctacgtccagtcctataccatgaaggaattccagaagtatttcgcaactacagtaacgctggaagtgagtgccaaagggaagctggtcggcaaatgcttactggctggtatggagaagataatccctatctcactcagcacacagaaaaaactctgtcccgatcttgagtccaaaaagagcggcgagcaggtcataagtaagatgctcactaagtgccatgtcactctgtgtagggccaagggcaagaatttttggctgatcaccaaatacgagccaaaacgctctaaatgctttagcattcagaacacgaagattgatatcgacacactgctgaacatttgggagcaatacgggaccgagggagccgttgatgtattccagcagtcaatttacaatggccagcggatctcaaaggaaggaattgacggactgatcctgaatttcatcttagaaagcaagtacccaaaactcgacacaaacaaaactcagaagcctcagaagtctgaaagtgaaaccctctcagaagaggagatggctcaactgtcagagtttgcggatctgattgatagttctgacatagatgagttacccttcaccatccagctgaacccttga

SEQ ID NO: 7341 - RNA, 1710 nt, synthetic construct
  source 1..1710: mol_type = other RNA
atggaaaaaaatgagatcaaataccggctgaagaacgtcaagaatcttgaggacttcgccaaactcctgaatgatgtgaaaatagacgagttcaagacagcaaaatacaaaattaccgagaaacaactgctgcacttctgtaaccctaagacagtcccgaaccgttacaaggccttctacatcaaaaaaaaatcaggaggactacgggaaatcaacgcaccttgctaccagctgggcaccatcctctacattctgaacatcgtgtttaaagctgtatacactccctctgaatccgccatgggattcactgaagagaggagtgttgtgaccaacgctacctttcacatcggacatcattatgtctttaacattgaccttgagaactttttcccctccattccacaggctcgcgtgtggaagcgaattcagcaccccccttttaacttcccgaaagaagtggcaaacgtcgtagccgggctgtgttgccatacaaacgcggataagacaaaaaatgttctgccacagggggcagccacttccccactattaactaacgcaatttgtgatacccttgaccgccgtatgaggggcgtcgccaagtattatggcttacattactctcgctacgccgacgacatgaccttctcttctatgcacaatgtgtttgaagagggcggggacttccgcctcgagattaaaagaatcatcgaagaccagggatttaagatcaatgacaagaagacacggctgcaaagagacaatgagaggcaggaagtgactggtctgaccgtcaaccagcgggtaaatgtgtcacgtaagtacgttcacgatattcggtggatcttgcactgctgggaaaaggacgggtatgggaaggcctacgctctcttctatgattattataagcggacgaaggggtatattaaaaaaggcgagcccgtcatggaaaacgttataggcggtaagctgaattacatgagaatggtgaagggtgagaataacgccacttacaggaagctgctggaacgattccttaaactgcaaggcctggtttatgtggatacagaaaccgataagggcatgtcctatatttacgtgtacagctaccccgtgtccgaattcaacgctctctttaagacagatctttctctagaagtgagcgcaaaaaataagttgatcggtaagttccagatcgagcagagagataaagtgcttgccatatccaagcgcactcaagattatctctgtaaagacatcgcccagaagcagccaggcgaggaagttaaaaccgagagactgacatcgtgctttgtcactttgtgtagggcgaaggggaagaatttttggctcctgaccaaaagcgagatgaaacgatcaaagtgcttgagcctcctgaacgctcacatagacatagacaagctacttgacatttgggagaaaagggatattaacgaggcaagtgaggctctcaattatgcgatcacggaaggaaagcctattttgaccttcgaggaaagaatgtttgagaacctgaatctcagcggcttcggtatcttggaaacggtgaagggaaaatctcatagcaagagtgtaagttttgagtcaatcgctgaccagctcagcaagtttgagtcattagagaatatcgaggagttgttaatggagaatgatctggatgactccctggatataggggaattcaaggattga

SEQ ID NO: 7342 - RNA, 1593 nt, synthetic construct
  source 1..1593: mol_type = other RNA
atgaagctgctgaacgagatcaagttgcacgagtttggcaccaataagcaccctatcacagttaaacagcttatgcatttctctaatgccaaattgggcgataaacgctacactgttttctcgattaagaagaaaagcgggggcctgagagaaatctccaaaccatgttaccagcttaagtgcatcctgtatgtgctcaatatctttctgcggagcctgtacactcccagggaatgcgtgatgggctttaccaccgggcgaagtgttgtcggtaatgctgctgtgcatgcagctcaccattatgtatttaacatcgacttgaaggactttttccccagcatcccacaggccagagtttgggcccgtctgcagctgaagccgttctatttttcaaaagaggtcgcatcaatcattgccgggttatgctgcaataggaacagtgaaggcaaaaatgttctgcctcagggagctgcaacgagccccctactgacaaacgcaatctgtgacaagctcgaccgtcgcatgtgtggtgttgcaaaaaggtttgggctccactactcacgctacgcggatgacatgacattctctagtatgcacaatgtgtacaaggacgatagcgactttcgcaaggagattaaaaggattattgaggatcaagggttcacgatgaatgataaaaaaactcggctgcttcgggatggtaggagacaagaggtcaccggactcactgtcaacagcaaggtgaacgtatctagaaagtacatgcaggacctccggtggtacatctccatgtgggaaaaagaggggtacgcgaaagcttatagccgattctacataagctacaagaaagaaaaagggtatatcaagaagggcgagccagtgatggaaaacgtgattggcggaaagctcaattacctgcggatggtgcgcggcgctagtgatgctgcctaccagaaactccaacagaggttcgacaaactccaagagctggtgtttgtggataatcagactgataagggagcccagttcgtatatgtccagccgtatacatataaggagttcacttcgttgtttaataccgatatacagctggaggtgtcagccggaaataagctagtgggtaagtgcaccatcgacgggatagataagtttatttctattgtgaaggccgcccagcggcaactgtgtcccacactggacggcagaaaagccggagatatagtggaatcttctggactgagcaagtgctatattgctttatgtcgttcaaagggcaaaaacttctggttgatgagtctaaagcctcttagacgatccaaaaccctgtccatccagaacgcgaaggtcaacgtcgacgacttgttcgctctctggaacaatgagggtttcgaaaaagccgcagcggcatttgatgacttcgtcaacaagtctaaggccataccagaatgcaaagagaaacctaagaaggagtatttagacggaaataacacacttgacattcagtccgagaacaacatcgtagaacgctccacctccggttgtaacttctccgaagacgatcttttagccgccggcgcagatgtggacttttga

SEQ ID NO: 7343 - RNA, 2868 nt, synthetic construct
  source 1..2868: mol_type = other RNA
atgaaaaaaggaaacgatatcctaatcccgcccgcttactttttgaatgattacaaggaggggttttatatcgaaagacctgagagagactggtcacaatgtgagctttggaaaaacttaccatttgtgttggaggtcggggataataccatcgccacaatcgtcaaaggcgccgacaagcgtagactaaaatacgtctatgtccacatctaccagtcaactaacgacggccgctggttcctgagccccacttggtccgataaaattctcacagagtacccttttcaggaggtaaagacacaagaggaaatcgagtcccggatagcaatcttgaaggagaaggttaagaaactgaatgaggagcaagaacaggagattaagcttccaatagacgagtttatcaagaaacacatctctgaaatcgatacaacccgtaaactcgcactctttatcacgaagcttatgaagacactgttcagtgagaagcatttcgtgaccgagaagcagctgctgtatttcagcacccccaaagccggcaagcggtacaagacctttaaaatacgcaagaaaaacggcgggctgagggagattaacgcccctgtgcatcatctggataaaatcctgttcgtgctcaacatcatctttaagagtctttacacccctaataacgcagtgatgggcttcacagaggggaagtctattgtggacaacgctgctcggcacaccggccaacactatgtgttcaatatcgatctcaaggactttttcaccagtatcccccaagccagggtctgggggaggatccagtgtgccccgttcaacttttcgagggctgtggctaacgtagtcgccggactttgctgtgccacaaattcggagacaggcaaaaacgttctcccacaaggcgcacccacgtctcccctgctgaccaacgcaatctgtgatcggttagaccgacagctcaccgctttgagcaaaaagtacggtctgcattactccagatatgccgatgacatcacttttagctccatgcataacgtgtaccaggaggactctgacttcaggaagaagttaaagacaattatcgaagaccagaacttctgcataaacgataaaaagacacgcctactccggactggtcagaggcaggaagtgaccggacttactgtaaattcaaaggtgaacgttacccgaaaatacgtcagggacattcggtacattctgcacctttgggaatcaaaggggtacgcctttgcctatagcaagttctataagttctataagaccgagaaagggtatattaagaagggtgaaccagtgatggagaatgttattgggggcaagttgaattacctgaggatgatcaagggggctggcaatgaatgctatcagaaactgctccagtgttacaacaagctgcagcagattatctatgtggataataacactgacaagggacataattacgtttacgtccagcagtatactctcacggactttgagaatgacttcaagactaaaatcacactgcagatttcagatgacgaaaagctcgttggcaaatgcaacctctttggcatggataagacgattagtataagtcacaaaacccaggaggaactgtgcccaattatatcacatctgaaagtgggagatactttcacctccgagttactgaaaaactgttttgtgaccctatgcaggcagaaggggaaaaacttctggcttattacccataaagaactggatcgttccagatgcctgtccattcaaaatgcacaaatcgaatcggagaaactcttaaaggaatgggagcaaaaaggattcgaattcgtagttaaacagtttcagacagaaatcctgaaaaaaagcgacgtcccggattacgtctccgagagggatattaaggaatttatatacttcgtcacccacagtaaaaactttgaccgtaaacagaaactgcaacgcgattctcttctcgctcgcgatatggctaagcgcaaagcccagcctcaggaattcaaacctatgagtgttagctatacagccaattttttggcgaatttcaatagacccgacggtttcaagtatttgactcacgactttgataccgaatccaatatgactcttcctgacctgcgggaacagagctacaagcttctcgagtcagaaaagggaaaaatcccagattctctatatgtgttgatatacgcctatctgtctggcaaaacatggcgagacgcgttcggagacaacaacaatatctccatcaatgacaagaagtggattcagtggtctaaagagaacgataatgcccacccaattactaacagtgacttcgaaagcgagatactgaagttcaagaaagcaatcagaattgtacctcccctgctgcagacgattgtggataagatctgtgaaaagtacgagttgcacgtcacgacgaaaaagctagacaaggctgacttttatacaaacacctacattctgtctaacgttttggatagaatcctgcagatgatgaaacggcggaatgaaaacgtggattatcaacgcgacgtggaagtgtcttacaagcgagagattaccaacgacgtggtgtacaagaagataattatactccagaaggacagcttccccgagaatacatttgaggacgtgagcactagaatgaataataacaccgaagccggagatctgggtgcgattcgcaagatcctgaatggatattgctattggagcattgagactaaatgggacgataagtccctccggtggaatatcttgtcagacgatgacgcacctgaaacagagccaattgaggatactttagcggtaggttttcgacacatactgaccttcatgtga

SEQ ID NO: 7344 - RNA, 3114 nt, synthetic construct
  source 1..3114: mol_type = other RNA
atggataagaacaaatacataacgatcaagaacgctgtgttcgataattacaacgaggactgctttttctttgagatcccctccatggacctctcaaacgctaattcctggcatcaccccttccttctgtatgacgggactaacatttactccattcttcgaggcgccgataagtcaaaacttcgatttgcatactgttatatccaccagtcaaaaaaaagtggccagtttttcttcaacattagtctgactgacaagatcattcagaagtacaactgtaagaaaatctctacaaaggacgaatttgagactctgaaagaacagttgaagcagaaggtaaagctgttgaacaaggaatactctcaggatgtgctgccactcgatgagttcatcaagaaaaacatcaactcccttaacaataccagggacctcgccttttttctgactaagataatgaaggtgatcttttcggagaatcatttcgttactgaaaatcagttgaagtacttctgcagcccgaatatcccgaatagatataagacgttcaagatacagaagaaaagcggcggtctgcgggagattaacgcgcctacaaaccgccttaacaagatactgtgcgctctcaacatcgttttcaaaacaatctacacccctcacaatgcagtgtccgggtttacacagggaaagagtatcgcggataatgccattaaacatatcgggcaaaattacgtgtttaatatcgacctgaaggatttcttcacatcgataccccaaaaacggatctggggtcggctgcacgtgcatccatttaacctcagaggccaggttgcaaacgtggtggccgggctttgttgctgtaaaaattcagagacaggcgaaaatgttctgccccagggagctcctacttctccactgttaactaatgcagtatgtgacaaactggacaagcagctgttcaaactaagcaaaaaatacgggctgcattacagtcgctatgcagacgatatcacatttagctctatgcataatgtctatcaggaagattccgatttcaggagggaattgaagattattattgaggggcagaatttctgcattaacgacaaaaagacacggctgctcaggagcggacaacggcaggaggtgactggtctgattgtcaacagcaaaactaacgtcacccgtaagtatgtgagagacttgcggtacatcctgcatgtctgggaaaccaaggggtatgctgtcgcctactccatcttttaccgtttctataaaaaggagaagggctacatcaaaaaaggggagcctgtcatggaaaatgtcatcggagggaagctcaattacctcagaatgattaagggcacctctaacgaatgttatcagaagctcgctcagcaatttgatcgcctgcagcagatcatttatgtcgatgaggacacagacaactcaaaacaatacgtgtttgtccagtcatataccatcaatgagtttgagcacctgttcaacaccaagatcaccctacaaatttctgcacgcaagaagctggtgggaaagtgtgagttatatggaagcgagaagattataccaatttctcacctcactcaggacgagttatgtcccgaaataacaaaattccacgtgggtgacatcgtgaagaatgagaagttagactccttttacataaccttatgccggcaaaagggaaagaacttttggctaatcataaacaaggagctgattcgaagtcgttgcctctcaatcaacgatattattatcgacacggagaatttctttcacctgtgggaaaccgagggctttattatagtcgtgaagctcttccagttcgtgctgaacaagtatggcaactttgataccgagaaggtggtgaattttatcaatgacttatccaaacgcaacgaaatctctaagaaaaaaagactgaccaagaaaaggaagctgcagattgaggaggctctcaaggacgactcttttaagaaaatcaaagaaacggagatccaggaatttgtgtacttcatcactcactacaagcagttcacctacaaacagaaaatgtatgttaacaggttgctgacacgggatcttgccacaaaatacattgagaagacggagatagttattgacgacggaaaacatagatgtggggtgcgatgcgagtatatcagccccaagaagctccagaagtttctgtttgacttcaatcaggacgaagttcttaaatacacctgccatccaatcgattctgaagaggtaatcgaggaaatcaacaagcagtgtaaaaccgacatctatagcgttgaagcccacagtaaattgattctggaacgcttcgaaagcaagtttaagaatgtgaaatcgagtaggaatatgcaaggcctcattttcgcctatttgaaaggtcctaaagaatggagcagcaacagagtggtgattaattggagctccaatgaattgataagttggagcaatgagaataaaggaaaaattgccagtcccggtaaaaatatagcggccaaacagaaaaactacggatttaaattgccaaacccgttcgtatcttccataaatggccaacgcgttgccactttcacgaatcttgtaattttcttcaagacgctgttccacatcaggagagataacagtcttaagaacatcatcacttacaacaacaagtcaatcgagaatgtcaatataaccttcagctcaaactttaatgagaacatcgaactgttcacagatgtggataaactactgcaagcctacaagaacattatcaagatctgcaccgactgctcactcgaaggcgagcagcctgtattcgagatatccttctataaagaggaaaataacgtctacttctgtatccaccacatcaataccaagtatggcaaaacccttgatgattccctgaagcgaattggagagtctcagtccaacctgataaagaaccaaattaatgggctatgcgacttgtttattgaagctgattttggtaacaaggagtatgcaagaattaacctatgggatgaaagcgatgaactgaaagctcaaaatattgccgagatgcagggcgtcaaatatattctcaggttctga

SEQ ID NO: 7345 - RNA, 2679 nt, synthetic construct
  source 1..2679: mol_type = other RNA
atgaatttctgctttcctgataaaatgatcaccaactgtgaaaacaacatcctcgagaatgagcggaacctgaagatttctctgaaagaacacttcgaaccgattgagaatattgaggaacaaggggtgtctaacaaagataacacaaagtctctgtcaatcgacaagcttataaaggaacatatcttcaagacagactcgcccaataagctggcatggctcatctctaagatcatgaaggaggtcattagtgaaaactacttcgtgacagagaagcagctaaaatacctgtccacacctaaagtgtccaacaggtacaagacatttaagatcaagaagaaaagcggcggtactcgagaaattaatgctcctacaaaccggctgaataacattctctactctctcaacttgatattcaaatccttatacagtccccatgaagccgtgtgcggttttactgaaggtaggtccatccgcgacaacgctctccgtcacgtggggcaccactatgtgttcaatatcgacctcaaagactttttcactagcatacctcaggcaagaatttgggctaggattcagtgtgcgccatttaatttctctcctagtgtggctaacgtggtcgccggactgtgttgtgtatacaacgaggaactgggcaaaaacgtgttgccccaaggggcccctacatcacccctgctcaccaacgccatctgtgacaaaatggaccgcaagctggcggcgttagccaagaagtacggactccactactccagatatgccgatgacatcacctttagctctatgcacaacgtttatcaagaggaatcagaattcagaaaggagatgaaaaacatcatagagggacaaggcttctgtctgaacgataagaaaactcgcctactgaagtccgggcagcgccaagaagttaccggcctcaccgtcaatagtaaggtcaatgtaacaagaaagtacgttaaggatcttagatgccttcttcatatttgggagacgaaaggttacaatacagcttactcgtacttttatcctctatacaagaaggagaagggccatatcaagaagggggaacccgtgatggagaacgtgattggcggaaaacttaattatctacggatgatcaaaggggagagcaatgcatgctatcaaaaactgcagcagagatacgacaaacttcagaaaatcatctacatcgacaacaatatcgacaaggacataaccttcgtgtatcagcaatttgtgctacaggactttgagaaaaatttcagtaccaagatcagcttacaaatatctccaaaggaaaagctcataggtaaatgcaatatctttgggatggagaagatgctgagtattaccctcaatacgcagaaagagctgtgcccaaatctcaacacgctgaatgtgggcgacacggtcaatagcccaatcctgaaagactgttatgtaagcctctgctgccagcggggccgaaatttctggcttattagccacaagcagctggaagggtccaagtacttgacaattccctacattaagattaaccccgatatcctgctgaaaaaatgggaggaaactaatctcgaatatgtggcctggaaattttactttgccattagcaacaagatcgacattagtaccttggagaattcgatccaggagtttgtctacttcgtgacacataataagcattttaacaacacccagaaactgcaggttgcaaaattactggctagagattatcaaaagtcctgcgaggaacagaacgacaagctgatctatagtcaggagaacaagaataacgaagggaagatcatagaacagcagaaaatttttgacccaattgatacggcccgttttctgtccttgttcaatgagcccactggtctgaaatatcttacccacgatttcgatccagataattgtccggaaaccatcaacgaactgatcgagcagactgagaatgtcttaaaaaccaaaaaacggataccggagtctctctatgcccttatagagaacttttcattcggcaaaaaagagtggttggacacctttggcaaatcccacagctcatctatcgacaaaactgattggatagagtggagcgaaaatttccattctcatcccatcaataatcctaatttccgcaacgaaatcgagatcttcaggggaactgtgcggattgacaagggcttattgtcaaagattattgatgttgccgcacagaacacggcactcaaaatcgagaaggagaagatcgataccgcggatttctacaccaacacatacctgttgtatctgtccattaagcgaatattcgagatgatgaaccacaggaccgagtttccaaacgtattcgtctcctataaaaggggccacgacgagaacggagcaatgctgcgcaagattatcataagccagaagggaagctttccccagaagactctgcaggaaagcattgatcgattgaacaatcataaagaagctggagattttggcgctatcaagaagtatctgaatggatactgcttttggtccgtcgagactcgttgggaagggaagtcatcaaggtggaatattctgcggaacgccaacacaccagagactgaagagctagatcttgagtcagatggattcacccacattcttacattctatttggtttga

SEQ ID NO: 7346 - RNA, 1950 nt, synthetic construct
  source 1..1950: mol_type = other RNA
atgaacctcaaggatcagaatctgatcaattcggactctaaaaacaagacaaagaaacgtgtcctggcccaccagtttcaggggatttttttcaatatgggcaactctgacctgacagagaagcgaaagaagattagtactgcggaagagctggcagctgtcctggacgaaatcaagcagatcgagtttgcaagcgtaagatatagcatcagcgtgaagatgctacggcatttttccagcgataagatcacccctaaaagattcagaacgttccacataagaaaaaaaagcggcgggcttagggagatcaaagcgccctgcaaacagctcgatgtcatccttacctgtgtaaacatactgctcaagtccatctatgagccgagtgatgttgctatgggatttgctcccggaaggtctgtgctcaataacgcacaggtgcacgttggacacaactatgtgttcaacatcgatctcaaagatttcttcccaagtattccgcaggctagagtgtggaagcgtcttcagctcgcgccttttaacttttcccaagagatagccaatatactggcaggcctttgttgctcatacgatgccaacgtgaacgccaacgttctgccacaaggctcccctgctagcccactcttaaccaatacaatttgcgacaagctggaccggcggatgaaaggcgtggccaaacggttcggtttgcactatagtcggtacgcagacgatatgaccttctcgtcaatgcataacgtgtaccaggctgggtctgagtttagattggaaattcagaggattatctccgaacaaggttttaggatgaatgacagcaaaacacgacttcagaagcgcgggtttcggcaggaggtgactggcttaactgtgaatgatatagcaaatgtgtccaggaagtacatctctgaccttcgctggatgctgcatgtgtgggaaaaggagggatacgccaaagcatacgccctgttttatcctaagtacaagcacgagaaggagtacatcaaaaaaggagaacccgtgatggaaaacgtgatcggagggaaattgaactatctaagaattgttaggggcgagaacaatccagcctatcgaaaactgcaggctaggtataacgctctgcaggagctggtatttgttgacaatgaaactgacaagtccaagtcatacgtatacgtccagccttacgctctggcagacttccaggagctgtttaataccacaatctccttgacggttactagagaaaagaaattggtcgggaagtgtatcatcgacaatcgcgagaagaccttgtcaatttcaaagagcacccaaaaaacactgtgcccgaacctcgggaatttgaacacaggcgaactggtgaattctgaagagctggccgagtgctacgtcaccttgtgtcgccataagggcaaaaacttctggctgataacgaaattcgagccaaaacggtcccgttgtctctctatccagaatttaaagatcacccccgacgaaattctagattattgggaccgctatggtctggaaaagaccattgaggacctgactcaatttattcaatacgccgacccagaagattcttttaaagactggcgcctgctcgccgatttcgagcacaccattgacaggggaaagttcaaaatcagtaagaaggatctcattgtcttcttccttaagaacaagaatgtcactagtctgcatcgaaaaaaagccatgcaattaatgatagactccatccccataaatacagatagcgaaaacattgacatcgaaaagttactcgacatttgggaagagaaaggtctggatgaggcggtccttgcctggaaggagatgtcacgcaagaaaaagagcaagaagaaaaaccccgaccctgatcctattgtgaatgatgacgccccccagttcgatctagtgttcgattggtga

SEQ ID NO: 7347 - RNA, 1953 nt, synthetic construct
  source 1..1953: mol_type = other RNA
atggagaaactggatctgactgagaagctcaaaaatatcaacacagcagagcagctcgctaccgtccttgacgaaatcaagcagatagagttcggctcggtgagatatagcataagcgttaagatgttaaggcatttcagctccgataccattgcgccaaaacggtttcgaaccttccatatccgcaagaaaagtcgagggctcagagagataaaagccccttgcaaacagcttgacgtaattctgacttgcgtgaatattctgttgaagtctatctatgagccatccgacgtcgtcatgggcttcacctcagggcggtctgtgttaaacaacgcccaggtgcacatcggtcacaactatgtgttcaacattgatttgaaggatttctttccttccatccctcaggcccgggtttggaaacgacttcagctagctccctttaactttagccaggagatcgccaacatcctggccggactatgttgctcatatgatgccaatgtgaaggccaatgtgctgccacaagggagccccgcaagtccacttttgactaatgcaatttgcgacaaactggataggcgtatgaagggtgtcgctaaacgcttcgggctccattatagccgctacgccgatgacatgacttttagctccatgcataacgtttatcaagagggctccgaatttagactggagatacagcggattgtgagtgatcagggatttcggatgaatgattcgaaaacacggctgcaaaaaacgggttcaaggcaggaagtcaccggcctgactgtcaacgctatcgcaaatgtctcccgaaaatacctttccgacctgaggtggatcctccatgtctgggagaaagaaggctatgcaaaggcgtatgctatattctatcccaaatacaaggacgagaaggggtacattaagaagggagagccagtgatggagaatgtgatctctggtaagttgaactatctccgcatggtgcgtggcgaaaataatccggcctacagaaagttgcaggccagatacgatagtttacaagagcttgttttcgttgacaatgagactgataagtctaagtcctatgtttacgtacagccttacaccgtggtggacttcgaggaactttttaagacaaagctgactctcacggtgacaagagataaaaagctagtgggcaaatgcgagattgacaatagggaaaagacactcgctattagcaagaccacccagaaactgttgtgtgacaacttggataacctgaacgctggcgacatcgtacactctgaagaattatcagaatgctacgtaaccctatgtcggcacaaaggaaagaatttctggcttatcacaaagttcgaacccaaaaggtctaggtgtctgtcaatccaaaacctccgtattgctcctgaagaaattctcgactactgggaaaaatacggaatcgaaaagacaacggagaagctggtactgtttgtccagttcgcgaatcctggggattcactgaaagattggaatccctcagaaaacagcgagcacacaatagaccgcggatcgtttaagatttctaaggatgacctgatcgtgtttttcctcaagaacaaaaacgtgaccagtctgcagagaaaaaaagcaatgcagttgatgatagactctattcccgttaaccgctacagcgaaaatatagacatcgaaaagctcttagacatctgggaggaagaggggctggatgctgcagtccttgcctggaaagagatgtccaaaattaacaagagcaagcccattagccacaagaagaaggccaacactaaaaatcaaagttcccaggacacctttctggaggagatcggcatctctgaggaagagctggcgtccatccaacaggagatggcaaagtgtggtgggaaaccgatcggaaagccaattgccggcagttactctctggtgtga

SEQ ID NO: 7348 - RNA, 1986 nt, synthetic construct
  source 1..1986: mol_type = other RNA
atggagaactcaaacttgactgagaagctgaaatacatcagcacggcccaggagctggctgtggtattggacgaaattaagcagattgaattcgggtcagtaagatacagtatctcagtgaacatgctcaagcactttagctccgacacaatagcacccaaaagattccgaaccttccatatccgcaaaaagtcaggcggcttacgggagattaaggctccatgtaagcagctcgaagtgatcctgacctgtgtgaacattctgctgaagactatctataaaccttccgacgtcgccatgggctttaccagtggccgaagcgtgctgaacaatgcacaggtacatgtagggcacaactatgtgttcaatatcgacctgaaggacttcttcccaagcattcctcaagcaagggtgtggaaaaggttacagctcgcacccttcaacttttctcaagaaattgccaacattctggccggtctttgctgctcttacgaccccaatgtgaatgccaacgttctgccacaggggtccccagcaagcccccttttgactaacgcaatctgtgataaactggacaggcgaatgaaaggagtggccaaacgtttcggactgcactatagtcggtacgccgatgatatgacattttccagcatgcataatgtatatcaggagggctcaaaattccggattgaaatccaaaggatcatctctgagcaagggttctacatgaatgagagaaaaacaagactgcaaaagacaggatcccggcaggaagtgacagggctaacggtcaacgccatcgctaatgtctcccacaagtacatttctgatttaaggtggatcttacatgtgtgggaaaaggagggctacgcgaaagcttacgctatgttttatccgaagtacaaacacgagaagggttacatcaagaaaggggagccagtgatggaaaatgtgatcgggggtaagctaaactatctgcgtatggttaggggcgagaacaatcccgcttatagaaagctacagacccgctacgacgcgcttcaggagctcgtgttcgtcgacaacgagacagataagagtaaatcttacgtctatgtccagccctataccctggtcgacttccaggaactgttttcgactaccatcagtcttgccgtgacccgcgaaaagaaactcgttgggaaatgtgtcatagataatcgggaaaagacccttgccataagcaagtccactcagaagtcactctgccctaacctcgacaatctgaatgccggagatcttgttatcagtgaagagctcgcgaaatgctacgtgactctctgcagacataaaggcaaaaacttctggctaataaccaagtttgaacctaaacgctcttgttgcctctctattcagaatttgagaatcgcgcctgaggatatactcgattattgggagaagtatggtatcgagaaaacagtggaagagctgactctgtttgttcagtttgcaaattcgggcgactccttacagaattggaaccactctgaaaatttcgaacaaaccatagatcgggggggttttaatatctccaagaacgacattatcgactttttcctgaagaacaagaatgttaccagcttgcacaggaagaaggcaatgcagctgatgattgatagtatccctgtcaacacagacagcgaaaacattgatatagtcaagctgctggatatttgggaggaaaagggactggatgccgctgtgttggcctggaaggagatgagcaaaacaaaaaaacttaagcccaactctaccaaaaagaaggccacggagcgcgatcgcagctcgcagaatacgtttcttaaagagatcggcatttcagttgaggacttggctgccttgcaacaggagataggcgagggaggaggcactccgattgacctcgacatagattgggatgatattccatttgctgacgacgactccgagattatcggagaactgtga

SEQ ID NO: 7349 - RNA, 1974 nt, synthetic construct
  source 1..1974: mol_type = other RNA
atgaataaaaccgacatcctggaacagctgaagactatgaaaaccgtggaggaccttgctgtgttgctagacgccattaaacaggacgagtttggctccgttcgctacagcatctcagcaccgatgctcaaacatttctccagcgataaaatcgcccccaagcgcttcagagtattccacatcaggaaaaagtccgggggggagcgggaaattaaggctccatgtcagcaactctacgtgattctgacgtgcttaaatgtgatgcttaaggcctgctacgaaccctcagatgccgcaatgggatttactagtggcaaatcggtccttaataacgctcaggttcatgtcggccacaattacgtgtttaacatagacctgaaggactttttcccgtctatacctcaggctcgtgtgtggaagcggctccaattatctcctttcaacctgtcgcaggatgttgcaaacgtgctcgctgggctttgctgcgccttcgatgccgaggctgggcataacgttctgccgcaaggttctccagcctctcccctcctgacaaacagcatctgtgacaagctcgatagaaggatgaagggcgttgccaaacggttcggcttgcattactctagatatgccgatgacatgacattcagttccatgcacaacgtctatcaggatggctccgagtttcgacaagagatcctacgtattattgaagagcagggattttgcatgaacgataaaaagacacgtctgcagaaaaagggagcgcgccaggaagtaacgggcctaacggtcaatgccgtggcaaacgtaagccataagtacatcagcgatcttcgctggatcttacacgtctgggagaaggacggatacgcaaaggcctatgctttgttctatccaaagtacaagcacgaaaagggttacataaagaagggggaacccgtgatggagaacgtgatcgggggcaaactcgactacctcagaatggtccggggtgaaaataatccagcttatcagaggctgcaggcccgatactatgctttgcaacagctcgtctttgtggacaatgaaacagacaagtccaacagctatgtgtatgttcaaccatattctatgcccgagttccacgagctgtttcacaccgaagtgaaactcgtcatcacaagagaaggcaagcttgttggtaagtgcgagattgacgggcgggagaaaaccctggccatctcaaaaagtacccagaaatccctgtgtcccgatatcgagagcatgcacactggagaaattatcacaagtgatgagctagcgaagtgttttgtcaccctgtgtcggaataaaggcaaaaatttctggctgatcacaaaattcgagcctaagaggtcaaggtgtttatcaattcagaatctgaacgtgtcacctgaagatatcttgactttgtgggaaaaagagggacttgccagtactgtggaagagttaacactgtacatacagtatgcaaatccaaccgactcaattctcagctggaaccctctggcggacagcaaaaacaccatagatcgcggtagctttaatttcaccaaggaggacattatcgcgtttttcctgaagaacaaaaacgtaaccgcctcccatcgcaaacgagctatgcagctgatgatggccaatatacacgagcagtctgatggggatgggattaacgtggtggagctgctgaatatttgggagaaggatggcttggatgcggcagtgaaagcatggaaggaatctaccaacaagcaagtccaacagaagacaaaggcaaagaaatccaagagcaatagtgctagtaagttcactagggaaactggattttccaaagaggcctttggcacgtttagacaggagatagcactggacggtggaactcccgtagaaatcgatatcgattgggacgacatccctttcgacattgacgactctggggtgattggaggcctgtga

SEQ ID NO: 7350 - RNA, 1467 nt, synthetic construct
  source 1..1467: mol_type = other RNA
atggacaaattggtcgtaatcgaacagctgaagaagatgaagactgtgaaggatgtcgcagtgatactcgacacaattaaaagatacgagttcgggtctattagttacaatatatccgagaagatgctcaaacatttcagctcagacacaatcgcgcgaaaaaggttccgtaccttctacattcgcaaaaagtccggcggctttagggagatcaaagcgccttgtcagcagttgcaggtaattctgacctgcttgaacatcctctttaagagcatttatgaaccctcggatgtggcaatgggttttactagtggacggtcagtcctgaataacgctcagatccatgttggcttcaattatgtgttcaatatcgacctcaaagacttctttcctagcatttcgcaggcccgggtttggaaacgtttacagctgccaccctttaactttagcttggaaatcgccaacgtgctggccggcctgtgctgtacctacgacgagagcctaaagttgaacgtattaccgcaaggctcaccaacctctcctctgttgacgaatgccatctgcgataagctcgaccggagaatgaaaggagttgccaagaggttcggaatccactactcccgatacgccgatgacatgactttttcttctatgcataacgtctatcaagaagatggtgacttccgcgtggagatctccaggattattgatgaacaggggtttcacataaacgagagcaaaacccggctccaaaagaaggatacgcggcaagaggtgactgggctgacagttaatgccgttgctaacgtgtccaggaagtatataagcgaccttcggtggatccttgcaatatgggagaaggatggctacgataaggctcaggcactatttaatccaaagtatcagcaggagaaggggtacattaaaaagtgtgagcccgccttagtcaatgtgatcagtgggaaactcaattatctgcgaatgattcgcggtgagagtaacttcgcataccagaagctcgcaaaacgctttgaggtgctgcaggagatcatcttcattcaccacaagaacgacgtgaagaacttcaggatcaatacaaagttcgagctgaagtattctcgctgcctgagaaatcagaaccttaaagtctctctggacggactcttagatatatgggagaaaggagggatcgaatccgctgtcgaggagctggctgaatctggatatatgagcattacctcaagagactccatcgtgtccggcaatgaacacctgctcaactactttctaaacaatccaaagttgaccatgacacatagaaaacgtcttatcagactgcttctggcctacattccttcaaaaccccttaagactgacattgaacaactgcttagtatatgggaaaaagaaggcctggatgccgctgtgcgcgaatggaagaaactgaaggataataaagctaactga

SEQ ID NO: 7351 - RNA, 1572 nt, synthetic construct
  source 1..1572: mol_type = other RNA
atgaaaaaattagagatccgaaatcggctcatagcaatcaagaccgtggaagacctggcggagctgctcaacgagatcaaaaaggacgagtttggcacgaaccggtatgaaattacggataagcagctcaagttttatagctccgataagtatacctccaaaagataccgcacctttcatatcaggaagaaatctggtggtctaagagaaattaaagctccatgctatcagctaaacatcatactcaggatcttgaacattgcactcggggctgtgttcgagcctgactcagtggctatgggctttgcgcccgggagatctgttgtgaacaacgctcagaagcatgtaggccacaattacgttttcaacattgacctgaaggatttctttccaagcatccctcaggcgagggtatggaagcggctgcagcttgccccgtttaacttttcacaagaaattgcgaatgtggtcgccggattgtgctgtagttataatgaggagagagggcagaacgtgctgccacagggagcacccaccagtccgctcctgacaaatgccatttgttgcaatctggaccggaagatgaaaggactcgcaaagagattcggactgcactactcacggtacgccgatgacatgactttttcttcgatgcataatgtctatcaagagggaggcgaatttcgcaaagagctgttaaagatcatcagtgagcaggggttcacaattaacgataagaagacccgccttctgaagaccggctgtcgccaggaagtaactggacttacagtaaatgctattgctaacgtttccaggaaatacattcaggaattgagatggatcctgaacgcctgggagaagtacggatatgccaaggcctacgccttgttctacccccgctataaaagcgagaaagggtacattaaaaagggtgagcccgtgatggagaatgttataggcggcaaacttgactatatgcgcatggttaggggggccaataacgtcgcatacaagcgactgcagacacgtttcgacaaactgcaacaagtcgtctttatcggttccgaagaagagcagacccaagccaagaagttcatgtacgtgcagccttatacaatggctgaattcaaggaatacttccatactgaggtgagcttgactgtgacaaagaatggcaagctagtgggcaagtgcactattgctgagatggagaaaaccctggccatcagccacgccacacaggactacctctgccctgatcttaaacagcacaaggagggcgattgcgtcgagtccaaaaagctcgaaaagtgtaatgtgatactgtgtagggctaagggaaaaaactactggatgataacgaacaaagaccacaagcgggacaagatcctgtctatccaaaacgtcaaaataaatccagatgacctcttggatctttgggaaaaagagggttataaagcagcagccgaagaaatcactattgataatcgtaaagggatgcctgtgctgttaaccttgcccgggctggagctggagcgttcattcgatatcaaacgaaaggacaatgaatga

SEQ ID NO: 7352 - RNA, 1401 nt, synthetic construct
  source 1..1401: mol_type = other RNA
atggagaagctggagatccggaactcattaatcgcgatcaaatcagtggaggatctcgccgaattgctgaacaacatcaagaacgacaaattcaaaacctcccgtcacaagattactgataaacagctcaagtactacagcaataataaatacgcaccaaagaggtatcgcacattccatatacgcaagaaaaatggcggtctgagggaaattaaggccccatgctaccagctcaatatcattcttcgtatgctgaacattgcctttgagtcggtatttgaacccgacagcgtggctatgggctttgcccccggcagatctgttgtgaacaatgcccaaatgcacatacgacataattacgtgttcaacttagacctcaaggattttttcctgtccattcctcaggcaagggtgtggaagcgcctgcaattggcgcccttcaacttctcactggaaattgcaaacgtggtcgcgggtctttgttgtagctataacgaagaacgggaccaaaacgtgcttccgcaaggggctcctacaagtcccctgcttacaaacgcaatttgcgggaatctggatagaaagatgaaaggtctggccaagcgatttgggctacattactctcggtacgccgacgacatgaccttctcttccatgcataacgtctataaagagggaggggagttcagaacagagctcctgaaaattataagtgaacagggatttaccgtcaacgacaaaaaaacccgcctgcacaaagcagagcacaggcaggaggtcacgggcctgactgttaatactaaggccaatgtctctagaaagtacatacaggagcttcggtggattttgaatgtatgggacaaatatggctacgcaaaggcttacgctctcttctatccaaggtataaaagcgaaatgggacacatcaaaaagggcgagcccgtgatggaaaatgttatcggcgggaaactcgactatctgcgaatggtacgcggcgctaccaatccagcttataagaagttgcaggagaggtttgataagcttcagcaggtggtcttcctggaaactgaggaagagcaacctaaaacacagaaatttatgtacgtgcagccttacaccatgacagaattcaaggagtattttctaacggaggtcagcttaatcgtgactaagaagggcaagctagttggaaaatgtaccatcgccggtatggaaaagaatttgtccatctcccacgccgctcaggattttctctgcccgaaactgaatttatgcaaggagggggatagtgtggttaatgagaagctgaacaactgctacgtgatcttgtgtagagccaaagggaagaactattggatgatcggactgatcggacagaagcggaatattctcaagatgaaatga

SEQ ID NO: 7353 - RNA, 1590 nt, synthetic construct
  source 1..1590: mol_type = other RNA
atggacaataataccattatcgaccgatacaaaaagatccacgatgccggcgcctttttgggactgctcaacgccatgaagatcgaagaatatggggaaaagactgaaaagtttagcaccagagacttaaaggtatttatttggccgaacaaccctgaaagatatagcacattcacgatccccaaaaagagtggaggagtgcgccacattagtaaaccatgcccaaaactgaagtacatgctgcgctacgtgaagcagttcctgcaagccttttataaccctatgccctgtgttcaggggttcacgaccgggcgatcagttgttggaaatgccggcatgcatctccaccagaattacgtctataatgttgacctttctgacttttttccgtccatctcccagggtagggtgtggaaaagactccagctccctccgtataatttccctgtcggtctgtgtaatatcatagccggcttggcatgcgcgccatacgagactcccgaaggcgtgaagtacaacgccttaccacaaggagctcccaccagccccattttgtccaacattgtgtgtgagcaacttgatcgacgcctgactgggcttgctaagcgattcggtttgcactacagccgttatgcggacgatatgacctttagctcaatgcataatgtgtatcaagataacagcgaattcatccgcgaactgcagcgcctgattacacaacagggcttcaggttcaatgagaagaaaacaagactgcagatccgtggatcgcggcaggaggtaacggggctaaccgtgggcacaaaggttaacgtgagcaggcgttacatcaaagagttacggtctgttctccatgtgtgggaaaaattcggctacagtgaggcatttgcgtggttctatagtagatataagcgggataagggctcactgaaaaagggcgaacccgtgctggagcaggtcattgaaggtaagcttaactatttgaagatggtgaaggggaattctgactccacttacaaaactctagccggtaggatcgaggcatgcatgacagctctcgacgaggagcggcctaaacacgggaagaggaatgtactggtgagctacgagttgaaggacttctcaaccagattttccaacgtctccatggattttagtacctcaccagatggcattgtctcagggtccctcaccgtggactctgtagccacccctatatactttgacaagattttccggaaactgtcgtccgcaaacaaggctaaggtgctgaaagccataagccaagatacatctgactggtttatctccgaaattgaggatctggacaagaggtaccgcaacaaatttaatcatttctggctgatctctcggtataggcctcatcagtctaccacagtcgataaaagcgagataactagattactgctggagctctgggagaaggatggacttgatgcagctgtggatgaatggaaaaaactaatcaagtacgacccaagtcagaaaagtgagtccatgcaggctacttctctgcagaacccccagaacgtcctcgactcattcttctacgagcaccttaataaatga

SEQ ID NO: 7354 - RNA, 1461 nt, synthetic construct
  source 1..1461: mol_type = other RNA
atggaacgcactgagatcgcaaaccgcgttaaagccatgatttcacaggaggatttgctgcaacttataaacgaactgaaagctgaagacctcggtgataatgcctacccattctctatgcgacaattaagatacttctgtaaccctaacaacgaatccaggagatacatccactttgacattaagaagaagtctgggaaggagccacgacatatcactgctccccagaaaaccctaaagatgatactcacatacctgaaccagattctgcaggcagtgtatgaaccactcccttgcgtcatgggcttcgtgtcaaacaggtccgtggccgacaacgcctctaagcatatcggcaaactgtacgtctacaacattgacctaaaggattttttcccgagcatagaccaagcacggatctggaagaaaatgcaatgtcccccctttaatttctgtaatcaggaggatccgaatgcaccacagcggcgtgtgctcgctgatatgatcgccgggttttgttgcatgaagaaacctatggaggacggcgagatcaaacagaggtatgtgctcccacagggaagtccttgttcccccgtgctgaccaatataatttgcgagcgcatggacaggaggttgacgggccttgccatccgtttcggagcaacttacacacgctacgctgacgacatgaccttttcgagcatgcacaacatctatcaggacgattctgagtttatcaaagaactgcaccgaatcatctccgaccagaattttagaattaatcccgcgaaaactagactgtgcacaaccaagatgaggcaagaggttactggccttacagtaaatgagaaagcaaacgtcagccgcaagtatctcaaagaactgcggagaaacctgcataattgggagtattacggttataatgaagcgtataaacggttttacgctcggtataagatggaagtggggcacaaaaagcatggagagcccgtcatggaaaacgttttggggggaaagctgttataccttaaaatggtgaagggcgagagtgatcctacatatcagaaactgcagaagaggttcgatatccttgtagaggccaaggaaggacgaatgagccagtacgccgatagcaaattccggtatattgtcacgtacagaattgctgaatttgaggacatcatttccactaagattcagataggggttagtgacaatggttacaagtatgctttctatgagaatggctcaaagagaacctacataagtttgtcaaagaacatcgggaaggaaggaattcacaccctcttcatctctctgtgcgagaaccagaaaggcaagcgtttttacctaattcatcgcgccattgaggagaaagccaaagtggagacaaagcaaaccctccacttagatgcgatgctggataagctgttggaaaccaatttcgacatcgatagcatctga

SEQ ID NO: 7355 - RNA, 1590 nt, synthetic construct
  source 1..1590: mol_type = other RNA
atgacccccaacgaaatcgcaaatgaagccaaaagcctccagacacctaccgacctgctggagttgatcaacaaaattaggctgtcagaagatgcccaaactcaccgggctttgtctcttaaggagctggccctgtactgtaatccggactccagtaaagtcaaaaggttccggaccttctttatccctaagaagtccggggggaaacgagagatctctgcaccagtcagcaagttggatgccttcctgtggcccctagatctaatcttaaagagcgtgtatgaacccaaatcttgcgtgatgggctttacatacggtcgctcaatagtggacaacgccaaagcgcacctgggccagaattacgtcctgaacctggacctggaaaatttcttcccttccattacccagggtagagtgtggaagaggctgcaggtcgccccttacaacttcgcaccaaaggtggcctccgtcatcgctggtctgtgcagcatcaagaaggtaaatgatgacggagagacacggtatgtgttgccacaaggagcccccacctcacccgtcttgaccaatataatatgtgaacgccttgatcgccggctcctcggagtggcaaagagattcaacttgcgttacacgcgttatgctgatgacattactttttcgtcgatgcacaatgctctgaaaatagggggcgaagcgtttcaagagatcaaacatgttattgaagagcagggcttcgctattaattcaaaaaaaactcgcctgcagaaagtaggggaaaggcaggaggttacggggttgattttatccgaaaaagtgaacactccaagatcctacgtgcgggatctggaccagattctatacgtgtgggataagtggggatatgagaaagcctacgccagaatgatgttagtgaaaggtgagaaggcttacaggaagaatggacttactacattagagcgagttatcggaggcaaactggactacctaaagatggtgaagggggaaaacgacaaggtgtatcttaagtatctcagtctctttaaccgacttaagaaacaaggcgcacatagtgacgactctctcaactatgtcgctacctacaccgttgcaagcttccaggagctctttaagacagacctgatatttaaggaagagggcgagcatattagagccagctttagactgaacgacgttttccaccctgtacgcattacgagcttcgcgtccaaagcaatcagtgacaaaggcaaagaaaaggagtctctctatatttcactgtgcgaggatgaaaatctcttttggcttatccatatccgtgaacccaaagctgccccatctaccgatctgatcctgcccatcaaaaagataattaagatctgggaggagaagggactcgcggccgccattaaggcagaggaggaagcccggaagaagcagagtagggccgaggagacaaagaaaccaactcttcgcgctatgatgatggctaagtattttccggagctggcagagatcgagggcgagttcaaggatctccctagcctgatggacatgattaaccacttagaagaagatggggagacaaattga

SEQ ID NO: 7356 - RNA, 1755 nt, synthetic construct
  source 1..1755: mol_type = other RNA
atggacgagaatgagatcaaggaccgtgtgggaaagttgaggacaaaagaagacctgttagatctgctgaactcccttaaagtcgctgagtatggcgagggtgtgcatctgtttaccatgaaacagctgaacttctattgcaaccctaagtacggtaagcggtatcagtcttttcgcattccaaaaaagaaaaagggggagttccggacaatttccgccccagtggctgccctgaaatcaattcaacacttcattaacgtgatcctgtccgtgttatataagcccacggatgtcgtcacagggtttgtgaagaataagtcagtggtggacaacgctctgagacatgtcggaatgaactacgtgctgaatatcgacctcgagaatttctttccctctattccacaggtgcgaatctggtggcttctgcagcagaaaccttacggattctccaaggagatcgccaatgttatcgcaggcctctgtgccattaagcaaccaaaaaaagaagttgagtcccccaagaatgcaatcgaagattacgactacgtgttgccccaaggtagcccaacgagtcctatactgagtaacatttcgtgcgagcacctggaccacaagctgcagaaactggccaggtcttttggcatgaattattcaagatacgcagatgacatcaccttttcatccgaagaatacgtgtacagcaggaaggggaaattttggactcagctacgaaggatcatttcagagcacaaattctcaattaacgagaacaagacaagactgctccgcaaaggcgtccgccaggaggtaaccggccttaccgtgaataaaaccgcaaacgtgagcaaaaagtatattaaggagatccggagacacctcaacacttgggaaaagtacgggtacgctatagccttcaagaatttctaccctatctacaagctggaaaagggacatgttaagaaaggagaacccgacttaatgaatgtgctctccggtaaacttttatatttgaagatggtacgtggggagagtgatcctgtctattccaaacttaacacgcgcttcaagaatcttactactggggaggatagttctatagtgttcggctccatgagttaccacaatacccagaaagtcaccgaatttgagaagactatggatacagagataaaaatcaacagaacccaaggcaccctaaagagttatttcttcgagactaaaagcattgcgactaagaaaagacgcaagaaggaaaatagcccttctgagccgcaggtaacaaaagttgatgtgaggatcagtgaaaatgccaattttgagcacaagaaggatttgttcatatctctctgtcgcaacgaaaaaggagaaacattctatctcatgcacaaagagctgttttcgaccgatgagaaaaatgagcggaagctcgagctggacaagatgttgtctgccttggtgaggggcggaaaggtacatctcgaagtgctagaaaaggatattgttaacgaagaaaagcccatttatgaagacactatgagcgtcgtcgaatttgagaagaaacatcggtgcaaggtagagctgagcgaggataagaaatatgcggttgctaaatacaaagtcaagagggagaacataaaaatcagccccaaggttaacccagaggaataccgagaacacagcatcagcaagtataccaaaggctccgactcttcatactacctcatccatagaaagccgcggacagacaagaaatga

SEQ ID NO: 7357 - RNA, 1338 nt, synthetic construct
  source 1..1338: mol_type = other RNA
atggaaatcgatattgtgtcatcggtgaaaaagcttaggaccaagtcagatctcctccgtctgataaatcggataaaggagattaagttcgtagaggtaggactgcagaaaaaattctccccagtaactattaagcagctggaatactatagtgaccctaacaatacgtacaggagatacaggaagttttccatcccaaaaaagagcggcgagttaagggagattcacgcaccccgcaacgcaaactacaaagtgattctgcgaactcttaatgaaatcttaaacaccgtgtacgagcctagcgagtacacaatgggatttgtcagaggcaagagcgtggtcacaaatgcgctgagccatgttggaaagaattacgtctacaatatcgacctaaaagacttttttccctcaattgactatctccggattgctaaaagattacagctgtctcccttttgcttcccaagacagatagcgatcataatcgctggactggcatctatacgtacagacgaaggggatgccgtcttgcctcaagggagcccgctgtctccgattctgaccaacataatctgcgataaattggaccgcaaactctcccggctcgccgagaagtttggtctttcctactccaggtacgctgatgacatcacttttagttcctaccataacgtgtatcaccaggatggcgaattttgtaagaagttgaaatccatcatcgaaaagcagggctttaagattaatgagaacaagactcggctacagaagcgcgggcaacgccagttggtgacaggtatcaaggtgaacaccgagactaacgtcgaccgatcgtatatcaatcaaatccggaatctgctgtacatttggaagagatacgggtacagtgtggccgaacagcgctattatgagtggagactcaaaaataagccactgagctataaacgcactagtctagcctcatatttgaacgggaagattcaatatctcagagccgttaaggctagcggctatagcacagcctacatccatttcctgttcgaatatgagtacctgtacaaggagacattcaaaaagaaaaagcgatacggaatcaactatatagaaaccacccccctcgagcaattcgagaaaaaacttggcgtgcagatcgacatcaataaaaaagtggatgcagatggtcagagccaccggttctctgtttttgaatataagttcatccccaccttcattagtgtttctaaggacatcacgcctgaggacgaaaccaacaaatccaagctgtctatttcaaggtgtattgatcagaggaaaaaagagttctggcttattcactattga

SEQ ID NO: 7358 - RNA, 966 nt, synthetic construct
  source 1..966: mol_type = other RNA
atggatataaaagacaccaacaccctggtatctactattgaaactatcgctccttataacgttggctgggcgctgaccgatagggtcggggatatcaacaacctcgcaagcgcccgtcttcgtacattaagctacaaagagttcgacatccccaaaaaatcaggtggcacccggagaataaccgcccccgtgggtaaactgaaagacgtcctgaagtgtctgagcgtgattctaactccatactacgagcccggagggtgcgtccacggatttacaacccaacgcagcgttgctagtaatgctagtgtgcacatgggcaaaaattatgtccttaacattgacctcaaggacttctttccttcaatcaccgccacaagagtccaaaaggccttacagaagcatggtttgaattcagaagtggctcaccttattagtaggctgacgactctgccaatggcaattgaagatagccagacactgcgcaatgtgctccctcagggatcaccatgctctccgctcctctctaatatggtgtgttccgacctggatcgaaagcttatgggattggccaggcgctttcgggtggattacacgcgctatgcggacgacatgacattctcctctaatcaccatgtatacgcagcaggaggcgagtttttcgcagaattgcgatccataatagaggattgcgggtttaccatcaatgaacggaagacaagactacagaagcgggggtccaggcaggaggttactggggtgatcgtgaacgagaagacaaacgctcatagatcgtttcgaaaaaacttgagagccgccgtgttcgccgctgaaactttcggctgtaccaggaaagagtacaacagcatcatgggcaagattagttacctgtctatgctgctcaatgaggagcggggctgcatttataagtataaggccatcatgtccaaggttatgatcaagaaatga

SEQ ID NO: 7359 - RNA, 966 nt, synthetic construct
  source 1..966: mol_type = other RNA
atggaactcaaagatactgacgccctcacacgggcgattgaggaaatagcgccctattgtgccggatgggctctgaccgagaaggtgggggacatcaatcgcctggcttcggccaggcaccgtattctagcatacaaggaattcaagattccaaagaaatctggaggcaccagaaaaatcacggcacccaccggcaaattgaagggcgtgctgaaatgtttgtcccaaattctgactacatactatgaaccccacgagagtgcacatgggttcatgccgggcagaagcgtcgccactaatgctgacgtccatgtggggaaaaactatgtattgaacatcgaccttaaggacttttttcaaagcatctcaagccagcgcataacacgcgccctgactaggcacggcttgtcacaggatgtagccgagctgatctcccgcctcgctaccataccaaccgtgaaagaaggctctgatatctccatacacgctttacctcaggggagcccttgctcaccaatcctcagtaatatggtgtgcgtggatcttgataaaaggctctccggtctggccaagcagtttagggttgattacaccaggtacgctgacgacatgaccttctcctctaatcataacgtttacagtgcggacggaagattctttgaagcactgagatcaattgtcgttgaatgcggattcgtccttaatgagaagaagacacgcctgcagaagagaggtagccgacaggaggtgaccggaatcttagtgaacacgaagcggaacagtcatcgaagcttcaggaaaaatctgcgtgccgctgtgttttctgcagagactaacgggtgcacacaccgggagtacatgcggattatgggcagaatttcttatctatccatgctgcgaggtaaggaggatccttgtgtgaagcggatgcaggccatcatgagcaaggttgccgtcacaaaatga

SEQ ID NO: 7360 - RNA, 1017 nt, synthetic construct
  source 1..1017: mol_type = other RNA
atgagcttcacggtgccaatcacagtcccgttaccagagacattgccccagctgcacgaggaaatggctagaattgcagttagtacctcagggtgggctgtgcataatccaggcggaagggagttcctctccaaggcggagtctaggtcttttagacagcgattttatcgagagttctcaatccccaaaaaaagtggcggccgccggagaataaccgctcctacaggctatctgaaaggggctcaaaaggcaatcgccgtgctcttagaaagactgtatgaggcccctgacatggtgaatggtttcaccggcgacaggagtgtactgacaaatgcagaggcccatgtgggacgtaattatgtctttaatactgatctgagggactttttcccctcgatcactgccggtatggtccggaagactttggagaaagaaggcgtttcccctgaagttgccaggtacattagcgtggtttgtaccattacaacaggggatggggacctttccgaagatgttctgccccagggctctcctgcgtcaccaattctgagcaacatggtgtgcctccaaatggatagacaccttgattggctcgcccggcggtacgggctgacttatacccgttacgccgacgacattacttttagttcaatgcactctgtgtatggcaaaaacagcccattcctaaagggtttgaaagagattatagaagagtacggatttagcatcaacgaagaaaagacccggcttcagaagaagggttccaggcaggaggtcaccggactgatcgtgtccgacagagtgaacgtctgccgccgctacctcaagaacctgagggctgaagtgttcaggatggaaatgcagggctttacgatcgaggaataccgccgggtcatggggaaaatagcattcgtaggaatggtacgcgggcgagaggatcccctatacagaaagctgcacaaccgaattcgtagcatcaagcgccatcctgagggattccttgcccagccgcggtga

SEQ ID NO: 7361 - RNA, 1017 nt, synthetic construct
  source 1..1017: mol_type = other RNA
atgaaagctatgaaaccctttaagaatatcccggacacactggagcagatgtgtgaacgcatcatgatacggctgcctctggtgtgtcgcaaaccccagctgttgggtatggacgacatactgccataccggcgccgcaaagtgcgtatgaatagctatcacgaattcggcattcctaagagatcgggggggatgcgtgtgatccaagcaccttgtgaagagctgaactacattcagaaggccgttaattctttactccgggagcaatggaccccagccgatgaggtctgcggattcgtgcagggcaggtcagttgggatgggtgctgctcagcacgttggaatgcactacgtctttaacacagacctccatgacttcttcccctcaatcaccgcccctaaggtgtttgaaatgcttatgcgagaactggggatgaagccagccgtggcgagactcatttgcgacctctgcacaatcccagtgaaagagggatatgatgtactccctcagggaagtccagcatcccccatattaagtaacattgcctgcgcgagaatggatcgtcgcctaaagggtctggcagaatgttttgggcttacttacacgaggtacgccgatgacatcacattcagcgccccctataacgcgtttaaagagggcggcactttcaggatttgcctggagagaattattcgagaagagggtttctccctaaacgaagctaagaccagactgcagaaaaggggggggagacaagaggtcaccggccttactgtcaatgaaaaggtgaatgtgcctcgcaagtggctgaaaggcttgagggcatgtatccatcggatggaggtagatggcttttctccggaggagatggatgctgcacggggaaaggtcgcctggttgaggcatgctcgaggcggcttagatcccctcagccagaaaatggtgatgcggctgaacgccttggaagttgccctttatttcgacgagctgccagatgaggacggatccaagatctga

SEQ ID NO: 7362 - RNA, 987 nt, synthetic construct
  source 1..987: mol_type = other RNA
atgaacgcctttctttataacctgggaccagaatctcttccagttggtacacccgacgagctgtgcatgagcatcatgctcgcactcccggccgtttgtcggaggactctgctgcctgggacaggatctattcgtaaatttagacaccctgcccgacgcaccgcagcttatagacggttcgagattcctaagaaaagcgggggagtgcgaaccattatggctcccaccggcgacctgaaggacatcttaacaactgtgaatagtctcctttcgctctattgggagcccaagcacagctacgtccacgggttcacgagcggacgttccgttgtcagtggggccgagccacatgtgggcaaaaactacgtgttcaacctggatctcaaggatttcttccccagtataacaaaacagatggtggcacgggggttggaaagagccggttttgaccggaggactgcaaggtttctgtccgaaatttgtaccgtccccggggacgacggacgagagattttgcctcagggagcccctacttcacccttactgtcaaacatatcatgcatgatgctcgacttacgcctggctggcctcgcagctgaatttagcctggattacactcggtacgccgacgatatgaccttctctgctcaatataatgcgtttggtccacgcggcgatttcaggtcccttatggagacagtaatcagggaggagggcttccggatcaatgagaagaagacgagattgcagaagagaggttcccgtcaggaagtgacaggcctgaccgtgtgtaggaaagtcaatgtcgccagaaagtggatcaaggatctgcgagctcagatccatagaatggaaaccgtgggctttacccctgcagaataccggtctgtttgcgggaaagtgggctggatcaggcaagtgcgcggcgctgtaccaatgtaccgcaaactgcgcgcgaggttgagagccctaccgctaccagcctga

SEQ ID NO: 7363 - RNA, 1014 nt, synthetic construct
  source 1..1014: mol_type = other RNA
atgaccgaagacctcagggattacctacggggctgtatttctaccgcatctattgctgatatgtgtgtctcaatcaacgaaatcggaccttttgtgagcggactgtcaatctccaatcccgtttccgtatctctgctcctttactacacagatgttagagtaagaagagcagcataccacgaatttcagatacccaagaagagcggcggttttcgcaatatcctgagcccatgcggcgaactgaaggagatcatgcatacattggctttcattctgaaagagctgtatgttgcaaccccaccagccatggcctatatcgccggcaaatcgatcgttgacaacgcttgctgtcaccttggacgaaattacgtgttcaacgtcgatctgtccgacttcttccctagcattacggccatgatggtggaacatcaccttgtgaaaataggagtgagtcccttggtggccactgtgattgctacattatgtacctatcctaccatcatcgaccaccatgtagtcaatatcgttccccaaggtgctccgactagtcctgtgatctccaacatttgtgcgacaaccctggaccaccggctttctgggctggcaaaacgattccatctaagctatactaggtacgccgacgatatcactttttcctcaaatcacaacgtgtatcaccccgatggggatttcatgattgagctgtgccgtattatcgacgagtgccactttaccataaacagaaataagacacacctgcagaagcgcggcgaccgccagatggtgacaggtttattggtctgcgaaaagccgaacgtgggaaggaagtttataaaggatctccgggcgcatattcataaaattaagttcgaggaggagccaactctgcatgacatcaacgtggtcaggggcaaactcaatttcctccggatggtcaaaggggccgaggacaccacgtacctcagtcacataaagaagttgaatatggccattaaagggaaacattttgtctga

SEQ ID NO: 7364 - RNA, 1029 nt, synthetic construct
  source 1..1029: mol_type = other RNA
atgaacgctgagttaagggaggaactccggagtcatattaacgttgatactattgagggcttgtgcaaatctataaacgaaatagggccctacgtatcctttctgggcatggattcatccatttcagtcagtaccctcaagtattttacccaagtgagtgctcgcagagacgcttataggcagtttcatatccctaaaaaaacaggaggcgtaaggactattaccgcccccgatggacagctgaaagacatcatgttcaccctcgcctttattctgagcgaactttacatccctagcccagaggccatggcctttgtcccacagcggagcatcgtggacaatgcacagcagcacctgtgtaagaattatgtgctgaacctagacctgtgcgacttcttcactagtattacctcatacatggtggaacgcggcctttgtgaactgggtatctctcctgtcgtggcacagtgtttgagcactatctgtacgtaccctgagttcaaagagaatcgggtccagaatgtggttccccaaggagccccgaccagcccagtaatcagcaacatctgcgcacgacgtctggatcgaagattgtcaggtttagcgagatccttccacctgtcttatacaaggtacgctgatgatatcaccttttcttccaaccacaacgtctaccatcaggacggcgccttcatggcagagttgtatcgtataataactgactgccatttcgccgtgaatgaaaagaaaacaaggctgcagaagagaggggcccggcaagaggtgacaggcctgtctgtttccgagaagccaaacgtgtcgcgcaaacacgtcaagaatctaagagcccttattcacaaaatctcccttgaaggagcgcccgagatgcacgacatcaatgtggcccgcggtaagctcaactttctccgaatggtgaagggggaaacagatagcacgtacattcggctgattatcaagctcaataaagcggttgctgggaagcatttcgctgactctataaaggcatga

SEQ ID NO: 7365 - RNA, 1026 nt, synthetic construct
  source 1..1026: mol_type = other RNA
atgagtctgcaggagtatcttatcgaccacatctgtcttgacacccgagagagcctatgtgagagcataaatgagattggcccatatgtgagcggactgtccattgacaacactattactgttaaacacctccggcgccatgcaaatgctagaataaggttaggttgttaccacgaatttaggattcctaagaagagtggcgggtttaggacaataaccgcgccggacggccagttaaagcacattatgactgcacttgcattcatactgacatatatctatcatcccaccccaacagccatggcttttgtcccttgcaggtctatcgtggataacgccagaatgcacgtaaaccacaattacgttttcaatatcgacttgtgcgactttttctcttcaatcaccgccgacatgatcgaatacagcctcatcaggcaaggaattaattctatggtggcaagagatatatccacgatctgctgctaccccgtctccgatggcacccatacacggaacatcctgccacaaggggcccctacatcgcctgtgctgagtaacatctgcgcccaaactctggatcagcgactgacaggtctggcacagcggttccatctcacgtataccagatacgctgacgatattaccttttcatccgatcacaacgtctatcatgataatggagcctttattcaggagttgcgtgccattattgctgagtgtcacttcgtgatcaacacgaaaaaaacccgcttgcagaagcgcggctcacgtcaggaggtgactgggctcacagtgaatgaaaggcccaacgtctctcgcagatacatcaaaaacctaagagccatgattcaccacatagaactcgacgagcatccatcatgtcatgcgatcaacgtggctcggggtaagctgaacttcttgcgaatggtaaagggggaaaatgatagcacctacattcggcttgtgatcaagctgaatctggctgtccgcggaaaacatttcgcctccgacactcccactgtttga

SEQ ID NO: 7366 - RNA, 1017 nt, synthetic construct
  source 1..1017: mol_type = other RNA
atggatatcgacgtttcctctagagatgccctgtataactcgatctataaagtgatgccttatgtatccaacaccctgctggctagtccgtctgtgctgtacaagaaaattcgcttttataacaacgtcaagaacaggttgagcgcataccatgagttcctcattccccagaaaaccggtggaacccgtaagatattagcgcccaattccgacctcaaatctctgatgtcagcaattgcctttatcctgaacaccatgtatatgccttccgatagtgttatgggattcgtgaaacagaggagcgtgcttacaaacgctaaaaaacatgtcgggaacaactatgtgtttaacatcgatcttagcgactttttcccttcaataacagactctatgatcgaagcccagttactgaaaatgaatataccccctttggcaactcgcattatctctagcgtgtgtacatacccacagaaaatggagggcggcacatacaggcaagttctgccacaagggtcctccgcgtcacccattttatctaatatttgctgcatcagcttggataaggccctagagggcctcgccaagcggttccacctgacctatagtagatacgctgacgatattactttctcctcaaatcacagcgtctaccaagaagacggtgaatttatgactgagctccagaagatcatcgctacacaccactttttcattaatccaaagaagacaagactgcagaaacggggaaccaggcaggaagtgacgggggtaagcgtgaatgagaagaccaatgtcagtcgaaagtacgtcaaaaacctgagagccctcattcaccagatcgcccttgccaagaaactctcaacgaagaaggtgaatgtggcacgcggaaagttgaactacctacgaatgatcaaaggcgttaatgacaatacttacaagaccctgtgtataaagcttaatctggctctcaagggcaagcatttcactccaaaaaagaagcggagttacgtaaaatga

SEQ ID NO: 7367 - RNA, 1182 nt, synthetic construct
  source 1..1182: mol_type = other RNA
atgcattcactagttcactcagcacactgcagaagtctcgatcacccggcacataccaaggtccgccctatgttctcccttctttcgcagattgacaaaataatgcgggatcagatcgtgaagtacctcaaagacatcactattgggaacccaaaggaacttttcgacgttctgaatttcatcgcaccactgatcgatggatggtctttaaccgagccgaagtctggccggcagataatgagattcgccagtgtgaaagcaagacagagcgcctatgtagattttacgattccaaagaagtcaggcggttatcggaagatctctgctcccgtgaagccactgaaggctatacagtctgccattaatatcctgctgcaggccatttttgtgccagatgagcatgccacagggtttgttctgaacaggagcgtcaaagaaaatgccttgattcacgtcggacagacttgtatcttcaacatggatctggagaactttttcccctctatcaccaaattaatggtcagacaggctctccaccgggaattgggcgatcgactccagtccaacgacgtgataaatattatttgtcggctttgcactgtctctgatagtgagggcgtcgaagtactgccccaaggcgcacctactagccctgtgctgtccaatatcgtgctgaagtcactagacaaagacatgagcaaattggcggagcgaatggagtgcaaatactcccgctatgccgacgatataaccttcagccatagcaaaagtataaggaggatgtcacccttctggcagtccagactctataacattatcgctaagtacgggctgaaagtgaatgaaaagaagaccaagacctttgtacccggtacaaggagggaggtgacaggagtggttgtgagcgacaagattaatgtgcctcgcagctacatcaaacagctccgtgtgttactgcacctgtgggagaaatacggatatgcccaagctcaaatcatctttacacgagacttttgtaaggggatggaaaagaacttggtcaacgttattgacggtaagatcaactacctcgaaatgattaaaggcaaagacgatcctacgtatcgtaagtttaagtcccgcttctcccatctgcaatggaaagagaagcagtacagtaaccagatccaaaatgcgatctga

SEQ ID NO: 7368 - RNA, 1080 nt, synthetic construct
  source 1..1080: mol_type = other RNA
atgcgggagcaggtagccgaatacctgaagaacgtaaccatttcttctagaaagcaactgtttgatgccctgaatttcattgcccccctgattgatgtctggtccttggcagccccaaagtcaggacagcagttcttaagattcagctccgccaaatcacgcacgaccgggtatgtggatttcaccatcccaaagaaaacaggtggcgtgcgaaagatctctgcccccgtcaagcctcttaaagaggtgcagtcagctattaatacactgctccaactgatcttcattccagacgagcatgcgaccggattcgtgctgggcaaaagcgttaaggacaacgccctgattcacgtggggcaaacctgtatctttaacaccgacctcgagaactttttccccagcatcactaagaagatggtgagaagagcgcttcacactgagctaggtcatattctgaactcaaacgacgttatcaataccatctgcaggctctgcacagtgccgaactccgatgggattgaggtattgccccagggtgcacctacatccccaattctgagcaatattgtgctggccggattggaccgcgatatggctaagctggcagataggatggaatgtaaatacagtcgatatgcagatgacataacactcagccacagtaagcctgtcaggaaaatgtctagttacctgcagagtaaaatccaccgtataatcctaaagtacggcctcaaggtgaacgaaatcaagactaagacttatgtgcctggcagacggcaggaggttacgggggtcgttgtgtcgtccaaaatcaatgtggctcgtacttatgtcaagaatttgcgcatactgcttcatttatgggaaaagtatgggtacatacaggctcagctgatttttatcagggatttttgccacggcaaagaaaagaacttagagaatgtcatagacggaaaaatcaattacctcgagatgatcaagggcaaagacgacagcacttaccttaagtttaaacgcaggctcaagttgcttcagtacaaagaacggcaaaaaaccacatatacgaaacgggctatctga

SEQ ID NO: 7369 - RNA, 1080 nt, synthetic construct
  source 1..1080: mol_type = other RNA
atgaggacacagattgccgattacctgaaggacctgactattggtaaccgtaaagaactgttcgaggtactcaatttcatcgccccccttgtggattgttggagtttggccgagcctaaatctggcaagcagatcatgaggtacgcttccgccaacgcccgcaagtccgcctatgtggaatttagcatcccaaaaaaatctggcggtcagcggaccataagcgctcccataaagcctctgaaagcaatccaatcagctattaacatcttactgcagtccatctttgtcccggataatcacgcgactgggtttgtcctggacagaagtgtgaaagacaacgcactcattcatgttggacagacatgcattttcaatacagacctggagaattttttcccctccatcaccaagattatgatacggaaggctttgcatagagagctgggtgacaaactccagtcaaaggaagtgattaacataatctgcagattatgcaccgtacccaactcatccggcatcgaggttctcccacagggggcacctacttctccagctttgtccaacatcgttcttaagtcttttgacaaagacatgagcaagctagccgaaagaatggggtgtaaatactcgagatacgcagatgatattaccttctctcattcaaagagcataaggcgaatgtcgctcttctggcagagtcgcatttataacatcatcgcgggatatggccttaaggtcaacgagaaaaaaaccaagacccttgtgcggggaacgaggcaggaggtgacaggagtcgttgtgggagacaaaattaatgtgcctaggagctgcgtgaaacacctgcgtgtattgctgcacctatggaagaagtatggctatacccaagcccagattatttttactcgagacttctgtaaggggaaggaaaagaatctggtgaacgtcatcgatgggaaaataaattacctcgaaatgatcaagggcaaggatgatagcacgtaccggaaactgaaaagttggttcaatcgcttacagtggaaggagaagcaacgcagcaatcagatgcaaaaggcaatctga

SEQ ID NO: 7370 - RNA, 1080 nt, synthetic construct
  source 1..1080: mol_type = other RNA
atgctggatcaaatcgctgactattttaaggataagaccatcggcaacaggaaggacttcttcgatgccttaaatttcatctctcctcttatagatggatggggactttgtgagcccctcagcggcaggcgcattcttagattcgtaacaaaaaaatccaggcagaacgggtacgtcgactttactatccccaaaaaaagtggaggcgtcagaaaaatcagcgctcccgtgaagccactaaaagagatccagtccgccataaacatcctgctgcagtcgatctttattcccagtgatagcgctatgggcttcgtggcaggtaggaatgtgatggataatgcactgatacacgtcggccagacttgtatcttcaacactgacattgaaaacttcttcccatcaataaccaagattatggtgcgcaaagccctgcagcgagagttaagcaataaattaacctctcacgatgtgattaacattatatgctctctgtgtactgtgcctaacaatgtcggagttgaggtactcccacagggcgcgcctagttcccctattctgagtaatatagttctgaagtccttggacaacgaaatgagcaagttggctgggcgagccggttttcgttattctcggtatgccgatgacatgactttttctcatagcaagccaatcagacgtatgaatccgttttggaagtcccggattctaaatatcattgagcagcacggcctcaagattaatgactcaaagacgaagacatttgtgcggggaattcatcaggaagtgaccggggtgatcgtatcagacaaactcaacgtgagccggcagtacgttaagcagttgagggtcctgctccatctctgggaaaaatatgggtacgagcaggcccagaccatcttctcccgcgacttttgcaaggggggtacaaaaaatctgtgcaacgttatcgacggaaaaatcaactacttggaaatgatcaagggtaaggaggattctacatactgcagattcaaacaacgcctgaaaacacttatttggaagcaaaagcaactgtcaaccaacaagacggcatcggtgtga

SEQ ID NO: 7371 - RNA, 1020 nt, synthetic construct
  source 1..1020: mol_type = other RNA
atgaccggtatctctggcaactacattcgccgctttctgtctaagaactcccgacgcaaagcttacaagagttttaagatccccaagaaatccggcggattccgaagcattagtagccctgtgaatgacttgaaggacattcagcgcgccatcaatgccctcttactgtcgatttttgagccctcaccctatgccatgggattttgcaggaaccggggagtggatacgaatgccaaaatccatatcgggcagacctgtatcttcaacactgacttggagaatttcttcccatccatcactaaacagatggtacggaaggcacttcatagagagctcggggacgttattagcagcaacgaggcaatcaactatatatgctccctctgtacagtacctaacgatgagggaatcgaggtccttccgcaggggtcacctgcctcaccagtcttgtctaatattgtgcttaaagccctggatcgtaaactggctctgtacgccgaactatgggagtgcaggtacaccaggtatgcggatgacatcacttttagtcataatagcacggtgagaaagttcagtcaatttaaacagttgcggattagaagcattattgaggagttcgggctgaagattaatgaaaagaaaaccaaggtcctggtccaaggcgaaagactagaagtcacaggcgtgaccgtttctagtaacaaagcgaacgtggctcggaaatacataaaacagctgcgcacactgatgcacctgtgggataagtatggttatgaacaagcacagcacatatacgttagggatttctgtggaggcatcgaaaagtctctgactagcgtgataaacggtaagatcaactatctctgcatgatcaagggcaaacaggactccacatatcgaagattcaagtcacgttacgaaaccgcagagaagaagagaaaggctctctccaaaacaaaagtggtgttataccggaggtctaggaattggaataagaaatcctcaccagctcacctttga

SEQ ID NO: 7372 - RNA, 966 nt, synthetic construct
  source 1..966: mol_type = other RNA
atgaccgatcggcccgagaggacagtacggcattttctgccggctcgcgttcgggccgcctcttatgtggaattcactataccgaaaaaaacaggtggcactcgactaatctgtgctcctgtgcaacctctgaaggccgtgcagagagcgctcggaacaatgctgcagactctgtttcagccctccgacgctgccatgggctttgtcactgacagatcagtcgccaccaatgctagatgtcacctgcaccagaactgcgttcttaatcttgatctcgagaacttcttcccatcgataaccaaagcaagagtgaggcgtgcactcgaacgagaactggccgacagaataccttcctccgaggtgcgcagcctcatctgcagcttgtgcactatccccaatcagagtggaatcgaggttctgcctcagggggcacccacgagtccagtcctgtcaaatattgtgctgaaggggttagatcgacgcttagccgcttttgcaggcgcccacggctataactacaccaggtatgcggacgacatcacattctcccatgatcgccccatccggagattctcaccatttttcatggagcgcgtaaggacgatcatcgaagagtatggactcaagattaatgaccgcaagaccaaggtcagtgttaaaggcgaacggttggaggtaacagggctaacggttggggaaaaggtgaacgtcccaaaaaactacattaagagattgcgtacccttctgcatttgtgggagcactacggctatgaacaggcgcgactgatttactctagggatttcagccaaggaaccggaaagagccttaaaaccgtcatctacggtaaaattaactacctggcaatggtgaaggggcgggaggatcctactgtggtgggttaccgtaatcggtttaggagactcgtgaggattgctaaggccgaagagaggacatctatttcttga

SEQ ID NO: 7373 - RNA, 969 nt, synthetic construct
  source 1..969: mol_type = other RNA
atgacagaacgtccagaacgcattgtgagacgctttctgcctgccagggtcagagcggactcatacgttgagtttaccattcccaaaaaagcagggggatctcgttccatttgtgccccaatccagcctcttaagaaagtgcagcgtgctctgggaacccttctccaggctctctttcagcccagcgaagaggctatgggctttgtggcaggacggaatatcgctgccaacgctcgatgccatctcaatcaaagttgcattctgaacttggaccttgaaaacttcttcccctccataacaaaaacattggttcgccaggctctgaagcgcgaactcgccgatagaatcccgagctctgaagtacggaacctgatatgtcgcctatgtacgattcctaaccagtctggcatagaagtgctcccccaaggcgcccccacttcaccagttctgagcaatattgtgctgaagggattagatagaagattatcggcctttgcagaggcccatggttataattacaccaggtatgccgatgatatcaccttcagtcataaccaccctataagacggttcagcccgttcttcatcgagaaaatccggtctattatcgaggagtacggcctgaaaatcaacgacgagaagactaaagtgtccatcaagggggagcggcaggaggtcactggtctaactgtcggcgagaaagtcaatgtgccacggaattatatcaagcaactgaggaccctcctgcacctgtgggagcactacgggtacgagcaagcccagttgatttacgatcaggacttctgccaggggaccggtaagtcactgaagactgtcatttatgggaagatcaattatttggcaatggtgaaaggcagggacgactccacagtgatcggatacaggaaccgatttaggaagcttgttcgagtaacgaaggcgaaggaacaggcaagtttcacaagctga

SEQ ID NO: 7374 - RNA, 1056 nt, synthetic construct
  source 1..1056: mol_type = other RNA
atgaaggagtcacacattgcagaagctgcccgggaatatctgggcacagggaccgtcaagtctccacgagatcttgcagtcgcgatctgcagatgcggggagctattggacctgtggccactaggggagctgaccctcagccacttaaggcgccttagcactaaggcagtacggaaagagtgctatcggacatttagcatccccaaaagatcaggtggcgcgaggcaaattgcagcccctacgggccgcctcagagatattcagcgtgccattaacttgctgctccaggctcgcgttggcgtgatggaatgcgccacagggttcgtttgtggcaggagtgtaaccgacaacgccctcccacatattggaagtcacgtggtggtgaaccttgacatcgagaacttcttccctagcgttaccaaacgtatggtgcgcgaatccctgaaaagggagactcgcgaatggctcgaatctcacgaagccgtgaacatgctgtgtagcttagtgtctatgcccgacggcgagaaaggtgagatgttgcctcagggagcgccctcatcccccatgatttctaatatagtcctgggccggttggataggaggctggcaggattcgctcgagagcgtggctacgcctatactaggtatgccgatgatctgaccctgtccgggagagagatccgcaagatgagtgctgccgacatgaaactgatcgaaagaatagtggctgaggaaggatttaaattaaatcggcggaagatcaagcaacagggtgccgggcatagacagtccgtaaccggtctgacggtgaatgaacgcataaacgtctcgagagactttgtgaagaatcttcgggtctgtctgcatctgtgggagactaggggatacgaagaggcttcaggaatctaccgaagggactttagagggggtgaggacgtcgatttcgcccgcgcaatcaagggcaagatcaattacattgctatggttaagggacgtcgagatccggtgtttatggctttctcccggcgacttcggctcctcacaggcagaaaatga

SEQ ID NO: 7375 - RNA, 1326 nt, synthetic construct
  source 1..1326: mol_type = other RNA
atggcaacacggaccataaacggacgtgagtacaccaaagccgatttcgagaatcagttgcgatacctgaatgacgctcaagagcttgccaacctacttaatgagctgaaagcgccatatatctatagcgattttcgcggaaagcaactatcatttttcgcagataccaataacatcagaaggagatgcaaaacgttcagactccgcaagaaacacgggggctacagggaaatcaccgcccctaaaggccgcttgcacgacgtgctgcacattcttaacatcgtgttgcagacctatgatgaacccacaccctgggcttatggctttgtgtgtgggagaagtgtcgtggacaatgctaggccacatgtcggtaagcgctacatcctgaatctggacctcaagaatttctttccgaccatcaccagacgccaggtggccgactgtcttatggcggagcctttcggcttcagctctttagctgccgagctggtgagcggcttagctaccgtcaggactgataatggcgaagaggtcttggcgcagggctttgccacttctccaactctctctaacttcatctgcagggaaatggataaggagatcgccggagttgcagctgcccagggagttacatttacccgatatgccgatgacctgacgttttcaagcgacgcagacattctgcggcctcaaggagaactcgcacagcaagtgaaaaccattgtcgagcgatacggtttcattcttaacgaagccaaaacacatctgcagcggaggggtaggcggcaggaagtgactggattaatggtcacagagaaggttaacgtgtcccggagatacgtaagggaaattcggagcctgctatacatctgggaacgttacgggtatgaggacgcatgtcaggctgcatggaagtcatacaagcagcaacatggtaagacaaaagggcaccagcaccatgtgcccctgaacaaggtgctgggaggcaagctgcactatatgaagatggttcgcgggtccgatgatcctctgtacctcaggttcgcctcacgatacacttcgcttcagcagagatccaaaggcgacataaaggaggtggagtataaggcctatatgggcaaatgcttgagtaagtctgggaaagaccgcgtaactagaacgactgtactgagcaatgacaacaccagtacacgacagcggggggttacatccagtaatccatacgatcccggtaagaaaaacaagcggattctcaacttcattgtcatggtgatcatctttgctgcgattatactgataaagctctttctcaaatcccgtctgtga

SEQ ID NO: 7376 - RNA, 1326 nt, synthetic construct
  source 1..1326: mol_type = other RNA
atggctacacggataataaacggacgagagtatactaaagcagatttcgagaacaaattgtgccatcttagcgacgcgcaagagttggcagctatgctgaatgaactcaaactcccgtggtactactctgattttcgcgggaagcagctttccttcctcgcagatactaataacgtgcagaggcgctgtaagacattcagacttagaaaaaaacacggtggctatcgcgagattaccgcccccaagggcggccttcgaggcattttgaatgccttgaacatcctgctccaaacgtatgacgagcctacaccctgggcctatgggtttgtttgtgggagaagcgtggtggataacgctcgaccacacgtgggtaaaagatacatcctaaatctggacttgaaggacttctttcctacgattacccgtcagcaggtagcagactgcctcacagcggagccatttgggttctcaagcctggccgctaaactgatcagcggtcttgccacagttaggaccaagaacaacgaggaagtgctggctcagggatttgctacctcccctaccctgtcaaactttatttgccgggagatggacaaagagatcgcatctatcgccacagcccagggcatcactttcacacgctacgccgacgatctgacctttagtgcagacacggatatcctgcggccccaaggggaattagtgcagcaggtgaaagctatcgtcgaaaggtacggttttcggttaaatgaggaaaagacccatctccagcggcgtggacgacggcaagaagtcaccggacttatggtgaccgaaaaagttaatgtctccagaaggtatgtcagggaaatcagaagtctgctgtacatatgggaacgttatggctacgaggatgcttgccaggcggcatggaagtcatacaggcaacagcatgggaagactaagggccaccagcactgtgtgccactgaatgccgtgttgcgcggaaaactgaattacatgaagatggtcaggggcgctgatgacccgctgtaccaaagattcgttagtcggtacaccagcctgcagcagcgcagtaagggcgatattaaagaggtcgcctataaggcctatatgggaaaatacttatcaatttctgccaaggacaggacaactagcgcaaacgtgctgcccaatgataacacttcttccagacagctaggagcgacttcttccaatccatatgaccctcggaagaagtcgaagcgcatcctgaacttcattgtaatggtgatcattctagtagccataattctcatcaagctcttcctcaagtccctgttatga

SEQ ID NO: 7377 - RNA, 993 nt, synthetic construct
  source 1..993: mol_type = other RNA
atggcaacacgaaccgtgaatggccgtgaatatactaaagcagactttgagaaccggttaaggtatctcaacgatgcccaggagctggcaaaattgctcaatgaactcaaggccccgtatatatacagcgattttcgaggaaaacagctctccttttttgctgacacgaataatattcggcggaggtgcaagacattccgactgagaaagaagcatggcggatacagagagattaccgccccaaaggggaggctgcacgacgtactccatatcttgaacattgtcctgcagacatacgacgaacctaccccttgggcttatggctttgtttgcggacgctcggtggtggacaacgctaggcctcacgtgggaaagcgatacatcctaaacttggacctgaagaacttcttccccaccatcacacgccgtcaggtggccgactgtcttatggcggagccctttggattctctagcctggcagccgagctggttagtggccttgctaccgtgaggacagataatggggaggaagtacttgcacagggcttcgccacgtcacccaccttatccaatttcatctgtcgcgagatggataaggagattgctggcgtggcagctgcccaaggcgtcactttcactagatacgccgatgacctaacattcagcagtgatgctgacatactcagaccacagggtgaacttgcccaacagatcaaaacgatcgtggaaaggtacggtttcatcctgaatgaggcgaaaactcacttacaacggagggggagacgccaagaagtcaccggtctgatggtcactgagaaagtgaacgtatctcgccgttacgtttgcgagattaggtctttgctgtatatttgggaacgctatggttacgaagatgcctgtcaggtccgggggagagctacctcatgcagcacagagagacagcgggggatacggactacctatctgctgatcaagttttgggtggtttcctga

SEQ ID NO: 7378 - RNA, 1323 nt, synthetic construct
  source 1..1323: mol_type = other RNA
atggccactcgtaccgtgaacggaaacgaattcacaaagaccgactttgacagccgccttcgatggctcaatgaaccaaaggagctcagcgcccttctaaacgaggtgctagacgctttttgtttcaccaagtccaggcccgcccagctgaggttctttgcaaacacctacaacacccaacgccgatgtcgcactttcagacttcggaagaaacacggggggtaccgcgaaatcatcgctccgaagggcaagctgagagacattctgcatgccttgaatattgttctgcagacctttgacgatcccactccatgggcctacggctttgtctgcgggaggagcgtggtagacaatgccaggccacacgtggggaaacggtatgtgctgggcctggatctgaaggacttcttcccctcaatcactcggcggcaagtggcggattgtctcacgaccgagccgttaggattttcttcagtagccgccgaccttgtcgctggcttggcaagcgtgaggactgatgagggtcaggaagttctggctcagggcttcgccacctcccctacactgtctaatttcgtttgccaggagatggatcgtgagatagccgacgtcgctgccgctcagaatatcacatttacgcgctatgccgatgacttgacgttcagtagtgacgctgatatcctgaggcctcaaggcgcatttgttcagcaaatcaaaactatcgttgagagacacggatttcggctgaacgaagcgaaaacccacctgcagaggcgaggtagacgtcaggaagtcacagggctcatggtgacagagaaggtgaacgtcagccggaggtatgtgagagaggtccgttcgttgctctacatttgggagcgatatggatacgagaatgcatgcaaagctgcatggaaatcctacaagctgcagcacgggaaaaccaaagggcacctgcatcatgtgcccctcaatcgcgtactcgcaggcaagttaaactatatgaagatgataagaggcgcttcagatcctctttaccagagattggccggacgatatgcagccctgcgcgatgctaatcgggatggaattatgaacgtggaatacaatgcgtacatgggcgagtatgtccccaactctcatcggcgaaggcctgcgggtgatgacggactatacacagaaaatactgcaggtagacatagacgctctggtacacgcgacatttatagtccagaaagaaagggcaaccggattctgaagttcattttaaaagtggcaatgtgggccgctatcatactcgcctacctgtatttcaggtcccggtga

SEQ ID NO: 7379 - RNA, 1314 nt, synthetic construct
  source 1..1314: mol_type = other RNA
atgacctccaaaacctttgcccgtaccgatttcgatcgccagctgcgtcagctcagctctccggcagaactggcagctctgctgaatggcgtgttgccagcgttcttctacgccatctgccgacccgctcaactgagattcttcgcaaacacggccaatatcgaaagaaggacacgcactttccgcttgaggaaaaaacacggaggctaccgggagattatcgcaccgaagggggccttcgccgacatatcaagagtgctgaatactgtcctgcagacctacgacgagcccactccatgggcgtgcggctttgtccgaggtcggagtgtggtagataatgcaaggccacatgtcggcaagaggtacgtcctgtcactggacctaaaagacttttttcctagcatcacccggcagcaggtggccgactgtctagctgccgagccttttggcttttctcctggagccgtggagttggtgagtgggctgtgcacagcccggctcgatggacaagacgttctggcacagggcttcgccaccagccccactttatccaattttgtatgtcgcaagatggacgagcagctggctgaactggctgggcagcaagcagtgacttacactcgttatgctgacgaccttacattcagctctgatgccgacgtcctgcgacccacaggagacttcgtgcagagagttgaggatatagtcaggagccacggcttcgaacttaacggctccaagacgcatctccagcggagaggtagaagacaagctgtgacagggctaatggtgaccgataaggtgaatgtagcccggagatatgtacgccaggttcgttcccaattgtacatctgggagaggtacgggtatgccgaagcctgtaacgcagcgtggaagcactatcggctccagcacgggaaaaccaagggtcaaggccattttgttaacttagatgccgttctgcgcggaaagctcaactatttgaagatggtcagaggagctgaggacgctctctaccagcgactgcagagcaggtatgataggctttgggcaaaagatcgctcggcaatcggccacgcggtgaggaaggcttacgccgaaaactatgaggcgaaacagggacagcacggaaggcagagttggcttacggtggggtcaaaacccacaagtgcaccagctgaggaccgatatcgcgccggttccattgataaccctcttcctgctgaagggtcacggtctggtgtgaagcggattttaaaaattgcattgtgggttgccgccctcgctgccgtggcttactttctcctgcattga

SEQ ID NO: 7380 - RNA, 1437 nt, synthetic construct
  source 1..1437: mol_type = other RNA
atgatacgccaaaagcagaacctgaagttcgataaagagacggtcgaccgacaactgaagaacctggaatccgccaaacagctggcacagatcttgtatgacgccgtcaatgatgtgcggagagagccctattggctacgaaccaactccaaaaatggttacctgtatgactccatgcctcttgagtggcgatctgtttcccagctgaactattatgtagataccgccaaggatgactacaatcgattacggattttcaatatacccaaaaggaaaggtggtttcagggaaattgttgccccaaagcccgcatttagagtgagactcaaggcgattctgaagatcctgcagtcgtacgaagaagctacaccgtgggcctacgggttcgtgcaagggcgatccgtggcagacaatgccgccttacataccggcaagaattttgtgttaaacatcgacctcagcaattttttcccttccattactcgggagcaggtcaagcaggtcctcagtgctaagcctttcgaattttccccattcgccgtggacttcataagcggcttgtgcacgtaccgtaaagatggggtagacgttctcgctcagggatttcccacatcaccacttctctctaacttcgtgtgccgccaaatggatgaagatatcgctaaagtggctgcggagaataacgtgactttttcaagatacgcggatgacattaccttcagctctgatgtgaatgtgtttgactttaacggcgcattctacaacaagatcaaagaaatcatctcaagttacgggttcgtgatcaatcaaaagaaggtacgcctgcagagcaaaaccaggcaccaggaagttacaggcattgtcgtgaataaaaagcttaacgtctctagacgttatattcgggagatcaggacccttttgtttgtctggaaaaaatacggctatgaggctgcttgctgttgtgcctataggaataaccgcaaaaaggactaccataagtattaccactctattgaggttagtaagttcctcaggggaaaaatcaattatctgggaattgttcgcgggaaagacgacagcatatatctacggtttaaggcacagtttgacgaactgtacaaaaacgagagcgatgtgatgaaatcatacagcgacatgctcgagaaacaccggttgcgcagagaaaacaacagcgagtgtgaggaaatgtctgacaagtcgtgcggcgtgtccactaatgacgaggcaggcaacagtgtatctgcaaatagttcaacagatggaaacggataccagacacggatcgatagaaacagctacctgcgggatgctgatgataaggagagaaggaagaaggacaggcgtactatcatcctgatttgtttcgccttcctgattatctttcgcttgcttgtcttcatattttttaaggcctga

SEQ ID NO: 7381 - RNA, 1206 nt, synthetic construct
  source 1..1206: mol_type = other RNA
atggcacaggtaaaccgcgacgtggatcttaaggcccttgtcggtaatcagctgcagtacatttactccgcggaagagctgactaacgttttaaacacactggcgagcaatgtgggggtcccgagcgacttccggcgaaaccagatgctgtgcttcgcagacaccaggaatgactaccgcagggtaaagcggtattttatgcacaagaagcacggtggaagacgccccatagtcgcccctcaccatagcctgatgcacatgctacaggggtttaatgtgctcctacaacagtataatccacccacaccttggtgctacggcttcgtgaggggccggtcagttgtgcaaaacgcccagctccacgtcggcaagagatacatcctgaatgtggacattaaagacttcttccctagcatcaccagacagatggtggaagatgtattgaccgctgctccactgagatgctctacagaggccgcccagttgctgtcagggctttgtaccgtgatagagccggtaggcgacgtgctgccacagggatttcccacttcgcctacgctctccaatatggtttgtcggaagatggacgaggagttagcagctgccgcccaacgtatcggggcaacgtatagtagatatgccgatgatatgactttctcatgtgataacgatgtgctgagaacaacaggctctttttacctccaggtgagtacgattgttgaaaaatacggctttcggttgaacgatcggaaaaccagactgcaaagacggggaaggcgccagcaggttaccggtattgtcgtctcccataaagtcaatgtcagtcgcgagtatgcacgccagatccgttccctgctgtacatgtgggaacgctacggatactgggagacagccaaagctgctctccacgcttatcgagagcaaaacgggaagactaggagacatggagaatatctcactttgtatactgtgttacgtggtcgactcaactacatgaagatggtgaaaggcgaaaccgaccccacctatctaaagctgtggaacaaatacaaccagctgatgttgcgagacaagcccaaacggaggcgcgtgctcactgcacttacaaggatcgatcaaaggctgcaggcgccaaccatcattctcgctaataggaatgagcgagtggcccgtgttctgtggcagtctttgtggcggcttcattga

SEQ ID NO: 7382 - RNA, 1239 nt, synthetic construct
  source 1..1239: mol_type = other RNA
atggctcgcaatcatcgggatgtcaaccttaaagccctgatcggaaatcagttgcagtatatctactctgccgacgaactgacgaacgtgctgaacaccctggcatataacattggggagcactctggcttccgcaggaaccaaatgttatgttttgcagatacgacgaaagacaaccgtcgggctaagagatacaggatgcataagaaacacggtgggacacgggccatcgttgctccacatcagtcgctactgtacatgcttaaaggatttaacgctctactccagcagtattacgagccaacaacttggtgttacggcttcgttaagggcaggtccgtggttcagaatgcacaacagcacgtgggcaagcgttacatcctcaacattgacatcaaggactttttcccttctataacccggcagatggtggaagatgtccttctcgccgaaccactaaagtgttccacagaggcggctagactgctctcaggcctgtgtaccgcggctgagcctcaaggagatgtcctgcctcagggattccccacatcacccaccttaagtaacatggtgtgcaggaagatggatgaagagctggctgccgcagcccaacgcataggtgccacctatagccgctacgccgacgacatgtccttctcaagtgataaagacgtattgcgccctacaggatccttctatctccaggtaagcggtattgtcgagaaatacgggtttagactcaacgacagaaagaccaggcttcagcgacgagggaggcgacagcaggtcacaggtgtcgtggttagcaataaagtgaatgtggcccgtgagtacgcgagacagattcgaagccttttgtatatgtgggagcggtacgggtattgggaaactgctaaggccgcattaagaggttattgcgaacaatacggcaagacccgggggcacggcgaatatctgactctgtatgcagtgctgcggggccgcctcaactacatgaaaatggttaaagggggcactgacccgacctacttgaagctgtggaataagtacaatcagctcatgcagagggatactccaaaacgcaggcggggaacttatggcacaaatgctcacagaccggagccctctagtaccaatgattacctgggcgagccccaaagaaagggatgcgccggggtggtagcgctctttgtggtgcttactctggccggattgttggcatgcaatctgctggcctga

SEQ ID NO: 7383 - RNA, 1239 nt, synthetic construct
  source 1..1239: mol_type = other RNA
atggcccgtagaaaccagaatataaacctgaaaaccactatcggcaatcagctgcagtatatctacagtgccgacgagctgactaatgtgctgaatgacgtggcaaaacagatcggcgtgcaggctggcttcagaaccaaccagctgcagtgttttgccgacaccggtaaggacgaccgcagaacaaccaggtataggatgagaaagaagcatggcggaactcgagccattgtggcgccgcactcttcgctcctgtttatgttgcaggccttcaatgcccttttgcaagatttctacgtccccacaccttggtgttacgggttcgtgcgtgataagagcgtggcgcagaacgcacagcagcacgttggcaagcggtacattcttaacatcgatctgaaggactttttcccttcaatcacacggcagatggtagaagatgtcctgctggcagaaccaattaaatgcagcactgaagctgctaaactgcttagcggcctttgcacagcaacggagcctcagggtgatgtcttaccacaggggttcccgacatctcccaccctatcaaacatggtatgccggaaaatggacgaagaactcgccgccgctgctcaacgaattggcgccacttatacccgatacgccgacgacatgacctttagtagtgataacgatgtcctacggacgactggatccttttacatgcaactgtctaccatcgtggagaagtatggctttaggttaaatgagcgcaaaacaagactccaaaggagggggagacgacagcaagtcaccggggtggttgtgagcgataaagtgaatgtaactagagagtacgcccgccaaatcagaacattgttgtacatgtgggagcgttacggctatgaggacgcctccgaaaaggctctctggaactaccgcaatcagcatggaaaaaccaagggtcattccaaacggataaacctgtccgctgtcctcaggggtcgcctctcatatatgaagatggttaagggcgaggcggaccccacctatctgaaactctggaacaaatactgtgcacttcacgctgccggatatccaaagagcaagacacggaagcgcggaatgaggcctgctaacgatgactctatgcacgttgggggatatttgggggatcccccaaggcggggatgcgctttggtgattgcattctttgcattactgacgttcgcggggctgctggcatggaatctctacgcctga

SEQ ID NO: 7384 - RNA, 3048 nt, synthetic construct
  source 1..3048: mol_type = other RNA
atgatgacgtttatcgggttttggaccgctataaacggcctcgccgctgtgaacaatcaggctgcctttggcaaacttgagtgcttaagatacggagacactactctgccagacaggtacaaaatgtataacatcccaaagaagttccagaagaaaggtctgtccgtcagggctatatacgctcccaatgaccgccttaagtactttctcaagtttgctaacaacatactttctgaacagtacgtgcaaaacaattatgcttatgggtatgtgaagggccgaaacattgtatctaacgcaagattacacacaaacaagcactatgtgtgtaacctcgacctgaaagatttcttcccaagcatcagttacgatcgagcatatcttgcggccaagaagcacttcaaagatattgaaccgagcatcctcgagttgtgtattaaagcttcctgcgtgagcgtcgaccataaatgctttctggcgcagggttcccccctcagcccacttctgtcaaacgtcgtctgcattgacctcgacaaccgcctgtattcttactgctccgataatgggtttagttattcccgatatgcagatgacatgactttttcaaccaatcacacagataaatcagctattgagctacacatcaatacgatcaagcagataattaagcagagcagtttcaacattaacgaagagaaatgcaggatccagtccaatcaatacaatcagagcgtgacagggcttacagtgaacgagttccccaacgtgaaaaaggaatacatcaaagatctgcggaacatcctgtacatctgggagaggtacggatacattgacgctaataggcggtatcaaaggaaatataggatcgccaagcgcatcaagcccttaagtgacataatcctgcctaggatggaagacgtgattcgtggccggatccagtttcttaagaccgtcaagggctccaatgacaaccagtaccagcgtttcaataacaaatacacctcattgctcaaccgcgattgtaattttattcccacccacaagcccaataaatatattgaggggagcaatttcaagatatatcactccattctgaaggaccaagacggcaataattacatccaactcgacaagttcgaacgggcaatcgtgccagataactgtctatccctcctgaaattatgccaatctaatgcgtggagcaaaattataaagaccatcttcaacatccgcccgataaacaaagcaaattacaaatgggcccttcagctgaatagtaatacccgaaagaacgctgttaaatacggactgcgtgcctataataaacgcgagggcggttatgaagacgccgccaacctgttaagaattgcaatcgagctcggcaactacaattactttgaccagtacctgatctcttgcaagctcagtaatcagagccataacttgatacctgaaaatatcgagtacctcgaggccaacgagtacgggacgctgttgaaaaaatatgctggatattatagcgccaaaggtttcaagatctctcagatcatcggcaagagtaacggagacagcaccgtagatctatacaagacccctattcatcctatccgcgaagaacacaatgtcacagagaatatccagtggcataatacaactggagttggcatatacctgggagtcaacgaatatagatgtctagacatcgataatgtgaatggagatatcgaacgggttataatcatgatgctgcacctgctgcatctgcccctggactattcgtgggttattaagtcgggctcggggaaaggcttccatatcatcttcaaagcagaaaacatagaaggcttcaaggccgatatcgtcgcattttctaccaacaagaaaaaccacagagccttcgagagaattgagctgaggtggcaggagtgtttcctggtgctaccgccaagcctgcatagatctgggaatttctatggctttcggaacggtgatattcctacctataaccctatgcacgttaagcataacgacataaacactctcctggattacttttgtggttggacaaagttcattgagttgaagtacaacaacatcgactttgatttggtctacagatccaaatggggggccgactcctcatgtgggagtgtgtcaattaacctcccaatcgaatggctgagcgcatgcaacagccctgtgtgcgcaaatgaactggccattcggtacttaattggggagtcagtaagcccagataataacaaggcagtgcagttattcagaaaggccaataacacactgagtgcatataaccttgcttctttgatagcgattggatacatagatgacattggtgaattcaattccctcatttccaaatgcaaagatcatattgatgagatagacgtgcacttcaataactccaagcaccgcatcgaacgcgtgatccaaatcttcaatcagacccaccagaagaagctctatgtgtttttcgatacagagacgaccggcattcctctcgattacaatgcccctatttccgacattgacaattggccccggctggtacagcttagttggatgataaccgatgaggatgggaagctgattaaagaaaacgactacatcgtatacccaaaaggcttcgatatccccacttcatcaagcgccatccatggaattactaatgaatacgccaacaagaaaggtatcgacattgagactgttctggctgagttcattgaggacctcaagggagtttctctggtgatcggccacaatatcaattttgacatcaacattgtccaggcggagttgtttaggctggggatgactgacatctttaatgataagcggaaagtgtgtactatgaagtcttcagttgatttttgtgccatccccaacaagtatggatataagtggcccacattgcaggagcttcaccaaaaactatttggcgagatttttacagactctcataatgccctgtctgatatccgtgccaccaagcgatgctacttcgagttgaaagaaaagggaattttgtga

SEQ ID NO: 7385 - RNA, 1971 nt, synthetic construct
  source 1..1971: mol_type = other RNA
atggacgaggtgatatatttttcagatagcgacataaccgagcggtacagactggccagcattcctaagcgcgattcgaacggccgattcactaagcgacggaaggtgtacatgccaaccccccgcctaaaattctttctccaacaggcgaacagcctgttgtccgccatctattctccgccaccctgtagctttgcatttatcaagggtagaaccattgtgggaaacgccactcctcatactaacaagaagtatattctgagcttggacatcaaagacttctttaattcgatttccatccagaaggctgtaaacgctattaaatcagcattcccatggcagttccggggggagtttatacaggcaatcgtaggggccagtagcttaaatggccaccttgtgcaaggtagccccctctcccccaccatatccaacattgtgtgtctaaacctggacaaaaggatctcttcttactgtgaaagccttaagatatcattcactaggtacgcggatgattttacgttctccagtaacgacttcgatttcaagcgggattcctctttcttagataacatcactaagctgatctctgaggaaggattcgctttgaataatgagaagacccacatccagttatataataacaagcaggtggtcaccggtttggtcgtgaactctaaagttaatgtggctcgccgttacattaaggagatcagaaacatcctctatatttggaagcgctttggctacgacgaggcactcgagtcctttcgatttcattacctgcacatctctaggaaaattggcagttccctaagaagtcggatctcatacgaagacgaaaagcggatcttacactctagaatggtcaagaaagccacaaattactcacctcgtttggaccagcatattctggggaggctaaatttcctgaagatggtcaggggtgagaacgattatcagtatcttcagctcacccaaaaattcaatgagctcagtaagaaactcccgtacaaaaaggataaagacggcagctattcctttaaaagcattcaacactttgagtgggcactggggtgtctcgtgctgactgatgatgtgaagaacgaaaatggcacacaatttttcaagatgaacaacggcggaaaagctattattagcacgaagttactcagcttcctttcctccgtagaaccagaatactatagtgttgcactttccctgattaagtccaaatgccgggtgaaagccatcaacctggaagccaatctgtttatcatctgggccacacctttggacctgaagaagtacagatgggcgattatcgacgccgtgtacagggctgctagagatcgttatgaaagtattcattgccttgccaaggttgaaaggtcagagatagaaagcctgcacaaagactttcagttcgccatgaataatggaaattacgccatgattcatgcatatcttgacatatgcaatttcctgaacctggatagcgggctgtaccctgaaaattttgaccttctcaacagtaacgataagagcattctgctgcagaaatggggttggaactactattcactgtacatcgacacagtgcccaccgataaggacggagtacctctaagtgaatctactttcgacaattaccgccgccagtgggggtctaactttgctcacctgagatggaagggagctgatggcatagccctcgttgcgggaacaaacaaatgggtgatagaagtcacagacaggaatctcgatgaggacgatgttatgcgcgagctgttgtccaataaagagattgaagtctgcatcatccgaaagccaaccttgctgctcgttgtgaataaagacgtcctgcaggagaaagagtatcagggcttcacgatccacaaatcagggtactattctatctatccatacaaaggcgagcccatggagatcaagacaatcgagctgtcgtga

SEQ ID NO: 7386 - RNA, 1470 nt, synthetic construct
  source 1..1470: mol_type = other RNA
atgcctaattgcagtaactgttacaagaccctcgacgaaggcctcaacttctgtccatactgtggagcgagggtgtctcactccggcgataaactctgtccctcctgcaaccaaattttcaatgaatatgacggcagcttttgtggtcgttgcggctctagattgatcgtgtacgagagagaacagagcacgaacggacagcatgtaataaacagcgtcgacgatcttattgctaccatcaactctttcatccccaaaatcgattccaaagctgactctatttctaaggaggagctgttatcattcggaaatatcaacaatgaccgacgctacgagattttctatatccccaaaaagcgtcggaaataccggatgataagctctccaacccctagactgaagctgatcctgaggtgcttgaacgagattatataccagcatttcgctcccgcagggtatgtaactgggtttgtgaggaacctctccattgtggacaatggccggatccacgtgggccagcgatacgtatatactatcgacctggcaaactttttcgagagtgtgaccccggatatgatcatcccatatttgtgcaaagcaccttacaaccttaatccagaagtagcagacatagttgccaaaatctcatgtgttaagaacaggcgcaaaaactctatcggcctgagccagggtagtccactttcccctgtcctaagtaacatagtgtgcgcagacttagacaaaaaattgaatggattagcctccctgtaccgggccaagtatagccgatacgctgatgatattaccttttcttcctcaaacaacctgtatctccaggttaacgactttgagaagcggataattgaggccgtggaaagctcaaatttcaagatcaactacaacaagatccacctgtgtggccctcaatcaagacattatgtgactgggattgtgacaaattcgaaggttaatgttccgagagagtacatcagcaatatccggaatctactttatatttggagcagatatggggttaaggaggcgtacaaaaggtttgatgtgtggtacaagaaatacaggaagggcaaaccgactccattcattggtgattttctgcgcgggaagatagaatacctgggtgctgtccgagggaaaaacgaccctatttataagaagttcaagaattgcctggagtccctcagccagatcaattttaagacattttacgagcgccccaaacgtatgaaggtcagttttaatctttcggagcccctggtcaaatacggaagaacgtattatacagccgaaacaaggtatcgcggagaactggtgttgattagtcccaaactcaatgcctacattgaatccggggtcgattactcacctgcccgcgtgctagccacaaattgcgtggtctataagatcttcgataaggatggagtgaagctcctgatgaccactgaaaattga

SEQ ID NO: 7387 - RNA, 1146 nt, synthetic construct
  source 1..1146: mol_type = other RNA
atggctacccacctgtccacgatatgctctgccgaggagttgaggcaggcaatcaatagatccatcacccaaagcgggtattcccctttgagccccgcccgttataagtttttgacaacctctgttaccatgccatatttataccggcactttacgataccaaaacgacatggtggcggccggaagattgatgcccctaagaaaatgatgcaagcgatccagtctgctctgctccctctgctggaaggctcctttgtaccttcgtcagccgtttgcgggtttgtcaagaatcgatcagtggtgaacaacgctctcccacacatcggatgtggagtgctgctcaacatcgacattaaggacttcttcccgtcaattactcaccagatggtcactgacgcgcttgtgtctgagcttaagatgggacaagaggccgcccacgctcttggctggttatgtaccatccccaaaaaagggcagcgtgtgctccctcaggggagttgcaccagccccatactcagcaatatcgtgtgttcgaggatggaccgggagctgctaacactgtgtgcagctcatggagtcacatatactagatacgccgatgatctgagcttcagcgcaaaggagaactgctttgaagccggtagtgaattccgccagcgcatggaagagattattaaggctacttccctaaagctgaataaccgcaaaactcatatcgcctatccggggaggcggatggaagttacaggcctcgtggtcgaacgccgagcgaatgtagccagggattacatactggagctcaggcagctgttgtacatctgggagaaatacggagaaaaggaggcagctatttcattctctaagcatcacggtgaacggacccatagaagtcccattagacagatcattcagggtaagttggccttcatgagtcaggtgagaggaaacgacgatcccatcgtgaagcggtactccagctggtttgagcgtctgaaaaagaggccgcgcaaacagcagagaaaagccacaccacctcctcaacccacccccgttacaccaccagcaaaaggcgggtacttaggcatggtggcactgcttgtcggcctgtctatgcttatggtggtggcggtagctgcagtcttctga

SEQ ID NO: 7388 - RNA, 1134 nt, synthetic construct
  source 1..1134: mol_type = other RNA
atgaagtctgtcgacgatttcatcaaacttctgaacggcctgaggtactctcgctacggcgaaaaatgcaaacccataactagaaatttgctctattactacgcaagcaataaggtcccaatctcgaatctgtacacggatatttacattcctaagaaatcaggaggcaaacgtaagatccaaattccctgccgagggttaaaagagatccagggctatattgctgagatactaaacgcacttttcacaccacagagctgtgttacaggattcgtccgcggtaagaacatcatagacaatgcgaaacctcacgttgggcataaatatctgctatcctgggatatcaaggacttcttttctagcatatacgccaaactggtgaaatactgtctggtaaacgatccattcaattttccagatgacattgccaatctgatcacgaacatctgcggtgtcaggattgaggaggatagctgtaagagggtgctccctcaagggagtccctgctcccctatactcagcaacattgtgtttgccgtgttcgacaaatatattgttgatcactgcacctggaggggcgtcatctatacccggtttgctgatgacatgactttctcagctgatcacgacttctattacgactccagattttcttggggtcgcgtgctcccttccaacggccagttttatcataacaagcacttgagacagtttttctatctcgcaaagcggctgaatattaacaaaaagaagaccaggaagtgtaaacaggggcagcgaaagatcgtgactggaattgttgtcaacgacaagttaaacgtgaagcgggagtatgtaagagaaatccggaatctcctgtttatctgggaaaaatacggatataacgatgccaaggcccgtttcaataatcatgtgcacaagagtacacccaatgccaagccgagcgaattgctgaacgtattggtggggcggatctactttattaaacaggtgaagggcaaaaatgaccccatctttttacgcttcaagacaaagctcaagtacctgtgtagtatcatgaatacctccaaagctgtgagtatcagactgaagaccggtctgttcattaaaggaaaccttatatcacttgactga

SEQ ID NO: 7389 - RNA, 1275 nt, synthetic construct
  source 1..1275: mol_type = other RNA
atggaagacatcgacactaaaccaaggtccgggccatctaccgtgtttcatttgctggggctcctcaataaggcaaaacggcaagagtttgggtatcgtgcctggccgtttactctggaacagctgttcttctttagtgatcctaaaaagaaccacatatactacctgcaccacttcattcccaaaaaaagtggcggcgtacgcgagatttcttcaccctcttggatgcttaaaatgttccaagcctccgccaagaggcttctacaagataaatacgtcgcgcctgacaacgttatgggattcgtctctggccgttccgtcgctgacaatgcagcccggcacatcgggaagaactatgtgtttaatgccgacctgaaagacttctttcccagcataacacgcgatcgcgtgatctcaagcctaatgaagccgccattctgctttgggaaggaggccgcccttcttctcagcgggatttgctgcgcccacgcagacctgactcagaagggcaaggatacgtattgggtggtgcggggcgaaggaaaacgcggcaagctgatggacgcttcaaactaccatccagccgtccctgcgacactaccacagggtgctccctctagccctgtgttaagcaacgctgtgtgtcttactctcgataagaggctcgatggtctggcgaagcgatacaaagtgacctacacgaggtacgcagacgacatcaccttcagtagtaatcataatgtgttccgagagggcgactccttcctcaaggagttcaggaatattatcaaatccgagggattcattctgaacgaagataagctgcgtctgcagaataaagggcagagacaggaagtaactggactgatcgtgaacaagaaaatctccgtttcgagacagtatatccggtccatcggcagcttgttatacatatgggaaaggtacggagtggacgctgcttacggtagatttttaaagtacaagaccgatttggaggttaccgctgataatagacagctgtgtacctatgtccatccccacctccttgagacaatgcagggcaggatagcatatgtgagaatggtacggggcgaggatgatcccgtttggaagagactgaacgaacggtttttgaagctgaaagcccaatatgaatctagaggagtcatcggtaaccctacacgcattctgcattcatggacaattaagcgatttgagcagctgagtggattccacctccgctatggtccattgtatagctttatgtcaccttga

SEQ ID NO: 7390 - RNA, 1566 nt, synthetic construct
  source 1..1566: mol_type = other RNA
atgacttacgaggagaaggccctccgagaaaaggcctttgatatagagacgaaagaagatcttttgagcttgctgaatgatataaaagctgaccttactcacgagacaagttatccgttcaccatgcagaccatgatgcgctattctcggcccggagtgtactcatggagatacaaaaagatcttcgtgcctaaaaagacaggaggtgctagggaagtctacgcatcatggggcactctgaaatggctgcaggtgtgcgtcaacgaactgctccaggctctctacgatccttctgactacgcaatgggctttgttaaacggcgcagcgtggtcgataacgctaaagcccacgtttaccaaaactacgtgtttaacatagacctgaaggacttcttcccaagcatcacctactcccaagtgaaaaattcgcttcagcagctgccatttgggttcaatgaggagattgcgaaaataatcgctggcctgtgtaccattagtgatgacacccccgacctgatgcctaaaggaaagaaggaaaggaagagatactttttgcctcagggcgccccatctagcccagttctgtccaatgcagtatgtatttccctcgaccggaaattggcaggcctggctcgaaggttcggcttaacttttacaagatatgccgacgatatcacattctcgagtatgcacaatgtctatcaggaaggctcagcctttaggattgagttggaaaacatcatcttcaagcagggattccgcatcaacgcacaaaaggtgcggctgcatcatagaagtcggagacaagaagtgacagggctgattgttggtagaaaagtaaacgtgcctaagcagtatattaaggacctacgagccgtcctgcacatctggaaaaagtatggagaaggggcggctgctgcctcctattatcccaggtaccgcgccgggatcaagaaggagacacagttcaacttaaaggcagtgatgttaggcaagctttgctatctaaagatggtgagaggtgaggatgaccccgtttacaagcgcctgtccgatcagttcgatgaagtgacaagcaagcgaaaaaagaaatgccaacccggagttgaatacctcgggagctgcacgctcaaaacctttgagcgtcggttgaacgtggtaattgacattggagaggaggtctgtaagaataaatttacgcgtattcggctcaagaatggtactaccctgccaatctatatcagcaggctgatgccccctaattctaggaaggatagggtgtgggtgagcctttgccgccgtaccttcgaggcaggggggttctctgttttctacatgctccataactcctacgccattaaatcattcgtccccccactaaagtcagatatttttgacgagactgtctccaaagtcgtggaccttgtagtagcgtttcctattctccatgtggaagacgagtgtggcgtcatccagccaaagtatataccgcagaaaatcagtgaggtgatcgaccagtttctggccgaaaaaaatatctctcacaaggagaacatacccttttga

SEQ ID NO: 7391 - RNA, 1134 nt, synthetic construct
  source 1..1134: mol_type = other RNA
atgaacagaacagcaatcctgccacctaagaaggcggtcgcaacagcggtgaccaccagaatctgtgatttatggggctgcttgcacaccaaaaaggacttgctcaagctagtgaacgtggccctcgaggggctctatggtgagcgcgtgtgctctgttagcatggctcaactgaataaggctgcgtattcaagcctgaatccagataggtactgcacatttaagatcccgaaaaagaagaagggggagttcaggacgattgacgcccctgaacatagtcttaaatacattcaacagggcctgaatatggttttacaaactatctatgcacctcatccggccgcaatggggtttgtgccacgccgtagcgtcgttaccggcgcaaggatgcatctcgggcagagactcgtgtacaacatagacctgaaggatttctttcacacaatcacttccggacgactgtactcaaggctgacctctaaacccttctgtttggatggaaaggtggccggcattattgccgacatctgttgttactcgggtcctgacggtcgaaacgtactgcccatgggagctcccacctctccaactatcactaatattatttgcgagcgaatggatacaaagttgactagacttgctaaagcatatggcatgcagtacagtcggtatgccgacgatataacttttagcggaatggctaatgtcttcggagaagattcccggttcattaaaagtctgaggaatatcatagagcgcgaggaggggtttaccataaaccccgacaaaacgcggctgtgccatcgcggcatgagacaggaagtgaccggcgtaacagtcaacgaaaaagagaatgtgccacggtggtatgtaggccagcttcggaccatgcttcacaactgggaaatggacggacacgatcgtgctcaggccgtgttcgaacgccactacgtgcccaagttcacaaggccctcctcaggtttacctcctatccatcacatcgaaaatgttatcgccgggaaactgctctacctaaagatggtcaaaggcgagacggacaccacctataaagccctgaaccggagatttgccgctctgatggactgtttcattcagacttcccagacaatttga

SEQ ID NO: 7392 - RNA, 1116 nt, synthetic construct
  source 1..1116: mol_type = other RNA
atgagactcgacagaaacatcctggatagggaggcggccaagaacgctgtgaagtgtaggatttctgacctgtgcgggtgcctgcataccaagaaggaccttctcaaactgattaatgtggccctggaaggtttatacggtgagaaggcttctatggtgactatgtcccaactcgacaaaagtctgaaaagctctccaaacacagttcgatactatcgcttcctaatccctaagaagaaaaaaggagaactccgcactattgacgctcccgagcctaccctaaaatatattcaacagggactcaatctcgtactgcagaccatctacagcccacattcagcggccatgggctttgtgtcccacaggagcgtggtcacaggggcacggatgcatatcgggcaaaggttcgtctacaacattgaccttaaggatttttttcacacggtcacatcgggacgcctttataacagacttactacaaaacccttcaacctggatcgaaaggttgccggcatcataaccgacttgtgctgctacgcggggcctgaagggaaaaatgtgttaccgatgggcgcccctacatcccccaccattactaacatcatctgtgagcggatggacatcaagttgactcgcctggcaaaggcttacggactgaaatacaccagatacgcagatgatattacgtttagcggaatggccaatgttttcgatgagggaagtcatttcatccagtcaatgaggaatataatagagaacgaagagggttttaccataaatcccgagaagaccagactgtgtcaccgcggcatgcgtcaggaagtaactggcgtgactgtgaatgaaaaggagaatgtaccacgggagtatgctaaacagttgaggacaatgctgcataactgggaaatggacggctatgataaagcccaggccgtcttcgagcaccactatcaggctgacaacccgagatacgctgccacccactcagattttcgaccaaacttggaatccgtcgtggccggcaaactgttatacctgaagatggtgaagggtgagacagacgcaacgtataaggcacttaatcgtcggttcaatgcactccggtgtgatgtttga

SEQ ID NO: 7393 - RNA, 1143 nt, synthetic construct
  source 1..1143: mol_type = other RNA
atgaagaaagttgccgagattacagataggagagctgaggtgaaggcagccgagactagaatacatgacctctggtcttgcctgcacactaaaagagacttactccgcctggtgaacgtcgccctggaaggtctatacggcatggatgccaggaccgtgactatgcgtcagctaaatctttcagcgtattcaagtcttaacgcccaccggtaccgaacctttcagatcccgaaaaagagaaaaggcgaatttcgcacgatcgatgcaccagaccccactctcaagtacattcaacaggggctcaatttcgtgctgcaaactgtacacacaccccatcctgcagctatggggtttgtcccacatcggtccaccgtgacaggggccaaggtccacctgggacagcgtttcgtgtataatatcgacttgaaggatttcttccataccgtgacctccggaagactctataaacgcttaactctggaacccttctgccttgacggagaggtagcgggtctgatcaccgatctctgttgttacatggggcctgatggacggaatgttttgccaatgggagcccccacatcccccgctgtgacaaacattatctgcgaaagaatggatggcaagttgagcagactggcccgcgtgtatggccttaaatacagccgttacgctgacgacattacgtttagcggcatggctgatgtcttcgctgaggacggaaggttcataatgtctatgaggaacatcatcgtcaacgaggaaggcttcacaatcaatccggagaagacaaggctgtgtcactggggtatgaggcaggaggtgaccggaattacagtgaacagtcgagaaaatgtgcctcgcaagtatgttaagcagctgcggaccatgattcacaattgggaaatggacggccacgacaaagcacaggccgtctttgagaagtattacatggaacagaattacacccacaaccctgatgtaaaacatcatatagagaacgttgtcgccggtaaactgctgtatctgaagatggttaagggggagacggatccaacctaccgagcgttggaccgacggtttcgcgcactcactgagacaggcgggagggacactcaaggcaccgggaaaaaccggttatga

SEQ ID NO: 7394 - RNA, 1374 nt, synthetic construct
  source 1..1374: mol_type = other RNA
atgaaactggacgaacatatcaagcggcaggagctgcttgtccaaccggacgccaaaggcgcttcaaatggccagctaccagatgcccaggcagcggagagggggaatgtctttgagcgcctgccatattacgggaaatccagtcccgaggcccgacagaaagcagcagaaaggatgcctgatttgtggcgctgccttaatactaaaggcgatctactccacttattgaacgttgctctcggcgggctttatggagagtggcctcaaaagataacaattcagcagctcaacaagtttgcttacactagcctgggtgcaaagcggtacaccagcttcaaaattcccaaaaagcggcaaggggaatttcgcaccatagacgcaccagtacctatgttgaaatatatccagagaggactgaatttcgccctgcagtgtcactatacacctcacatgtcagcaatgggatttgtgcagcacaggtccgtggtggataatgccaaggttcacgtcggacagcgattagtctacaatatcgacttgaaggactttttccccagcattacggccgggcggctacataagagacttatggccaagccctttagcctgtctaaggagatggcgagtattatcacggatctgtgttgttacactaatgccgagggcaagcatgttctgcctcagggtgccccgacgagcccaacacttactaatattatttgcgagcggatggacagaaagctctccaggctggcgaaagcttacggactgaagtacacccgctatgctgacgatataactttttcaggtatggctaacgtgttccacgaaaattctcggttcttaaagtcaatgcgtaacatcatagagaatgaggaacacttcaccatcaacacagataaaaccaggctgtgccatcaaggcatgcgacaggaagttaccggcttgtctgtgaaccgtcaggagaacgtgtccagaaagtatgtgaagcagctgagaaccatgctccacaactgggagatgaatggctacgaaaaagcacaagaagtattcgccaaacactactccgagacaaagaagtctaacctgctcatgaagggaacacatcatattgaaaacatcatcgacgggaaactgatgtatctcaagatggtaaagggtggaaacgactgtacttataaaagtctcgatgctcgcttcagagctctcatggaccatctgcccgccacaaggattgacgggaataattcgccaaaagtgaccgtggaaatccctatggtccccaaagaggatgatgaatgctgggaaaccatctacaacctggagaagatccttaacaacgagaataacaacaatgacggccgtcaggtgtga

SEQ ID NO: 7395 - RNA, 1413 nt, synthetic construct
  source 1..1413: mol_type = other RNA
atggagattgacgaacacataaaacagcaggagcagcaaacccacgccgattctttagaggtgacactgggggagccactggagttcactttcgtggaaaatgccaacgtcttcgctcaactgcctgttcacggcgttagtgccaatccgaacaagaatggcatttcagataccattgttcgggtgcaggacctctggcgctgtatgaaaaccaggaaggaccttcttcacctgttgaatgtggcactggccggcatgtacggcgagcagtcaactatcctgacgatgaaacagctctgtggctacgcttattctaccattgaggcaaagtcttataccacatttcagatccccaagaaaaagaaaggggaattccgcaccatcgacgctcccgtgccaatgctaaaatatatccagagagggttgaatttcatactgcagtgcgtttacactccacatactgcagctatgggctttgtgcaacacagaagcgttgtggataatgccaaggtgcatacaggacagcgcctggtctacaacattgacttaaaagactttttcccgagcattaccgccgggagactttaccatcggctcatgtcaaagccttttagcctcaatgagaaagtagcatccattatcaccgacttgtgctgctacactaacgccgatgggaagcacgtgttgccccagggagcacccacgagtccaaccatcacaaacatcatttgcgagaggctggataggaagctggctcgtctggctagagcctatggactgaagtatactaggtacgccgatgacatatccttctccggtatgggaaacgtgttcgccgaagattcacggtttgtcaaaagcatgcacaatatcatcgaacaggaggagcattttatcatcaataaggataagacccgactgtgtcaccgaggtatgcgccaagaagtaaccggtctaagtgtcaatcagcaagaaaacgtgagccggacgtatatcaaacaactccgtacgctgcttcacaattgggagatgaatggctacgataaggcgcaggaggtgtttgcaaagcattacgcggagacaaacacaagaaacctcaagaataaagggacacatcatgtcgagaatatcatagcgggcaagctcatgtacctgaaaatggtaaagggagaaacagactgtacctataagaacttatttgctaggttcaaactcctgttggagaaccacacagacactaaaatagacaaatcgaagttctctgacgatcaggcccagaacatccctgtggacgaaggacctaagcatgtcactaacaacgagacagtacagagtgtcgacattgaaaatagcgatgagattctttctaccttttcctccctagaggaattgctgaacaacgaaaacgaatga

SEQ ID NO: 7396 - RNA, 1149 nt, synthetic construct
  source 1..1149: mol_type = other RNA
atgaacgtcgccaaacatggtcagtccaaatcactcgtccccaagccgctggaactgacccaggaaaaacgcagagcactggccgaccgagtcgcaatcctttggccccgcctgaagaccaaggccgatttgaagcagctgcttaacatcacgctgagcggccttttcggcccacactcgacgtttcttacaatgaatcaattgaactactccatctattccacaattgagtccaagcggtactcttcattcaggattccaaagaaaaataagggggagtttcgcaccatcgatgctcccatgccactgctcaagtacgtgcaacagggccttaatttcatcctgcagagtgtgtataccccacacattgccgccatggggtttgtccctcgtcggtctgttgtggacaatgcaaaagtgcacacaggccagcggcttgtgtataacatcgacctgcaggatttttttccctctataaccgcgggaagactcttcaaaagactaatggctaaaccgtttagcttgaataaagaggtggcctcactgatcacagacctgtgctgtcatacccatgagaacggtaaaaatgtattacctcaaggcgcacctaccagtcccactatcagcaatattatttgtgagcagctggataggaagctgtcccagctcgcaaaggcctatggcctaaagtacactcgctacgctgacgacataacattcagtgggatggccaatctgttcgccgagaactcaaagttttgcaagtctctgaaacacatcatagaagacgaggagggttttgttattaacccaaataagactaggctatgccatcagggaatgaggcaagaagtgactggcttgagcgttaacaggttcgaaaacgtgcctcggacctatgttaagcagttaagaacactcatacacaactgggaaatgaatggatacgataaagctcaggcggtgttcgctaaacactatactaaaaacgatcctcggcatctcttgagaaaatacgctggacgaatcgaaaacgtgattagcggtaagctcatgttcttaaagatggtaaagggggagaatgatgacacttataagagcctggtcgggcgttacaacgcgctcatgatggccgctggatgtctgtga

SEQ ID NO: 7397 - RNA, 3237 nt, synthetic construct
  source 1..3237: mol_type = other RNA
atggaggacctgcatatcaagaatggaataaagacactctggcagaatatgtcttcaaaaaacgagctgctgagcatccttaacaaagctgccagtatactctacggcgatgatgctaaaaagattgaaatgagccacctgacatatcattcctactccacaaataacaagaaacggtacatctcattccagataccaaagaaaaagaaaggggagtaccggatcatagatgctccatgtaaagggctgaagctgattcaacagtgcctgaatgtcctatttcatgaaatttacgctcccaatgtggctgcagtgggcttcgtccaaaataagagtattgtggatggagctaaaatacacctgcagcagaagttcgtctataatatagacctgaaggactttttcccaagtatcacctccggcagattgtttaagcggctccagtctaagcccttttgcctaaacgaggaaatagctagcataatcacagatctgtgctgtaatacgaatgcggagggaaaaagcgtgctaccccaaggcgcacccacatctcctactatcactaattttatatgcgagagactggatcagaagctcactaatctggctcacgcctatggactcaagtatacaaggtacgctgatgacatcactttctcgggtatggccaatgtctttgctgaatccggcaaattttgcaagagcttgcggcatatcatagaggaggaggagaaattcaagattaacacgtccaagactcggttactgcatagaggcaatcggcaggaggttaccggtataaccgtaaatgagaggttaaacgtgagcagacgctatattaagcagctgcgaaccatgattcacaactgggaaacgaagggctacatcgaggcacagtacatctttcagaagaaatacaatgagacgaacattaagaactcgaacggcatccattacatcgaaaacatcatttgcggtaaactagattatctgaagatgataaagggggaaaaggataggacctatatcaaactgaaagagaggttcgataaacttctgtttgggaacacttactctccactcaacaaccacattgacaaaatttttgagacgttgattgcgtctagatttaatgagtacaaggataagaacgccagtgacgagaacgaaaataagaaagagggtaagaactatgtgaacaagtcaatcaatacactagtctcggagctggacagtccaatgacactggaggaagccaccgaaacactcgtggagggtattgacgtgattagtgtacgcaatgggttcactagtactgaaagccgcgttatcgtggaagtgtcaacaatcaaaaaggatactaagagcccttctattaaccttgcagtgctcactgtcccgatcggcgagacatccctcatcatcaatgatgagattcaagaaggaaaattgttcatcgatgagctcaagtccctcaatgacaatccggaggactctaacaacttgaatatcgccaagaacattatgggacaaaacagccggattaggtcagttcacgccattctgaacaatgtactgaataagctttccgaagaccctaataacttccgtatctacaataacgggagggtaggatttaccgaggacgcccaagctttcattcggaaagagttgaaccgcattagccgccatctgtatctgtccgacagcgcgactcctatgctcggactgaccaataataacgagatagtgttcaccatcttggatgacaacaccttcgaggacgtcctcgtgcctactggtatagttcttgggaatacgaacgtggccgacgccgccaatagcatcaaaggtgccgaaaatattttccataagaacgccacaaaactgaccgaatataccactgccagaattgtgagagacttgataacgaaggtcgagggcaacgagagggtggttcggaaaaacggcaagggatacgaagcagtaaagtggcagttacgctatgataggcttcagaaagaggctgatatctctaacaccagcaataagactgccaaggaacagattgatgcacacaacgaaagccgcgaggcctacatacgaactgcagtgaaagagggaatcattatcatcaacttcaacaaagactctctggaaagcaataactaccttaagcacaagtatctgaacagaaagaacatcgcaaaaatcctgttgaacaagatgggcaaatgttttgttaccgaggaacaggttctgaatatcgtgtcccaaaagaagtacgttacagaagaacgtgccatagaactgatcagaaagtatgggggccataataagaaagagattggaaagtccaacgtcgtggagtaccctgacccaaagcagacctatcaatttcttagctttttctcccagaatgacggggggttaaaaaacctgacccacgacttcaactatgggtacatcgattatgacgtgttcattgcgcagtgcaagaaagagttcgaggaaatcaaaaaacgattccctaatgtgcaggagtctgtggtacgtcgcatcgaagaatttgcctttaaagaatccccgaattggtacatcaggcttggcaatgacaagaaatatattagatacgggtggtcagagccctcattcgtggaatggtacaggacaaacaaaatccaccccgccaaagatacacactataacgccgagatgattgtacccttcaagaattctatccaggttcgcgcagacaacaaaaaccttattggactactcagttcattagtcacaatggccttcggtcagaatccttgttgtaacgtcgaaatcacacagaatgttggggaggctcagttttataccgatgtcgaccgtctgggccaggctatttatcagatcttcagtaccatcaaggattattcagagcagaacttttgtgacaaagtgatcgtggattactacacagaaaacgattttaagatcctcaccatcacccacattgatagtaaacccaccaaaaagtctgacgacaaagattacttaggcggaaatggcactaccattaaaaaggcactcttcggactgtgcaattatgaagtccaagcggagttcccagatggtgcatatcgaaagatcatcttgtccgataattacgaagactttaagaagggccgataccttattgacaaggactcaattgacgggtacaaacacattatgaaattttactga

SEQ ID NO: 7398 - RNA, 1443 nt, synthetic construct
  source 1..1443: mol_type = other RNA
atgtcaaagaagaaagctaatagcaagagtgacctcaagaaagtgctggaccgaaaccggcataaagaggagaaagtggccgctaaggtcggtatgcagatggaggctgaggaagaagtcgcaatcatcgacttcgacgatgattcggcgagctcctccgaagacgtacagattgagactaccgggaaccccaagactgagcagaaggaggacggggtgaaacaagttactcatccactctctgaggaagagaagaaagagtgcttagaggagatccgcgaaagatggccgagaatcaaaaccaaagagagcctgctcagtattctcaatatcgctctgatactgctttatggaagggacgccaggaagttaactttgaggatgctcaattactacgcgtactcctcacacaacaaaaaacgttacatcacattccaagttcctaaaaagaagaaaggtgaatttcggacgattgatgcaccttgtgccggcctgaagatgatccaaagagccctcaacctgattttccagaccatctatacccctcacgaggccgctatgggatttgtgcctcaccgcagcgttgtgacaaacgcccgggtgcacgtaggccaaaagtacgtgtataacatagatctgaaggactttttcccatcaattacaagcggtagactttttaaaaggttgctggtcgctccattttcaatggataagaagatggcatctatcgttaccgatctctgctgctacaccaatgccgacggtaaaaatgtcctcccacagggggccccaacttctcccaccattaccaacttcatatctgagcatcttgatcgaaagctttctaaattggcaagagcctacggcatgaagtatacgagatacgcagatgacattactttctcctgtagttctaacatgtttgcagaggacggcaaattctgtaagtccctgaggaacattatagagaatgaagagcacttcaagattaacacagataagacacgcctgtgccatagcggggaacgccaggaggtgactggcctaaccgtcaatgaacagacaaacgtgacacggaaatatgtcaaacagatccgcctttttttgcatatatgggaagctaagggactgcccgaagcccagcggctcttcgaaaagcactacacacctaagactacgaggccgaatgtgggaattccccacatcgaaaacgtcatcgccggaaaactgctgtatctgaagatggtgataggcgaggaccgagatatgtataagcgtctagcttcacggctggacatcctggttggaaatacacaggagagcaatagtaccgatatctcccccaaagataagggggtgttgtccgtacctgaaaaaggcaaactgcccgcggagaaggaaattttgattgaactgaataccctaatcgagttacttgaatga

SEQ ID NO: 7399 - RNA, 1476 nt, synthetic construct
  source 1..1476: mol_type = other RNA
atggcaaagaagaagaacatcactaagaagcaaaacctgaaaaagaagttgggccaaacctctgcgtcgaagaaaacagaagtctccgaactagttagcagcgggagcgagaaagctgaggaggtactttttgccatcgagccaattgaggatgaccttgtcagagtggctgccgctgtgactgagctggaggatatagacagtgccaaagtgagcgacgaagaaactattagtacccaagcagatgcactgagcaagattgatgaattgcctaaatatggaggttcacccctgacgggagaggatctgaagcagcaactggccaagatcgtcgagggctggcactctatgaatggcatagatgacctgtgtgtggttctgaacatggccctgcaggcactgcatggcatggacgccgtgaagaccactgtgggcagactgaagctgatggtgcgcaaagggcggtacgttacattcaaaatccctaaaaagaagaagggtgagtttagaaccattgatgcaccctgcagcgagctcaaaaacatccagcaggctctcaattttgtcttacaagaggtgtactcacccaacgccgcggcgatgggttttgtgaagggaaaatctgtcgtgacaaacgcccaggtccatctggggcagaattatgtgtacaacatagacctgaaagacttctttcccagcataacctccggccgggtatttaagcgacttctggtaaagccattctgcttaaatgagaaggttgcctcactgatttctgatttatgctgttatcagaagggggaaaacaaagtcctccctcagggcgccccgacttcaccaaccatcaccaacatcatctgtgaaaaactagacttcaagctcacccggctcgctaaggcatacggattgaagtatacacgctacgctgacgatattacattctctggcatgaagaatgtgttcgctgaggatggaaaattctgcacttccctgaggaatatcattgaaaatgaggaaggcctgaagatcaatagtgacaaaacacgtctttgccatagggggatgcgacaggaagttacgggtttaactgtgaactcaaaaaccaacgtgagtcggaaatacataaaacagcttaggccactcatccacaattgggaagttaagggctatgacgaggcacaggctatcttcgccaagcactatgccgaaactaacattcgcaacctgaggtttaaaggggaacaccacgtggagaatattatctccgggaaattgatgtatttgaagatggtcaaaggagagacagactccacgtacaaaagttacgccaatagatttgaaaagctctgtaacgatacattcggggccggatcccagaaatcccagaccttgctcacccctctcatggacgacggtaacgtgctttctgtactcaatgatctagctacactgattgagacgaataccagcgagtga

SEQ ID NO: 7400 - RNA, 1311 nt, synthetic construct
  source 1..1311: mol_type = other RNA
atgaagaacagaatcaaaaacgatatggactacaataccgtcatcaatgagatttggagaaacctggaaagcaagaccgatatcgtggccctcatcaatgtgtctttgaaggatctttacggcgacaaggcctccaaaataagcttgcgtaagctcaactattacgcatatagcaaagtaaacgcaaaccgatacgtgagcttcgatattccaaagaaggacggttctatgaggcggatcgacgctccctgcagaggtctgagaactatacaacgcgcccttaatcacgtgtttcagattgtttacaccccgcacgaagccgctatgggttttgtcccagggaaatcagtggccaccaacgcaaagatgcatataggacagaggtacgtttacaatctggacttaaaggacttctttccctcaattagcagtggccgcgtgttcaagagattacaggctaaacccttcggactgaaggaagatatctccaggataatcacagatttgtgctgctacgagaatggcgaacaccggcacgttttacctcagggggcacccacttcaccaacgatcaccaacttcatttgcgagaggctggatgtgaaacttagtcgcctggcgaaagcctatggactcaactatactcgttatgcggacgatatcaccttttctggcatgaacgacctcttcgacatagacggaaaattctgtaagtccctacaccatattatcgaggacgaggaacatttcgttattaaccagaagaaaacacgccggtgtcacgctgggatgcgacaagaagtgacaggcgttaccgtaaatcagaatacatccgtcagtcgaaagtatgtcaaacaactcaggactctgattcacaactgggaggtgaaaggtcatgacgaggcccaggctatttttctgtctaactactccagtacgaagtatcataattttcggggagtgcatcacattgagaacgtcatcgaggggaagctgctgtatatgtcgatgattaacgggaatgaggatagcacctacagccagctcgtggtccggtttaagtctctgctggagacaatcgtctcaggcaaagccaatgcagaaaagggcctcggcaacgatacatcctctctagggaaggggggcaattgtatcactatatccgatatcctggatatctggggcaaaagcggaatggtagacgctttggaggtgtttaaagaaaatattgggatccttacgcagaaagacacctttcctacaggtttcaagactagtgacggagatcctttccttgactcaaatctgtga

SEQ ID NO: 7401 - RNA, 1161 nt, synthetic construct
  source 1..1161: mol_type = other RNA
atgagattgacggactgtattggcctgcaggcgcaaccccagtctgtgagtcctgcaccaaaagatgttagtgtcaggctccgggacctttggcgatgtctagagtctaagcaagatctgctgcgattaattaatatagccctggaaggactgtacggagacatggcccagatgatcaccatgaagcagttgatcaacatggtgtacactgccaatggggagcaccgctatacttcattccagattccaaagaaaaagaaaggggagttccggacaattgacgctccaattccaacccttaagaatatccagcggggcctgaattccgtacttcaagctgtatataagccccaccaagctgccaaagggtttgttaagggcttttcagtggtggacaacgcccgagcccatattagccagagatacatctttaacatcgaccttaaggatttctttccttctattcattccggtcgtgtctacgctagactcctggcaaagcctttcagcttgcccccggagatcgcctccattatctgtgacctctgctgctttaccaactcagagggccacaaggcgctgcctcaaggtgcacccaccagtcccactttaacaaatataatctgcgaacggatggatcgcaagctcctgaaactggctaaagcctataatctgcagtacaccagatacgccgacgatattacctttagcggttccacgttcatgttcgctccggagggcaggttttgcactctcttgcagcacatcatagaggaggaagaacacttcacaatcaacaggaataaaacaaggatgggccatcgtggaacacggcaggaagtgacagggttgactgtgaataacaaaccaaacgtttctaggaactatgtgcgccagctaaggactctgctgcataattgggagatgaaaggatatcagaaggcacagacggagttcctcgcgcattatgccgaaattaacaccaagaacttacaatgggatgggacacacaagatcgaaaatatcatcgcaggtaagcttctgtacatgaaaatggtcaaaggagaaactgatagcacctacaaaggcctgaaaatacgcttcgaccagctaatgcagaacagacgcaagtatatcaagtcgctcaccaaccctatatga

SEQ ID NO: 7402 - RNA, 1194 nt, synthetic construct
  source 1..1194: mol_type = other RNA
atgaccaagcaagagatcgatgaaaaaattaaggcccagtggtcagccatggaaaccaagcaggacttccttagacttttgaacttgagtaactgtgccctctacgctgagaaggcacagccgttcactttccgacagttgctctttcacgcccacacaacccggaataagaaacgttatgtctccttcaagattcccaagaagaaaaaaggggagtttcgcgttattgatgcacctaatcccacgctgaagagcatgcagcgcgccttaaactacgcactccaggtgatttatgaaccacacgcagccgctatgggattcgtaccaggacgctctatcgtgagtaatgcacagagccatactaacaagagatttgtgtacaatatcgacctgaaaaacttttttcccagcatcagtagcggcagagtgttcgcccgatttcaggctaagcccttttcctgtaataaagaggtggcttccctcatagctgacttatgttgctatcggaacgatttcggtactgttctgcctcaaggtgccccaacgtcgccgactatcaccaacattatttgcgaccggctggatgtgaaactgactagactggcgacggcgtacgggctacattataccaggtacgctgacgacattaccttttccgggatgtcaaatatgtttgcggaagacggccgattctgccagtctgtgaaacatatagttgaggacgaggaacacttcactatcaataaggataaaacacgcttgtgccatcggggcatcagacaagaggtcacaggtatcactgtcaacgagaaacctaacgtcacccgcgaatacgtaaagcaactgcggacaatgatacacaactgggaatctcaagggtatgagagggctcaggcaaggttcctggagatctacaataaaaccaatacaaggtatcacaaggccaagggcaatcatcacatcgaaaacatcatttccggcaagctactgtttcttaagatggtcaaaggagaaaacaatgcacagtacaaaaagctcgatgaaaggcttgtggccttagagtcaacccacacagatccaattccccagaatcgtagcaatgccgtgatacctcctgctatgggagacaacatcatttctaacgagaaggaaatcctcgaggagttcatgacactgaacaaactgctggagtga

SEQ ID NO: 7403 - RNA, 1014 nt, synthetic construct
  source 1..1014: mol_type = other RNA
atggacaaagacaagctgtctctgctttcctccttgtcaaaggaggaactcttcaatctattcagcacctttgtcgagtcccaaaatgcagtgcaaaacactgattctgaaacagttgactttgccaatcaggctaaggaaatgtggcataagctcagtaatgaagccgatttgagagcactgattaacaccgtaagtgttaaggtgtttggtaagttccagtacaccgaagcacagttcggccactgtttcaacatcaaccacagtcggtatactactttcgagatcccaaagaaaaaacctggcgagtatcgaacaataaaagcgcctaatccgacccttatggggatgcagcagtgtctgaactatgtcttccagcagctttatcaaccaattgagtgcgcgacaggatttgtacccggacgcagcatagtggatggagcacgcgtccatttgtctcagaagtacgtgtacaacattgacctgaaggatttttttacgagcgttactgcacagaggctggtcaacaggctccagatcgagccctttggtctgagcgaagacatggcccagctggtggctaatctgtgctgtgacaagactaagtatgacaagtttgtactgccacaaggggcccctacctcacccacaattacgaatttcatatgtgactccctcgatcggaaattaattaaactcgccgctgcccacaatctgcgttactcacggtacgccgatgatatcaccttcagcggcatgcagaacgtgtttgcggccaacgggcgtttctgtaaatctttgaggcatatcattgaacgcgaagagagattcactatcaaccctgccaaaaatgcttcactaagttcccggaatgctgcacgctccaacagacacaactgcaaacccaaaaccgagtgctttgcctctctctaccaaacagtgacctgcgctgtgaagcagctgggcgagaagcgaatcagacacagcgcttcgaggatccttgagacattatga

SEQ ID NO: 7404 - RNA, 1218 nt, synthetic construct
  source 1..1218: mol_type = other RNA
atgcccgaatcggagcagaagaccgaagagaaagaggccaaggtggaactgctgaggatactcaatgtgatgaagaagaaactttacggggacaactcctatccgataacaatgaaacaactcaactaccatgcctattcaaaaaacaacccaaaacgatatgtgcaattccagattcccaaaaagaaagcaggagaattccgcactattacggctccaaatgcagggctgaaggccatacagcggtgcattaacgccctgctgcttgaacagtttgaagcgcatcctgcagctaatggctttgtgcccgggaagagtattgtggacaatgctagagtccacctgggacagaagtacgtctacaacatcgatctcaaagacttctttcctagcgtgaccatcggcagggtatttgcgtgtctgcaacttccacccttctcatttgacaaacacacagcttccttgatcgctgatctgtgttgccacgagggagttctcccccagggagcacctaccagtcctacactaacaaatatcgtctgctctcgcctggattggcgtctctcaaagctggcaaggaggttcgatctgcgatacagtcgttacgccgatgatataactttctccgggatgtccaacatttttcacgaggacggtgccttcgttaaggatttacgccacttcgttgagaaggagggttttttgatcaacgaaactaaaactcggaccaattcctactatcagagacaggaggtcactggcttaacaatcaacgaaaagcctaacgtgactcagcgctatgttaagcagattcggaccatgttacataattgggaggcttctggatatgaggcggcccaatcagtgtttttcaagcattatcacccgacaaaaaatgtaaatgccgagcaccatatcgaaaacatcattggtgggaaactagactacttgaagatggtgaaaggagtcgacgacgccacgtacatcaagctgagagatcggtttggcgaccttctgagcggcagagagaagaccaacagcaccgccaggccaggcaatgttatcccagtggtggatattagcgtacttaacgagggcaatattatcgacatcgagctggtcaatgaggaagagcaaaagagcaaagatacccacggcctcttggacgaaaagctccagcagttgtgtgaatctgggttcgacctatctatactgtga

SEQ ID NO: 7405 - RNA, 1074 nt, synthetic construct
  source 1..1074: mol_type = other RNA
atggagcaactaaataagttcaaaaaggagttgtacggggagaattgtcacgccataaccatgcagcagttgaatttccacgcctatagtgaacacaattcaaagcgttacatacagtttcagattccgaagaagaagaaaggcgagtttaggactattactgctcccaacaaaggcctgaagtgcatccagcgctgccttaacgccatgctcctgcggcagtttgcccctcatcctgctgccaacgggttcgttcccggcaaaagcatcgtcgacaacgcaagagtccacgtggggcagaaatacatttataacatcgacctcaaggactttttccctagtgtgactatcgggcgggttttcgcatgtctgcagcttcctccattcaaatatgatagagagacagcaagcctgattgcggacctgtgttgccatgagggggtgctgccacagggagctcccacttctcccactatcacaaatatcgtgtgccagaggcttgattggagattgtccagactcgcactgcggtacaatttgcattactccaggtacgcggacgatatcacattttcaggtatgaccaacctatttcacgaggatggagacttcgtgaaggctctccaccatttcgtggaaaaagagggtttcaccatcaacgaagccaaaacacgagtgaactcctattaccaacgacaagaagtaaccggactgaccatcaatgagaaaccaaatgtgacacagcggtacgtcaaacaaatcaggacaatgctgcataactgggaagttaatggctacaagtatgcccagtcggaattcttaaagcactatcataccacgaagtacatcaactttaagggagaacaccacattgagaacgttataagcggcaaactggacttcatgaaaatggtaaagggcgagaaggatcatacgtatctgaagttaaaggaacgctttgatcgccttaccattatagatgtctctggtattctcgacgtctgggaaaaggagggaattgacgctgccatggatctctttatgaatgtgaaaaaacacaacggcgacgagtga

SEQ ID NO: 7406 - RNA, 1299 nt, synthetic construct
  source 1..1299: mol_type = other RNA
atggagaagtccttaaaagacgaaatcaatgccatcattgacgactgctgtgctaaatatagctctttcagtatcgaaacctttatagacatcgtaaatgagattcacagtaaggtcttccaggagagctatctgatcgagatcgaaacactaaaaaagatcgcgaattccgtcgataagtatgacaagttcgagattcccaagagaagcggaggtgtccgagaaatctacgctcctaaaaagaacctgaagaagatcctctattaccttaactttatcttccagaacatctacgtgcgcaatttcagcttgtacatttcaccgaatggttttataccaaatcgttccgtggttaccaatgccaaacgccacctctgcaagaactacgtctttaatattgatctggaagactttttcccatctatcaaacagtacaaagtaagcttcatgctgcagattgctccctttaatatgagcaagaatgatgccaacctcatggccaagcttatttgctatcaggatcagaacggcgagtcctttttaccccaaggagcccctactagccccattatctccaactttgcctgtcgatttctggatataaaactcgtgaacttggctaagcaattccgcctgacatacagtcggtatgcagatgatatcacattttcgtcaaactacaatgtgtacgacgataaattcatggacgccctgaccttggtgatagaggaggaggggttcaagataaataaaaataagacgcggctgcagaagcggaatatgaggcaggaagttacaggagttattgtgaactacaaactcaacgtgtatagaacctacatcaagaagctgagggtactgttacatatggtgaagaaatatggctacgagaaggcaaacgagatttacaatcaaaaggagcagagtgataaacaaaaagacctgaaatcaaccattgcggggaagctcaattatctgaagatgattaagggctctaacgatactacttatatgggcctcatgaattcttacgtcgaactattcgacataaaacagaagaacaagcctccaataccagatgacgaatctttgatcgtgtgtgaaactgcagagaagttgcttaaagaactgaccgcttctaacaacctgattctcaccaatatcaaaaacgagtcaaactatctgaaccttcctaagactcagaacgtttccaactccaaagtggccaatagcgaaaaagcaattacaacggagtcactagtggacagaatccttagtaaactgagggagatcctgtga

SEQ ID NO: 7407 - RNA, 1992 nt, synthetic construct
  source 1..1992: mol_type = other RNA
atgaacatcaagtcgatcaacggaatcaagaacatcaatgacctcattgatattatctactactacaacgacgagcataacatcgaaaacaacctgcacatagaaaccagcactatcaatttcctcgcattctatgcgaagaagaaatacaagaagttcgaaatcccaaaaaacaatggggaattccgaacaatatatgcaccaactaaatacctcaagacgattctgaaatcactgaattacgcctttcaggccatctataagaataatcaagtggctcatggctttctgcctaataaaagtgtggccactaacgccaagaagcacatatctaagaactacgtctttaacatggacctaaaagactttttccagtctattcaccaggcacggatttggaagatgctccagattagcccctttaatctcccgaaagatatggctaatcttctagctggcctgctgtgttaccaatatccccgggaaagcaaggagaaatcctttctcccacaaggtgcccccactagtccaatcattagcaacttcatttgctacagactggataaatccctcctcgaacttgctaaaaaacacaacgctatctacacccgctatgccgacgacattacgttcagttcaaatatcaatctgtacaagaaggattctgagtttcttcagaagatttaccgtatcatcaataacgaagggttcagtattaatgagaacaagattagactgcaggggaaaggctatcgtcaggaggtgacagggattatcgtgaatgagaaaatcaatgtgtccaaaaagtacatcaagaacctgagagccttaatttacatgttagaaaagtacggcgaaaaagaagccaatgagttttactataccaaccatgcaaaatcgctaaatatggttatttccggcaagctgaactatttgaaaatgatcaaaggcgagagcgactccacctatctgaagttgaaagagaagttcgagaaacttgcgaagaacgacgttttaatcaaggaacctaacaaagaaagtgcccaaaagaccaaacgaaatcccaagcagaaccctaacgcaaaacacaatccaaaggcgttagtagacatccttcggaaattctcccagtcagactcccccttcaaggctactgttcataatgagagcaattacccctcctacaacggctatgacaacttcatgacatcacttaataaggagtggaatgagatacaaaaagatctgaacgcatatagctacaggctctataacaaattgttgggtttcctgtttaagtctaccgaggagctgaccaatgcagataattataaggggtggggagaatcaaacgtgaaaatagggtggtcaagtagcgagatctctgagtactgcaaggctaacgacaagaataatccgtttgagtataaactgcctgatcgctatattatagagcacaaaaacggatccattacaacattcggggatatttgcatgaagatctttaagtacgagattgagttccgcgatgagaaccagcagttttttaagctgattcaggacaatagaaagaagttgggatctggttttaatgtcaaaatcgatgagaagatccagggagtctctttttacagcgacacacacctggtatcagaagccataaacaagatctttaaccagttcatcgaacggaaaaagtatatcaatatcagggtgagtatggaaacgactgatgagtaccataaattcatcttcagccagctcgaaagcaaatgcaacaagggctctaaggaaatgctgaaggagattaaggacggcgatttcgaagatataaaaaaacgcctgttctccctgtgtgattggtctatagaagctaaatgttccgacggaaacttcaggataaactatcttaaaagcgacaatgagaaggacattgataagttgcctgatgcccctgagggttttacccacatattgaggttttataagtga

SEQ ID NO: 7408 - RNA, 1638 nt, synthetic construct
  source 1..1638: mol_type = other RNA
atgtcaaaaactagagtatatgagcttgccaaaatcctgaaagtgacatccaaagagataatttccaaggcgaacgagctcaatatcgccgtgaagagccatagttccagcctggacgaagatgccttaaaactgattacagacgcattcgctaccaagccccaaatcaaaaacaatacatcagcaacgatcaagattaccctcaaagacaaagagcaaacctctctaaacgaacatatccagaaagccttcaatgagctgcggaacattgaggatctcgcaagcctgataaacaaggtgaataagactatctatgagcacacccataagatcaaggtgaaacacctcacttatcacgcctaccattccaaagataagtatcaggtctttaagattccgaagaagagcggtggcgagcgtgaaatttattctcccagcaagggcctcaaatacatcttaaagacactgaacatcatctttcaggcactatacaaaccccagagcgttgcacacggcttccttcctaatcgctcagtcgttactaatgccaaattgcacgtcaataagaattatgtgtacaatatcgacctcgagaacttcttcccaaatattcatcaggcgcggatttggaagcgcctgcagcaccctccctttaatctgaatggaaagcgtatcgaaatcgccaacttgctggctaaccttgtttgttttcagtacgagaaaagcagtaatgagaagaactttctccctcagggtgccccgacctctcctatgctcagtaatataatttgccacagactggacaagaagctgctcgaattggctaaggcctacaacgtgaaatacactagatacgctgatgacatgacgttcagttctgatcacaatgtgtaccaaaaaaacagcgagttccttcagaaactgttttctattatccaatcggagaacttcaagataaatccaaagaagatcagactgcagaagagggggtacaagcaggaggtgacgggcctgatcgtcaatgaaaaaattaacgtgagccggtcttatattaaaaatactagggcactgatccacctggtcgagaagtatggtgatgagaaagcccaaaagatctttgtggaaaaaaacggatccaagaacttggatctagtgatattcgggaaactgcagtatttaaagatggtaaaaggctctgaagactcaacctacaccactttgtatcagaaggccatgaacgcatacaaaatgatcgaagttgaggtgaccaaatcaaataacgatgaaaagaaacagaccgagattatcaaaaagaacaccattaacgagcaacacaacccaaaggagctggtaaagatattgcggaactttacaacatgtgaaaaacccccttgcgctcttaaggctgccgttcattccgaagaagaatattaccagtttaacgggtacgaagactatatacgaaatctgaagtccgcgtggaggaagattgataatccacttaggaatctctccaaacgattacatggcaagatttacgcttttctgttcgcttcggacctagggacccaggagcgcgtcgacaagagtaagagtaaaaactccggatggggagactcaggaatgacattcgggtga

SEQ ID NO: 7409 - RNA, 2007 nt, synthetic construct
  source 1..2007: mol_type = other RNA
atgccgattaataaggtgacaccagatcagaagaataagatagagatcctgttcaacaagatttccaatattgacgactttctgtccttgatcaataaggtcaataagatccagtatcaggagtataagaaactcgagctgaaacagctgacctattatgcctttatcaacaagtcaaagtacactacctttgaaatcaagaagaaaagcggtggaaatagggaaatatactccccaaaaaccgggctgaaatatatcctctccgctatcaacatcattttacagtccgtctataagcccactatagcgacacatggctttatcaatcaccggtcaattgtgacaaacgccaaaaaccatacggataaaatttacgtctacaacattgacctggagaatttttttcccagtatccaccaggctcgcgtctggaagaaactgcagttacctcctttcaacctctgcgaaaataagatccaaatttctgagctgattgccaacctggtctgttatcaacatatagagaagacaacagagaagaatttcctgccccaaggggcaccaacttctccgataatatctaacatcatttgcgagcggctggatagacgcttattaggcctggccaagcgtttcaatctaaagtatacaaggtatgcagacgatatcaccttctcttctaatcacaatgtttaccagaagaacagtgattttatcaaggaactgaattccatcatcagtaaggagaacttcaagatcaactctaaaaaaacccggcttcagaagaaagagtacaaacaagaagtgacaggaattattgtgaataagaagactaacgtgtccaaaaagttcattaaggaactgcgcactcagatctatctactagagaaatacggcgttaagaaatcgaagagcatttacaaggagtactacaagaagatcaatggggatatagagctgatacctaatatgatgaatgtgatttacggtaagctcaaatatttgaagatggtaaaagggcaaaacgacagcacttatctgaaacttaataaccgattcgagaactgctttaagaataagaagcattttgcttcacagaactttaccagctacgagctcaaagaattttcgaaccaccagccgcaaaaaatggtggaactgttgaaaaagttcacatcagaagaacccttgaaaagctctacccatccaacgaaaaacaacgagtgttacctagattttatcaaagagttacgggtgacatggaaaatttacgaggaagagtataaagacttcatcaacgaaaagctcattagcaaaatctacaccttcctctgtaacccaaaccccaaaaatggttggggaatagataacatcaaacttggctggacaagctccaaacttaaaaagtggtgtgagaagaatcctaatttgatgcctaacaagtttcccattgagaatactatctacaccttccaagatatcatcaattacttcaagatggagattgagattacccctaacagaaataacctgtatagcttcctgtttgacatcatggacaatgaactgtgccagttcgagaagctcactgatgaagaaactgaggagatactggacgaagcaaaattcttcatcgacacccagtggattaaggaaggcctcgagcttatttttaacgagattaaccagagatccagtgtttcaaaacgaatcagaattcaggccaagaaaaataaggagttcattgagttgaagatcacccacatcaacagctttagtaaattctccccagaaaaactccttgagaggcttgaaaacggagtagggagttttccctacatccagcagaaatttacctctctctgcgacatcgccttgcagtcaaagtaccactcaagcatattcaagatcaacatactgaacaactacaatgatgaggaaaagctgattaaagacatcaatacggaagaagaaggctttacctatattttcaggttctatcgttga

SEQ ID NO: 7410 - RNA, 1710 nt, synthetic construct
  source 1..1710: mol_type = other RNA
ttcgtattgaataagtccaatgtgaccaatgccaaagtgcatatcgacaagaactacatatacaccatcgacctaaaggatttcttttctagtattcaccaggcacggttctggaaacgcctgcaattccccccctataatctggatggaaccaaaatcgaactggcaaacctgattgccaacttggtcttcctccaaacagagaagcaagaggagaaaaactttctgccacagggtgcccctacgtcacctattgtcagcaatattatttgtgaacgtcttgatcggcgtctgctggggttagcgaagaggtttaatgtgaaatacactcgatatgctgatgacatcacattctctagcaaccataatgtttaccagaaagactcagagttgatcatcgaactcaacaggatcattgccaacgaaaactttgagataaacccaaagaaaactcggttgcagaaaaaaggatataggcaggaagtcaccggtatagttgtgaactccaaagctaatgtgaggcgcaagtacataaaggaggtccggacatacttctatcttattgaaaagtatggcctggaaaaagctgagcgcgtctttgtgcaacatcagtacaaaaataacccgaaccttaagaattacaagtacctgtccagcgtgttgttgggaaagttagagtatctcaagagcgtgaaggggaaagaagactctacgtatctgaagctcaagaacagatacgatatttgcttccccaaggaggaaactagtaaggagaagaaccttaaactgaaaaaggaaccaatccacaatcccaaagaggtggtcgccattctgaacctttttacccagaacaataacatcctgaaatacactacacacaattgggataaagaggagctggacagtctggacaactttttgaaggagatcaagatcgaatggaataaggttaacaatagactcaaagagctgactcctagattacacgccaagatcatttctttcctgttctctaaaaagctgggcaccctcaatctaactgataatcgaaataaggtgtggagatgggggatgagccagatccagttcggttggtcatccccgaaacttagagagtggacaaaagaaggcaatagtcctttctcgtacgtactcgatgaaaagtatcggaagaaaattgatggcaagtcgattgacaggttttccgacatcgtcgaagtatttaagaacgaaatcgagattcgctccgataataaccaactcaagaagctgttcattagcaagcagaagaaatacctagggtttgactttaacgtggagtttgttaatctggaaggggtggacttttacaccgatgttcagcatttagatttcggactgaatgagatcttcaaggaaataaaacagcgaaagctgtttccaaaaataaagatcgaagcgatcaagaacatcgaggcaggttttattgagctatgtatcacccacattgattcattccccaacaaaacaaaggaggagatgataaaagaagtggaggacggcgacttcagcaaaatcaaagagaagttcacaagtatttgcgactggtctatagctagcaaactttccgacggaaactataagattaattatctcggaggcgaagaatcattcgagaagctcaacgaggagcctatcggctttacgcacatcctcaaattttataagtga

SEQ ID NO: 7411 - RNA, 2073 nt, synthetic construct
  source 1..2073: mol_type = other RNA
atggagctcgattccaaagacaaaatctacatctacaactctttctacaagatgaacaataagctcgatctgcttcagttgatcaacttctgcaagaaaaagatctatggtgaagaagctcaccccatttccctcaaacaattcaattaccatatcaatcccttgtacaataacttcagatacaacagctttatcgtgaagaaaaagtcagggggcgataggattattttttcccccaacaatgggctgaaagtcatacagaaatgcttaaacctcatactccaggtcgtgtataaaaacccatctaaatatgccacaggatttattagtggacgctccattgtggacaatgccaagatacatgtgaacaggaattacgttttcaacattgaccttaaggacttcttctattctatagatcaggctcgggtctggggtcgcctacaagtccaaccattcaatttttccaagaaggagaacaagctggaattagccaacatagtagcctccctgtgttgtcacagtatcgaggtggaacgttttgtggaggggacctggatcaaaaatcagaagaacgtgctgccacaaggcgcgcctacatctcctgtgatcagtaatatcatttgtgagcgacttgactattacctatccgcagttgcaaaacggttcgggctgaagtatactaggtatgtcgacgacatcacctttagttccgaccagaatgtgtatcaggttgacggggatttccggaaggaacttgaaaaaatcgtgcaacaggagggtttctatttcaatgttaacaagacgagactacagaaacgcggatttcggcaggaagtcactggggtaatcgtgaacgagaaggtcaatacaaacaaacattttgtcaagaggctgaaaaagtggatctacctgtgggagaactatggctatgaaagggcatcaatattctttaaaagcgagtatgaagcagataaactgaactttaagactacccctagcctggtttccgttttacgaggaaagctgaattacctgaagatgctcaaaggagacaaagattctctgtatctcaacctgaatagcaaatttgacaagctgctgaatggaagcattgatcagaagtccagcctgatcaagattaccaaaccagctatccctgtgatccaccaacctcagaagcttgtagcaattttgaagaaattcaccacgaacaatacagccttaaagtactcaacgcacacttgggacggcggtaaggacactgagatcttcgctaacatagaggatttccttattatggctgagagagaatacaagactatcagctatgatttgagcattctgtcgaagccgctgaacgccaaaatttggacctttctgttctctgacaacttttcaaagaatggctggggcatgtttaatgtgagattcgggtggaattcaatggagctgcataagtacctcaatggtaaccccaacaataaacctgaatcttatatcctgccagaggagttccagcagaacattaaaaagtatgggaaaagctttctgatccagagcttcaaaaatgtgatagacttgttcaagaacgagattgaaatccgtgatgagaattcaaccctcgaggacatagtaattagtttgcacaagacctaccttaatggctttaacatcctgaagattgaaaacctcgcgaataaaaacttttacacagacgtggattacttatacaaggccctcgagctcgtgtttcataatatccagaaacgcccccagtatcccaatgtgggatacattgggtacgattttgaggattatttctgcctcgaaatcatgcactttgagtctaacgccaaaggaaagagtttcaaggactcaaaatttacccttaaggaaggcgatttcggcacaataagcaactacctaaaaaatttgtgcgattggagcatcgagtcttcttttagcgagggcacataccaggtcaactttctgagttccaagaatatttcgccgtacaaattgaaatcatccagtgaaggcttcaagtacattttcaagttctacaagtga

SEQ ID NO: 7412 - RNA, 2073 nt, synthetic construct
  source 1..2073: mol_type = other RNA
atggagctgaactcaaatgataaaaggtatattcaggcaaccttctttaagatgaaaaataaggcagacctgctctacctcatcaacttctgcaaaaagaagatatatggcgaggatgcctacgacatcagcatggttcagttcaactatcatattgtgcctagctacaacaattatcgatacataaccttcaaggtaaagaagaaatctggtggcgaccgcaccatattcagtccaaacaatggactgaaagtgattcagaagtgcctcaatctgatcttccagatcatttataacctgcctagcaaatcaacaactggttttgtgccgggcaggtctatcgtggacaacgcgaaggtgcatatcaacagaaattacgtattcaacgtggacctcaaagacttctttaatagtatcgatcaagcccgtatttggggccgacttcagattcagcccttctactttagtaaaaaggagaagagattggaacttgccaacattattgcttcactgtgttgccacccaatagaagtggagcggttcgtggacggttgttggattaagcaaataaagaatgtcctcccccaaggagcacccacaagtcccattatctcaaatattgtgtgtgagcgcctggatttctatctgaacgccgtagctcgtcgctttaacttaaagtatacccgctatgtcgacgatataacgttctccagcgatcataatgtgtaccagtctgacggcgaatttcggaaagaattagtacggatcataacgaaagaaggattctacttcaataccaataagaccagactgcagaaacgctactttagacaggaggttacgggcgtgatcgttaacgagaaggtgaacgcaaacaagagatttaccaaaaggctgaaaaagtggatctatctgtgggagaattacgggtacagaaaagctagcctattcttcatctccgagtacaaggacgataaaattaacctgactagcatcccagcacttgaggatgtgatcagagggaagattaattacctgaagatgctgaaaggagataaggattctctctatttgacccttaagtcccggttcgacaaactgctgaatggccctatcaaccacgagtctcaaatcatcaagataattaaaccccccattcctattatccatacaccgaaagaactcgttagtatcctaaagaagttcagttccaataacactgccctcaagtactccacacatacatgggacggcggtaaagacaatgaagtcttcgattcaatcgacgattttttaatcaaggctgagatggagtataaactgatatcctacgagctcagcatcctttcaaagtggttgcacgccaaaatttggactttcctctttagcactgacttctctaaaaagggttgggggatgtttaatgtccgttttggctggtctagcatagagctgagggattttttgaacgccaacccatataataggcccgaaaactacattttaccagaaaagtatcagcaaggaatcaagaggtacgggcggaatttcatcatcaacaacttcaagaacgtcatcgacctatttaagaacgaaatagagattcgggatgagaattcaatcctagaggatatcattatctcgctgcacaaaacacacttgaatgggtttaacatcgataagctggagaacctgtccaataagaacttttacacagatgtggactacctttataaggccctcgaattggtctttcacaatattcagaaaaggccacagtatcctaaagtcggatattatggatacgactttgaagactacttttgcctggagatcatccactacgaaagcaatgctaaagggaaatccttcaaggattccaaatttaagttgaaagagggggattttggcactatttccgtttacctccgaaacttatgtgactggagtatcgaaagcggatttcttgagggggactatcgcataaatttcctggcgtctgaatccattatgccttatgagaaaattgacttttcggaaggcttcaagtacattttcaagttctacaagtga

SEQ ID NO: 7413 - RNA, 1203 nt, synthetic construct
  source 1..1203: mol_type = other RNA
atgacgatactacccgaccagaaagattacattcagaagcatttcgaggcaatgcagaataagatcgaattcctcagcctcctaaattatgccaaatcaatcctattcggggagaagggcgagccttttgttatccgacagctcaactactacattaacaccgcttcaaaagctgcgtcctaccaagcgttcgaaatcaagaagaaaaatggaggaacaagaaatatcctggccccaaaccaaggcttgaaggcaattcaatcctgtctgtctctcatcttgcaagagatctacatagtgaatgccgcggcaaaggggtttgtgaaagggcgatccattgtagacaatgccagcatccacattcagcaatactacgtctttaacatcgacttgaaggattttttctctagtattgatcaggccagagtgtgggctcggctcaagatggctcctataaacctgaattcctcaactaacaggcaggagctgtccaacattatcgctaagctgtgctgtcatgaactggaggtggaacgcctgaatatggagggtgaatgggagaagcagaaaaaaaatgtcttaccccagggagcacctacgtcacccgtactctctaacctgatttgcgagaagttagacaagagactgaccggtgtggcaaggcgcttcggactgcggtattcgcggtacgccgacgatattaccttcagcagtctgcaccacgtgtataacaatgaaggcgattttgtgcgcgaaatcactcgcataatcaacgaacagaactttcacataaaggaaacaaagactcgcatgcaggggcagggctacagacaggaagtcacaggacttatagttaacgagcgtgttaatgtgccaaagagatatacaaaggagttaaggaaatggctgtatttgtgggagaattatgggcacgatagggcttatctgttcttcaaacagagctacctgaacgacaagatccgggataaccgtttcaaaccggacatgattaagattctggccggcaaactcgactttcttaagatgatccggggtgcagaggatcatatgtacaaaaaactccagcaacgatttctggccttgatcccaaaaactagctctcttagtaaagtccttgacacctgggaggagcttggcattgaaaaggccatggaagagtattatgctcataggaccgcctga

SEQ ID NO: 7414 - RNA, 2106 nt, synthetic construct
  source 1..2106: mol_type = other RNA
atggagctccaaaaaccacaagttgagtatattcgcaagtcattccgtaagatgcagagcaaaaaagacttcctgacgctgttaaactacgtgaagaacatcttgtacggggaaaagtttcaccccatagtgctaaaatctctgaactatcatagtaaccctgccaacaataacagacgctatatcaagttctctatcaaaaagaagagcggcgggagccgaataattcacgcgcctaataagggcctcaaagtcattcagcggtgcctaaatattattctccaagcactgtacgacgtagatgaacacgcctttgggttcgttcccgggagaagtatagccgataacgcacatctgcatatcggtaaggcatatgtctacaacatcgatcttaaagacttctttacgggtgtggatcaggctcgcatctgggcccggttgaaggtgaaaccatttcagctgaatggaagcgtggggcgtcacgaacttgcgaatctcatcgccggactgtgctgtcagtccatgattgtcgaaagaaaaggcgaagacggggcatggctgaaagaggtccggaatgtgttgccgcagggtgctccaacatctcccgtgctcaccaacattatctgtcagcaacttgattactatctgggaagggtagccctgcggttcggacttacatacagtcgatacgctgacgatataactttttcctcaagccactttgtttaccagaaagaaggcgagtttatcaatgagctggagcgccaaataactgaccacgggttttacatcaaatattcaaaaacccggctgcagaaaaggggctatagacaagaagtgacaggcctggtagtgaatagcaaattgaacgtccagaggaggtatatcaaggacctgcgcaaatggctatactattgggagaactacggatataaaaaggcatccgtgttttttgaatccgcctattccgccgacaaggggtatctaggagccaccaacccagtgatggcgaaggtcattcgcggcaagctcgattttttaaaaatggtcaaggggaaggacgacccgactttctttaagctcaatcagcggttcgagatcttgactgatattgtgaaggaagagctgcaaaatcaaaatacagcagagccgaattgcgtggccgttcctgtcatcgacggacttcctgtgttacacacccccctggaagtggtaaagatcctcaaaatgttctccatcaatgagtcagctctgaagtttgctacacacagttgggaggctggactggacgacaaaatattcaagaactacccagatttcatccgaaaggctaaaaaggagtttaacgtggtgtccagttctctcaacgaactgaatccccagttgagagcgaagatcctctctttcttgttcaacaaaagagttggcataaagtggggaatgcggagagtccgctttggctggagctcacccgagctgaaggaagccatggagaggacccccgagatgatgccagagaacatggtgctgcctgaacatgctcagtttcgggtaacttctcagaggggcggtacacagaccatccagaaattcaaacaggtgattgacatattcaagaacgagattgaaatccgaaatgacggtcccgtgctggaagaactcatctatgactaccattttaagcacctgcagagcttcgagatcatggagttcaccaatctcaacgacaaaaatttctacaccgatgtggattatcttcataaagcactggatttggttttcgggaatattgccaagtacccaggtaatgaaaagctagttggctacagattaattgatgacccttcgtactaccagctggctatcattaattacggttcccgacttaggggcgtttcaattgccagtgaaaagttcttgctgaccaagggcgattttggaacgattaagaaaaggctgaacaacctttgtgattggtcgatcgagacagagtttgccgaggggtcctatcgtttaaactttctcgcttctgatcctaacactgcaagcgtcgagcctattcagtacgccgtcggcttcacctaccttttcactttctataagtga

SEQ ID NO: 7415 - RNA, 1218 nt, synthetic construct
  source 1..1218: mol_type = other RNA
atgaagctggccgaggaaaagtctcagcacattctcaccgccttttctaacttgaaaagtaaggaggatttcctggaactgctaaactacaccaagatcattatatatggagacaaggcgattccttttacgctcaaacaggttaactactactctaatccgagaatcaatatcgagaggtacgccgcatttaccatcaagaaaaaatcaggtgccacacgcgttatccacgcacctactaaaggcctgaaggctattcagaagtgcctcaatctgatcctccagattgtctatgaacaacatcagcataaagccgcaactgggttcattcccagtaagtcaatagtagacaatgcactcttacacgtcagatccatatatgtgtacaacattgatctgaaggactttttcccctccatcgaccaggccagaatttggggccggttgaaatttcctcccttcaaccttaatgataaaacaggccgcttggaaatagctaacataatagcttccctctgttgtcacgagatggaggttgagcgcatcaagccagatgggagctggcagaaagaaaagcgaaatgtgctcccacagggtgcgccaactagccctacactaacaaatatcatctgccaacagcttgatttctacttgacggcggtggccaaacgattcaacttaaaatacagtcgttacgccgacgacatcacctttagctctcaccataatgtgtatcaagagggcagcatcttccttcatgagcttcaccggattatcgctgcccagaacttccatatcaagccatcgaaaacacgtctgcaaaagcaggggtacaggcaggaggtgactggaattgtagtcaatgaggacgtcaatgtccccaaaaggttcgtgaaacaactgcgcatgtggctgtattactgggaacagtatggctatgagagagcctatacctactttctgcagcagtactccgctgacaaaggtcacaccaagaagggacggcccgatatggctaacgtgattctcgggaagctgaagtatctgaagatggtgagaggcgctgataaccacatgtaccagaagctggcatataggttcgaacagctgagcaaagaaaacttaaatcaagaagatcggccggcccatttgaacaaagtgctgtcaattctaatccacaagggacttgacgaggcaatggacttttataagaggtga

SEQ ID NO: 7416 - RNA, 2229 nt, synthetic construct
  source 1..2229: mol_type = other RNA
atgagtattaaggaggaacagtcacagtacatactgtcttccttcagtagcatgaaatccaaagaggatttcgtgggacttttgaactatgcgaaggtcattatctatggggacaaagccgtgcccttcactcttaaacacctgaactaccactcaaacccgcaagtgtcaaaaaaccgctacacggcatttactatcaagaaaaagtctggagctaaccggacaattcacgctccttccaaggggctcaaggctatccagaaatgcctgaatctactgctgcagatcgtctacgcccagcaccagcataaggccgctacagggtttgtccccgggaaaagcatagtagataatgctaaactgcacactaacagcatctacgtgtacaatctggatctgaaggacttctttccctccatagaccaggcacgagtctgggggagactcaagttcccaccattcaatctgaatgagaaaagcggcaggcttgagttggccaatatgatcgctagcttgtgctgccaccagctagaggtagagcggctccaaccggatgggtcttggcaaaaagacgtgcgcaatgtgttgccgcagggcgcacccacctcaccaacactcacaaatatcatctgtcagcagttagacttctacctgagcgctgtggccaagcgtttcaacctgaaatacagtcgttacgccgacgacataacattctcatcacagcacaatgtctatcacgagggtggcgaatttcttaatgagctccaccgcatcattgccgcccaaaatttccatgtgaaaccatctaaaaccagattacagaagagaggctataggcaagaagtgaccggcatagtggtgaatgaacatgccagcgttccaaaaaggtatatcaagcagctgcggatgtggctatattattgggaacagtacggctatgacagggcgtactcttattttgtgcagcagtacaaggtagacaagggatacaccaaaaaaggaaaacctaatatggcaaatgtcatcaagggcaaactcgactatctgaaaatggttaagggctccgactctgcagtatatcaaaaacttaccgaacgctatgacctcctgaggaaggaagaaccagcaaagactaagctcaccatcttttccacgatctccgagactagcgagagcgactcctctttcatcaagattgttgttgaaaacagtgctagcccctctattcccgacaaactgacccgggaaatcaacattcctaaggataccgtgctcccccatgttcttcttattgataacaaactggtcattgaggggacgactcctacaaaaaagctgttgccacataaccccatgcacacagttagttttctcaagaaattcaagatcgcagatggctccggattcaaagagttggtgcacgatgtgattctgtcagatgagattgtggacgatataatcagcaaggtcaagtcccatccaaattttatttaccattacaagcaggagagggtttcgaacatcgaatacattaacgtgggcattcagagtgaggttattcaactgatcaacctgttcgagtcggagggtatccctttctacaaggagacaggaaaacaccctttcaacaatgatgagaagtatactgagtttgcgaagaagtttaaaaagaagtaccgatatggatctggttccgagtacagcaagttacatcaagatattctgaacattgccattgaccagaagataccgcaggactgtattgagttcctccccgatgaaagagcctttaacatacgcagcggctttttcacctggcagcctctgatctatcgaggcctacggcacatctttcagtgtatagccgatcacagcaacatccacggtgaatcgctgaagcatgtagatgacaaagaagtcttggtgaaggcggagaagggagatgcagatgggcataagtttatcgaagtcagtatcctggacaagaattcaaaggctaccatagatagtgacttgctgctacacttttacaaggagtccactgccttcaaacaagacttcagaaatctgtgcgactggttcatcgaatgtgattttaccgccgaacctcccaaaaggattaacctcttaattgctagaagacttgggtctgaatcagtcgagatcgagccattatctaaccctgtgggtggatttaaacatgtgctccggttttatgacgtgcgctga

SEQ ID NO: 7417 - RNA, 2175 nt, synthetic construct
  source 1..2175: mol_type = other RNA
atgaagactaaaaaagacttcctcggcctgctgaattacactaagggcattctgcttggagataaagctgtgccttttgagctaaaacatttgaactaccactccaatcctaaggcaaaccctaaacgttatgtcgcctttgccgtgaagaagaaagccggtgggacaagaaccattcacagccctgccaaaggtctgaaggccatccagaaatgtctcaaccttatcttacaggtggtgtatgcaaaccaccagcataaggccgctaacggctttgtcccaaacaagtcgatcgttgacaatgctagagtccacgcgaatagcttgtatgtgtacaaccttgatctgaaagacttcttcccatctattgaccaagcgcgggtttgggggcgactgaaattcccgccgttcaacttgaacgagaagaccgggcggcttgatctcgcagggataattgcctcattgtgctgccattccatggaggtcgagcgtctggatgatgcgggcaactggaagaaagagattaggaatgtcctaccccagggagctccaacttctcctaccatcaccaatattatatgtcagcagctcgacttctacctgacagctgtggcacgcaggtttcaattgaagtactcccgatatgcagatgatataaccttcagttctcagcataatgtataccacaaggacggcgagtttctgcaagaactacataggctgattgcagctcagaactttcacattaaggagagtaaaacacgcttacaaaagcagggctaccgccaggaagttactggtctggtagtgaatgaagaaccaaacgtcccaaagagatacatcaaacaactccggatgtggttgtattattgggagcaatatggctacgatcgcgcttacagttacttcatgcagcagtacaaagccgataaaggccatcttatcaagggaaagcccgacatggccaacgtgattaaggggaagctcgactatctgaaaatggtgaaggggactgaatcgaccggttatcaaaagctagcggagcggtacatcctgttgacgaagcaggaacctgtggcagaagaattcacagtgtccaatgacatctccgggatgtccgaactcgttagcagtgttatcaaggttaccctcgaaaatagcggtttaccctcaaaccccaacaaattaattaaggccatcaacatccccaaagatacgatactcccgtctgtgttgctcatcgacaataaaattacaaccgaatccacatctagtaataaactgtttccacataacccactgcacaccgtgtccttcctcaaaaagtttaagattgccgacggcagtggatttaaagagctggtgcacgacatcattctgagcgacgaggtagtgaaggacatcattacgaaagttaagtcacaccctaactttatttaccactataagaaggaacgtgtactcagcatcgattatctcaatattggaatacggggagaggtcatccagctgatagatctgtttgaatctgaaggaatccccttctacaaggaaaccggcaagcatccattcaataatgacgaggtgtatactgtctttgccaaggagttcaagaaaaagtatagatacgggtcaggttcagagtactccaaacttcagcaggacattttaagcatcgcctcagatcagaagatcgccctggattgcatagaatttctgcccgatgagagagccttcaatatcaggagcggattcttcacatggcagcccctcatatataaaggacttcggcatatcttccagggcatcgctgatcacagcaacataaatggagaggacatcaagtgcattaacggcagggaagtgcaggtccgcgctgagaaaggggaagccaatttttgtaagttcattgagatctccatccttgataaaaactcaaaggctaagattgagtctgacctgctacttcactactacaaagagagtacagcatttaaacaagactttagaaacctgtgtgactggatcattgagtgcgatttcaccgtggagcctagcaaacgcatcaatctgctgactgcatctcacttcaactacaatattgatgagatcgagcccctggaccacctggtaggcgggtttaagcatatcttgcgattctatgacataaggtga

SEQ ID NO: 7418 - RNA, 2118 nt, synthetic construct
  source 1..2118: mol_type = other RNA
atgaaattggaccaggccactattaaccacatcaacaccacattccacaagatgaagtcaaaaaacgatttcctgtcccttttgaacttcgtcaagggtaaaatttacggggagaagatacacgcgttcgagattaaaaacctgaactactacatcaacacgaagagtaagcagaatcgctacaccaaattcatcattaagaagaagagcggcgaggataggatcatccactctccagctcctgggctcaaggccatccaaaagtgcatcaatgttattttccagagtatttacgaggtgaaccccgctgcaacgggattcgtaatcggaaaaagtatagtcgataatggaatagtccatagcgggaagaactatgtgttcaatttggacttgaaagactttttcagcagtattgatcaagcccggatctggggcaggcttaaggtgccaccctttaatctaaatgaacagaatggcaacttggagattgccaacataatcgcaagcctctgttgtcacgaaatggaggtggaaaggtttgacgcaatcaacaacaagtgggaaaaagtaatcaagaatgtggtgccacagggtgctcctacatctcccaccctcattaacattatttgtcagaagcttgacttctatctttcggccgtcgcgaaacgctttagcctcaggtacacaagatatgccgacgacataactttttctagcgatcataatgtgtaccacaacaatggagaattcctgaccgagatcaaacgtatcattaagagcgaacgttttgacattaaggatagcaaaactcacctgcaaaaacgcggctatagacaggaagtcacaggcttggtggttaatgttaaacccaacgtccattccaagtatgtgaaacaaattagacactggctgtatatctgggaaaaacatggctacgaatatgcctccaagttctttattaacccttacctgaagaacaagattaatcctaaagacaacatccctgatctgtacatcatcctgcgcgggaaattaaattacctgaagatgatcaagggttctgacaattcgacatatattaaactgtccaatcggttcgatctcctcaattcctccgagaagaaagtgctgcaggagcagtctgaaagaataatcctgtcaaagattctgcccactactgagaatgacaaggtgtacatcctccccattattcataccccgaaagaggtagtaaaaatactcaacaagttcaccctaaacaacagcgcactcaaatactctacccataattgggattctggacaaaatgaggatatctttaaggatctggctgactttatcaaaaaagcgcggtcagaattttatcccgcatcagaacagttaaagatgcttaagaaagagttgcatgccaagatcttttcgtttctattcaatgagaaggtcgccgagaagggctggggaatccaccggatcaaatttggctggagcagtcctgagctcctgaaggagatggaaaacaatatcataaaaccggagaattgcattcttccaaagaacgctcagttcatcttaaaaaccaacacaggcaatcaaaccattcagaagttcaaacaggttatcgacatctttaagaatgaaatcgagatacgagatgagaatagtatactgttaaacctactcttagagaaacatgacatgcacctgaatggtttcgagataaaagaggctaaagacctggaaaacacgaatttttttaccgacgtggactacttctcaaaggcccttacccttgtgtttgaaaacattcagaaacgaccagaacacaagatcgtctcttatgttatcaaggagaagtcagattcttacattctggaaattatgcaccataactcaactgctaagggaaagtcctataaagacaagaagctgagtctgcagtccggggatttcggcactattaaaatgcacctcttgaacctgtgcgagtggagcgttgaatccgagttcaaagaggggcccacaaggatcaacttcctgcactccaatgaggatacactgccatatgaaaaaatagatgacgtgaaggggtttaagcatgtgttcaagttttacaagtga

SEQ ID NO: 7419 - RNA, 2070 nt, synthetic construct
  source 1..2070: mol_type = other RNA
atgaaaagcaaaaatgacttcctgtccttgctaaacttcgttaaggggaagatttacgggggaaaaattcatgcatttgagctgaagaatctaaactactacataaacaccaagtctaaacagaacaggtacactaagttcacaattaagaagaagtctggcgaagaccgcattatccactcgcccgttcccggccttaaagctattcagaaatgtatcaacgtgatattccagagcatatatgaggtcaatagcgccgctaccggcttcgtgatcggaaaatctatagtggacaacggcatcgtgcactcaggcaaaaactacgtgtttaacctcgacttgaaagactttttttccagcattgatcaggcgagagtatggggcaggttgaaagttagcccatttaatctgaacgagcagaatggaaatttagagatcgcgaacatcattgccagtctttgctgccacgagatggatgtagagcgatatgatgccataaataaccggtggtataacgtgacaaagaatgtcgttcctcagggagcaccgacatcccctactttaataaacatcatttgccagaggctggattactatttaagcgcagtggcgaaacggttttctctgaactatacccggtacgcagatgatatcacattctcgtcgaaccataacgtttatcaaagtggtggggagtttattacagaaattgaacggatcatacgtagcgagaagtttgacatcaaagactctaagactaatctgcagaagagggggtatagacaggaggtcactggcttagtagtcaatattaaacctaacgttcactcaaagtacataaaacagattcgtcactggctctacgcatgggagaagcacggatatgaatacgcctcaaacttcttcatcaagcagtacctgaaagacaagattaatcccaagacgaatacacctgacctatacagcgtccttcgtggcaagctcaattacttgaagatggtgaagggtttcgagaactccacctatctgaagctcagtaatcgcttcaaccttctgatagacttttccgacaagaacgtaaccctgacgcagtccaatcaagtgacagtcagcgaggtgctgcccgaccttaagaataacaaaatttcaaagctgcccatcatccatacccccaaagaggtcgtgcgcatcttgaacaaatttaccctgaataactccgccctaaagtatagtacccatacttgggatgccggccagaatgaggacgtgttcaaagatctgccagatttcctgaagaaagctaatagagagttcaaccccgtgagcgaatctctcaaaactctgagaaaggaactgcacgctaagatcatctcctttctgttctatgataaagtggccgagaaaggatgggggatccatcgggtgaagtttggctggtccagtcctgaacttctcgccgagatgcagattacgaacatcaaaccagaaaactttacgatcccggagaaggcccagttttcattggaaaccacacgaggtatccagaccattcagaaattcaagcaagtcatcgacatttttaagaacgagatcgaaattagggatgaaaatagtgtccttcgcgagctcctgatcgaaaagcacaacactcatctcaatggtttcaatatccgggaaatgcgcaacctggagaataccaatttttttacagacgtggactattttagcaaagctctgaccctgatcttcgagaatattcaaaaaaggccacagcataaattcgtaagctacatacttaaggacgaggaagattcttacatcctcgagattattcaccacgattctaccgccaagggaaagtccatcaaagacaataagctctcactggaaagtggtgacttcgggactgttcgaatgcatttgctcaacttatgtgaatggtcagtggagtccgaatttagagaagggccaactagaatcaatttcctcgattctaatcaagatacaccaccttatgtgaaaatcgatcaagctgagggattcaagtacattttcaagttctacaagtga

SEQ ID NO: 7420 - RNA, 2121 nt, synthetic construct
  source 1..2121: mol_type = other RNA
atgaaattagaccagactgtgattgactatatcaacactacatttcacgagatgaagagtaaggatgacttcctctctcttcttaatttcgtgaagaagaagatctatggagaattgactcacccgtttgagatcaaaaacatcaactactacatcagctctaaatctaaacaaaaccgctataccagatttgtgatcaaaaagaagtctgggggagatagaatcatccattcccccgttcctgggctaaaggccctccagaagtgcatcaacataatcttccaatgtacctacaaggtgaatcccgcagctacaggattcgtcataggcaagagtatcttcgataatgccattgtacacagcggaaaaaactacgtgttcaacttggacctgaaggattttttctccagcattgaccaggccaggctttggggtaggctgaaagcagcaccttttaatttaaatgagtcctccggtagactcgaactggctaatattatcgcatgtttgtgttgccatgaaatggaagtagaacggtatgacccaataaacaatcagtggtataaggccattaagaacgtcgtgccccaaggtgcgcctaccagtccaacactgatcaacataatctgccagcgtctggattactacctctcagctgtcgccaaaaggttttcggtgaattacacacgatacgcagatgacatcactttttctagcgatcacaacgtctaccagaaaaacggcgagtttattaccgaagtggagcgtatcataaaggtggagaacttcaacattaaggatagtaagacacatctccagaaacggggttatcggcaggaggtcaccgggttagtggttaatcacaatccgaacgtgcacaacaagtacattaaacagattcgccattggctgtacgcttgggagaaagatggctatgagtacgcttcaaatttcttcattgaagcctatctgaaagacaagatcaatcccaaagccaccacccctgatctgtcaaatgtgctaagcgggaaactcaattacctaaaaatgatcaagggatttgacaatcccacgtatattaaactcaatgctcgcttcgagtcactgttgattaagggcgacaaaaaaaacaaagagacaaccgccgaccaaagtcttaccatggacgggctgagcgagattgaatattccaaggtgtccaatttaccagtggaacacacacctaaggaggttgttcggatccttaataaattcacgctcaacaattctgcactgaagtatagtacacacaattgggacgcgggacaggatgacggcatattcaaggacctgccaagctttctgaagaaggccaattctgagttcaacccagtctccgagcatctcaaaatgctgagaaaggagctacacgctaagatcatctcattcttattctacgacaaggtcgccgaaaaggggtgggggacttacagaattaaattcggctggtccagtcctgaactactgttggagatgcagaacaacaacattaaacccgagaactttatactgccgcagtctgttcagtttttgctggaaacaaacactggcgtgcaaacgatacagaagtttaaacaggtgatcgacatcttcaaaaacgaaatcgaaattagggacgaaaactcgatgctcagggatctgttgctggaaaagcatgataaacatctcgaaggctttaacattcgagagatgaagaacctggagaataccaatttttttactgacgtcgattacttcggaaaagctctgaccctgatatttgagaatattcagaaacggccagagcaccgattcgttagctatgtactcattgatgagtctgacggttatatccttgagatcatacaccacggaagcaacgccaagggtaagagcattaaggataaaaaactgtcactggagtcaggcgattttgggacaatcaagactcatcttcttaatctgtgcgagtggtccgtcgagtccgaatttaaagaaggccccacgcgcatcaacttcttggatagcgacaagaatactctgccttatgtaaagctcgatcaagcggacggcttcaagtacattttcaagttttacacctga

SEQ ID NO: 7421 - RNA, 2118 nt, synthetic construct
  source 1..2118: mol_type = other RNA
atgaagctcgaccagacactgatcgactatataaacactacattccacgagatgaaaagcaaggacgatttcctcagtctcttgaacttcgtgaagaaaaagatttacggcgaggacacccaccccttcgagatcaagaacatcaattactatatctcgagcaaatccaaacagaaccgttacaccaggtttgtcatcaagaaaaagagtggtggggatcgcaccatacactcacccgtgtctgggttgaaggctctgcagaagtgtatcaacctcatctttcagagtacatataaggtgaatccggccgcaaccggctttgtcattggaaagtccattgtagacaacgccattgttcattcagggaagaattacgtgttcaacctggatctgaaagatttcttctcctcaattgaccaggctcgcctgtggggacggttaaaagtggcgccatttaatttgaatgagcaaacaggccgactggaactggccaatataatcgcatgcctctgttgtcacgagatggaggttgagaggttcgatacaataaataaccagtggaacaaagtgatcaaaaacgtgattccccaaggcgctcccacaagccctacgcttattaatatagtctgccagagactggattattacctgctcgctgtagctaaacgcttttctctgaactataccagatacgccgatgatattaccttttctagtgatcacaacgtgtatcagaagaatggggagtttatagccgaggtccaacggatcatcgagaaagagaactttaacattaaggactccaaaaccagattacagaaaagaggataccggcaagaggtaacgggactggtggtcaatcataagccaaatgtccataacaactacattaagcagattcgccattggatatacgtatgggaaaagtttggatacgagtatgcaagcaacttcttcatcaaacagtatctaaaggacaaaatcaacccgaagactaacacccccgatctcagcaatgtgctgtccgggaaactgaattatttgaagatgatccgaggtttcgacaactctacttacatcaagctgaatgaccgttttgaactattgctcaacatcagcatccagaagaatgagaatatcgtggccgaccaatccacccttcttggaatgccagaagtggagaacaatgaaaactttaaactcccagtgttacacacaccgaaggagcttgttcggattctgaacaagttcacccttaataattcggcactaaagtactcaactcataattgggatgccgggcaggatgaagacatctttaaagatctacccgattttctcaagaaagcctcaaaagaattcaacccagtctctgagtatcttaaatcactgaaaaaggagctccacgcaaagataatgtccttccttttcaacgaaaaagttggcgagaaaggctgggggatttaccgagtgaaattcggctggtcctcacctgaactgttgaaagagatgcagattagtgacataaagccagaaaactttactctgcctcaaaatgctcagtttaggctcgagacaaatagaggtaatgagactatccagaagttcaagcaggttattgacattttcaagaacgagatcgaaatcagggacgagaacagtatcctgcaggatcttctgctggaaaagcacgacaaacacctgaatgggtttgagattaaagaaatgcagaacctggaaaatactaacttttttaccgacgttgactatttcagccgcgcgttgacactgatctttgaaaatatacagaagaggcctgaacatcggtttgtgagctatatattagtcgacgaacccgactccaatatcctagagattattcatcatggcagcaccgccaaaggtaagtctatcaaggacaaaaagctgtccttggagagcggagatttcggcactatcagcatgcacctgagaaatttatgcgaatggtctattgaaagtgagttcaaggaaggccctatcaggattaactttctcgactctgacaaagatacgcctccttacgtcaagatcgatcaagtggatggtttcaagtacattttcaagttctacaagtga

SEQ ID NO: 7422 - RNA, 2061 nt, synthetic construct
  source 1..2061: mol_type = other RNA
atgatcttaaagaccgaaaacatcattttcatcaaggagacgtttcagaacatgaagtctaagcatgactttttggacctgctgaactatgtgaagccatttatttatggcgagaagacccagagctttgatcttaaccacctaaatttccatagcaattctaacaccaagaagtacaagtctttcatcgtaaagaaaaagtctggcgcagataggacaatcaattccccatcaaagggtctgaaggcaatacagaaatgtcttaacctgatctttcagacgatttacgacgtgcatccttctgtctatggatttgttaaaagcaagtccattgtgaacaatgctaatattcactcaggcaaccactatatctacaacatagacctgaaggatttctttagcagtatcgaccaagccagaatatgggggaggctgcagtatcccccatttaatctcaacaaagaacgggatctgcttgaagtggccaatatgatctcgtcattatgttgcttcaaaattgatgttgagaggctggatgagaataatgaatggcagattgtgaacagaaatgtccttccacaaggtgccccgacctcccccaccatcactaatatcatatgccaacagctggatttctatttgacagcagtggctaagagatttggcctccgatattcacgctatgccgacgatattactttcagtagcatgcacaatgtatacaacgaaaacagcgattttatcaaagagctgaatcgcgtcattagttctcagaacttccatattaagcagagtaaaacacgactgcagaaaaaaggctacagacaggaggtaaccggtctgatagtgaatgctaaacccaacgtcaactcccgttacattaaacagctccgtatgtggctattctactgggagaaccatgggtatgaaaaagccaatctgttctttggctcgcagtactttaaggacagaggatatgttaagaagcgagtgcccaatctagagttcgtgctcgatgggaaactcaactttctaaagatggttaaaggggcagaaaatggaacatacctgaaactttacgagagattcagggtcctctctgaaaagaaaatatcgtttcaggcggtgcagatatcaaatattaaagaggtgaaacacgaccctcaagagacagtgaaactcttgaagttcttcaagtacgacaacaagtacagttttaaacagttggttcacaagcccgtgaacgaaaacgacttcaattttatcgaaatcctcaaaactgcgaacaagcaatttatggatttcagcgtggataacaataacaaactgaacatcccaaaggaccttatatccggcgtccagaatctctttgagattctgcgcacttccggcatcgatttctacaatatcaacaatctccaccccctggaagacaagaacattggggcaaagattcagctgttcaaaggggattaccggtttggaaatgagaaaagcgaatctagcattctcagcgacctgatcatcaggaccgctctgaaaaaggagttctcagaccaaatcaacaacattgtctatagtttcggagaaaatgataacagcggactgttcgactacaaacagatcattttctatccggagttacagaaattccagtccaaggctaatttcttcacctgggtgcctaacgttaaaatagccttgtccatcatctttgagtcaatcttaaaacacagcaacgtgaatgggaaccgcaattttacacttgaagagaagggcattatcatcaatatcgagcggaaggccgtgaatgatctgattaagattgagttgtccatactggacaagaattctttgcttatgggttccattgacaacatcctgtccgacatgcgccgggacttcttccctgttttggtgggaatatgcgatttcaaggtccaatttaagagtatcatggaggaaaactatgaatgtcgggtcctcccttatgcctctaaagtaaagcctattgacgaggatccacaaggcttcaagtacatctttactttttacgactga

SEQ ID NO: 7423 - RNA, 2079 nt, synthetic construct
  source 1..2079: mol_type = other RNA
atgaagcttacacagaccgatatcagctttattaaggagtcctttgagaaaatgagggataagagtgacttggtggccctgctgaattatatcaagcccattctttacggagagaagacctacttatttactgtgcacgacttaaactaccacataaacaacaagaatgacaaccgctatgagaagttcgagattcgaaaaaaatccggcaaaagccgcgtaatacactccccaaacaatgtgctaaagtcgttccagaagtgtctcaacctggtgttccagacagtgtacaaatttcacagcagcgcgactggttttattggcggaaagtcaatcgttgacaatgctaaaatccacgtggggagcaactacgtttacaatatcgacttgagagacttttttccatctatcgatcaagctagactgtggggacggctgcagtatcccccctttaacctgaacaaggaaaacgacaatatccagcttgctaatattatcgcctacctatgctgccataagtataaggtcaaacggctgatcgatggcaaatggaagattgtggagaaaagcgtcttgcctcagggagcccctacctctccagtagtctcaaatattatctgtcagaggttggacttctatctgagcgccgtggctaagagatttggggccaaatattccagatacgccgatgatattaccttcagttccgttcatcacatttacaaagagaaccatgcattcatcttagaagtccagaaaataattgccaacgagaatttcaccattaaccctcagaaaacccggttacaagaaggcgcatacaagcagatggtgacaggcctggtggtaaatcagaacgttaatgtctccaagaagtatatcaaagaactccgaatgtggctgttcttctgggagacatacggggttcagaaagcaaccgttaagtttaacctctaccgcgccggccaggacataggtagtagctctaacatgattaaggtgattaggggaaagttggatttcttaaaaatggtcaagggggcgaacaacctcgcttacctgaaactcctgaagcgattcactgaactcgtctctgcccaaaactctatgcaaaaaaaattggacaagcagaagcatatagagacgtttaagatatctgacttcaacctccaccagaagacaacgcatcacgaacctcaaaagctagtgtctctgctgaacaatttcacagccgggagtaacctgaaatatgctactcacgggtgggaggagcacgagacatatgatgagttcatcatcaagctgacaagagattggcagaagattgaagacgacctctttgatctgaagaagacctttgcgaccaaaatcagcgtattcctcgattctgaaaaagtggaagaaattggctggggggctaaaactgcaaatgaacgcatctattttggctggaaaagtaaaagtctggtcgagtggagtcacgcaaatcccaataaatccccgttctactttcctattccacaagataaaaaggttttcttcgacggaattcaaaccaattacttctatgacgtcacagagattttcaaacggcagattgaaatacgcgaggagaataatcatctgcataatcttttcatggacctgagaaagaactacctaggctatgatttcaagcttacgtcaataaacacgaaaggtatcactttctttaccgacgtgaatactctcaaaaacggaatcattaagatctttgagtccatcaagaagaggccacagtttccgaagataaagatcgtagtggaacacctcgaaaattccatcgagatcaaaatcatccatgtggattcaatctgcaacaggcccatcaatgataacaaaatacttctggccaatactggggactttgcagatcttaacaaatacttcaccaatctctgtgactggtcaattgagtcaaattttatcgacggtaagtcatacaggattaactatttggactcgcgtgtgggcatagataagatctccactatcagcaagcgtgaaggttttacatttattctgcggttctatctgtga

SEQ ID NO: 7424 - RNA, 1329 nt, synthetic construct
  source 1..1329: mol_type = other RNA
atgatattgaccccggagtttaagttccaggtccaaactgccttcaaggagatgcagtctaaaagtgactttctggagctcctcaatatcgcaaaacagatgatgtatggggacaagacagtcccctttagtgagaagcaattgaactacttcatcaccaaggattctcaagttatcaagtcccgagtagactttcggatcgacctgagcaaatttgaacctttcattgaggagaacgtggttattgagaagaagaacattaatcgcaaagactgctatgtacccttcatcattaagaagaaatcaggtcaggacaggacaatccacgcccccgttaagggtttgaaggagttccagaaagcacttaacattatcttgcagtgcctgcacgaaccacacacagcggctacaggcttcgtaattgggaaaagcattgtcgataacgctaagaagcatatcggacaaacatatgtctacaacatcgacttaaaagacttctttccatcagtggatagatctcgagtatggggccgtttgctggtggcccctttcaatcttggcactacagtggaacggaaaaatatagccaactttatagccactctctgttgtactcccatggaagttgaacggttcaaggaagggaactggatcaagataacgaccagcgtcctacctcagggagcccccacatcccctacccttaccaatattatctgtgagaaactggacaaacgcctgaatggcgtggcgaagagatttgggctcaactattcccgctacgctgatgacatcactttcagctcaaagcacaatgcttacgaggtgtccccaaccaaggtggaaaaaatctttgcaagcggcacgacctttgattgcgaagttagaaagattatcactgagcagaacttccacataaaagagactaaggtgagactccaaaaaaggggatataggcaggaggtgaccgggcttgtcgtgaatgataagatcaacgtgacccgcctctacgtgaagcagcttcggcagtggctgtatttatgggaacgttacggatatgataagtcctacgccattttcctgaatatctacttagcagacaagggacatgtgaaatctgaacagccaaacatggccatggtgattgagggcaaactgctctatctaaagatggtgaaaggcgctgatgatgggacatacctcaaactgaagaaaaggtttgatctgctactgggtaccacgtcgaagaataacagtgaagcagttaatattctggatctgatatttgacgtcggtctggacgaggctatgacccattacaaaaaatga

SEQ ID NO: 7425 - RNA, 1278 nt, synthetic construct
  source 1..1278: mol_type = other RNA
atgcagacgaaaagtgactttttatctctgctcaatctggctaaactggagatctacggagagaaaaccattcctttttccgagaagcagtttaattactatctcaccaaggactccagtacgttcaagagcaagattgacttccagatagatctgtcgggagatagtgtcgtcattaacgagaatgtaatcgtggagaaaaaaaatcagcaaaggaagtcctgttacacaagcttcgctatcaaaaaaaaaagcggaaaagaccgcactatccatgcaccaatcaaagggcttaaagaatttcagaaggccttgtgcctagtgttacagtgtctctatgagccccactctgcggcaaccggctttgttctgggtaaatccatcgttgacaatgccaagaagcatgtcgggcagacttatgtgtacaatatagaccttaaggacttcttcccctcgatcgacaaaagcagagtttggggtcggttgctggtggccccattcaatttgggcaactcaaacgagcggcgcacacttgccaacttcatcgctactatttgctgcacacccatggaagtagaacgtttccaagaaggcaagtggatcacagtgactacttcagttttgcctcaaggggcacctacgtccccagctattaccaacatcatatgtgaaaagctggacagacggctgacaggagtggctaaaagattcggactcaattacacccgctatgccgatgacatcacttttagctctaagcacaacacctatgaggtgtctgattcaaaggtggaaaagatctttgttgccggcagtagcttcgattgcgaggtgaggaaaattattagcgagcagaactttcacattaaggagtctaaggtgaggctgcaaaagagaggctatcgccaggaggtaactggcttagtcgtcaacgataagattaacgtgacccgacgttacgtcaaacagctgaggcagtggctttacttttgggagcgatatgggtatgataaagcatacgcatttttcctgaactactacctgtcagacaaggggcacataaagttcgagaagccgaatatggccatggtggtcgaagggaagctgctgtaccttaagatggtaaaaggcgccaacgatggtacctatctcaagttgaaggaacggttcgatctgctcgttggcacagcgtccaagaataataacgaaaaagctaccatcgtggatctaatttttgatgtgggactcgacgaagccatgacacattacaaaaagtga

SEQ ID NO: 7426 - RNA, 1359 nt, synthetic construct
  source 1..1359: mol_type = other RNA
atgaaaataacattggaacaatcaaagacgatccaggaggcttttaagaagatggactccaagaatgatttcctggctctacttaatgaagcgaaaaagctgatgtatggcgacaaaaccattcctttcgaggagaagcagctcaactactatattagcaaggattcgatcaagaataagagcgtcaaaagcgagaagaatatcagcaccgtgcttctaaaggaggagacaagttttaaggcgtccgttcgcaaaccttcctacacatcattcacaatcaagaaaaagtccggaagcgacagaactatttacgccccggtgaaggggctgaaagagctgcagaaagcactgaacattattctccaggcaatccacgaaccacacatagcagcaacaggcttcgtactggggaagtcaatagtggacaacgccaaggttcatgtcggccagatctacgtgtataacctggatctcaaggattttttcccatccgtggataaggccagggtttggggccggttactggtggcccctttcaacctcaacacctccgatgaacggaagaaaattgctaacatgattgccggtctgagttgcacacccatggaggtcgaacgctttatcgacaataattgggtgaagataaccactgccgttctaccacagggagcccccacctctcctactcttaccaataccatttgtgaacggatggacaagcaattgtctggcgtcgctaagagatttgggctcaattatactcgatatgctgacgacataactttcagcagtaagcataactcttacgaagtctcaccgaataagttcgagaaaatttttgtgtctggctcaacctttgataaagaagtgagaaagatcatcgctaaccagaattttcacgtgaaggaaagtaaagtcagactgcagcaggaaggattcaggcaagaagtaactggactggtagtgaatgaaaaagtgaacgttacccgtcgatacatcaaacaattgaggctttggctgtattattgggagacttacggttacgacaaatcttactcctttttcctccagaagtattgccgcgagaaaggcaacgtgaaaaaagggcagccaaacatggccatggtcctggatggaaaactgttgtatctgaaaatggtgaagggtgagaaggatgagacgtacttgaagatgaaaaataggttcgacgttttagtgcttaacacgacccccagcaaatctctcgtgcccaataaactgctggaggtaaaggacacaaaggagaacattgggaagaacatcgtcgatttaatcctcgagatcgggcttgagggtgcaatgaaaaattacaaaagttga

SEQ ID NO: 7427 - RNA, 1359 nt, synthetic construct
  source 1..1359: mol_type = other RNA
atgaaactggccctggagcagattaataacctgaaaaccgcttttgagaagatggacagcaaagaggacttcttggcactcctgaatctggctaagtctttcttgtacggcgagaacacagtcgtgtttgaaatgaagcagctgaattactacatcaacaaagaccagaaaacaaccaataagaaggtgaacttagagggattgctcaataccggggatgatcgcttcaagactgccgtcagaaagcccgcttacacaagtttctccataaaaaagaagtctagggaggaccggattctccatgcaccagtcaaggggctgaaagagttccagaaagccctgaaccttattttccagtgcgtttacgagccacacaaggccgccaccggcttcgttctcggaaagtctatcgtagataatgccaagctacatgtcaatcagaattacgtgtacaacttggacctaaaggatttttttccatccatagatcaggcaagagtctgggggcgcattaaagcagccccttttaatctggagacaactgtagagcggcaaaaaatagctaatatgatcgcagctttgtgttgcactcctatggaggtcgaaaggaacactaacggtgaatggaaaaaaatcacgcttcccgtgctgcctcaaggagcaccaacgtcccccaccttgaccaacgctatctgtgaacgtctcgacctgaggcttgcaggggtagccaagcggtttggtctgaattatagtcgatatgccgacgatattacgttttcaagcaaacacaactcattcgaaaagaccaagaatgtttttgagaacatctatctgaaggactccacttttgacaaggaagtgagaaaaatcattgctagccagaacttccacatcaaagaaagtaaggtgcggcttcaaaagcagggatataggcaggaggtgacaggcattgtggtgaacgacaaggtgaatatcaaccagaagtatatcaaacaactgcgtcagtggctcttctactgggaaacatttggctatgatcgagcctaccagtattttctccaaaaatatgtcgcgaacaaaggtcatgtgaaaaaaggccagcctaatatggccatggttctggatgggaagttactgtaccttaagatggtgaaaggcgaaacagatccggcgtacctgaagctcagagagcgcttcgaaaaactcattggctcgaagtctaacatctcagagatcctggatttatgggaaactaagggaatagatgaggctatgaaagccttttatttcgcgaagcagcaagacgtactgcccaaggtgagcacccgcctaaatgttgaagacattttctacctttga

SEQ ID NO: 7428 - RNA, 1281 nt, synthetic construct
  source 1..1281: mol_type = other RNA
atgaagttcacccaagagcagaaatcacagatcaggtccctctttgacaaaatgaattctaaatcggacttcctctttctcctgaataaagccaagatgatagagtatgaggataagatgatagacttcgaagaaaagcagctgaacttttacatcaacaaagactcaaccaacaagaaagacgcggaatcccttaccaaaaacagcaagaactttttctacaactccttcagtattaagaagaaatctggaaaggagaggattatcaacgctccagttacaggactgaaaaacttccaaaagagcctcaatatcatcttacagtgtgtttttgactgtcacgacgctgccactggctttgttcccggcaagagcatcgtcgataatgctaagattcatgtggggcagacttatgtatacaacatcgatttgaaggacttcttttcttccattgataagagtcgaatatggggtcggctcctgtttcccccgtttaacctgaatacatcttcccaacggaaaaaaattgcaaatatgattgccggtctagcatgcactcctatggaagtggagcgctttatcgatggctattggtgcaacattgaaaattcagtgttacctcaggggagtccaatgtcaccaataatcaccaacatcatttgcgaaaggcttgacagacagttgaccggcgtgtccaaaagattcgggctgaactacagcaggtacgcagatgatattactttcagcggcaagcacaacacgtatctgaaaggactgggagtcgtggagaaaatcttcgagaaaaattctacgtttgaccttgaagtccggagaatcatcaacaacgagaagtttcacatccaagaggacaaagtgcggctgcagaaggagggttatcgccaagaggtgacaggcctggttgtgaataataaggtgaatgtctctaagcgctatattaagcagctcagacagtggatatattatctcgaaacatatgggtacgataagagctacagtttgttcttgagcaactacattgatggcaaaaaaaattcatccagccagacccctaatatgcttatggtaatacgtggtaagctgctgtacctaaagatggtaaaaggagataagaacgaaacctacttaaaactgaagaatcgattcgattcggtcattatgccccattccagtattagcttcatcatcgacatttggaagaatgacgggatcgaaaaagccatggagatctactacaaccagaaggtgaaaaatgagaagtga

SEQ ID NO: 7429 - RNA, 1329 nt, synthetic construct
  source 1..1329: mol_type = other RNA
atgaaaacaaatgtggatcaacagaccgagataaaggaactattccaaaacatgaagaaggaggccgatttgtggcatctgatcaacgtggcgaaaaaacacattcacggcaccaaggcatctaatttcaagcccaaactgcttcagcatttgatcctgaaagacgctaaggagttcaacctcgaaaattcaacctcagtcttttatcaccagtttgagatcaagaagaaatccggcggtatcagaacaatccacgcgccacaccctaaactcaaggaagtccaggaggcccttaattacatcttccagtgcgtatatctgccccatccgaatgcaaccggatttgttgtaggtaagagcattgtggataacgctaagaagcacgttaatcagaaatacgtatacaatctggaccttaaagactttttccctagcatagacaaaagtcgagtctggggtaggcttctaatagccccattcaacctgaagaacagccctaagggtattaagatagccaatatgattgccagtatctgttgtacaaagttggacgtggaacgtattaaggacggcgtgtcccatactattttgacctccgttctgccacagggagctcctacctctcccactctcactaacgccatttgcgaaaaaatggacattcggttagccggagccgccaaacggtttgggctgcagtactctcgatacgctgatgatattacgttctcgagtaatcataatgcatgcgagtacgcgaaagggaagttcgagaagatctacaagaaaaacagcgtcttcgataaggaggtgcgcagaatcataacagatcagaatttccggatcaatgagtccaaggtgaggctccaagtcaaaaacgtgaaacaagaagttacaggaatcacggttaatgaaaaactcaacgtctctcgcgactatattaagcagcttagaaagtggctgtattactgggagagctatggctttgataaagcatcaaccttctttactcagaactacatggcagagaaagggcacctggtgtccaaaaagcccaatatgactcacgtgctggaaggcaagttactgtatctgaaaatggtcaagggagccgaggattctacttatattgggctgaagacaaggtttgagaagttaagcggccgcgtgaacaaaatagaccagctgttggacgtatgggaaaaagagggcgtggaagctgctatctccttttacaactttgggaaaaaagctaagaagattgcaaccatcgtggattttgagtcattcctcatcgacaacatcaacattgacaacaagatcctctga

SEQ ID NO: 7430 - RNA, 1383 nt, synthetic construct
  source 1..1383: mol_type = other RNA
atgaaactggcgattgatcaggaaaaaaagattaaacagctgtttgccaagatgaatagtaaagaagagtttttgcagctgctcaatttctcgaagaagatcatatacaaagaggagactataccattcaccattacacagctcaacttctacatctcaaaggacagtaacaagttcaactccaagaagaaatactaccacacgtttgaaatcaaaaagaaaagtggggctcctagaacaatacacgcaccttgtaaggggttactagagttccagaagtccctgaacattattcttcaggcattgcataagccgcacgaagccgctacaggatttgtacccaacaagagtatcgttgagaatgctaaaaagcacatcaacaagaactatgtgtacaacatagaccttaaggatttttttcccagcgtcgacgctgcaagggtttggggccgtctcaaagtagccccttttaatctgggctcatctgacaataggaagcaaatcgcaaatatgattaagagcctctgttgccataagatgaaggtggagcgctttgtcgataataactggataaaactggagaagctggttctgcctcagggagctgccacctcacccacactcactaatgccatctgcgagcggatggatatcaaactcactgggttagccaatcgtttcaatctggactacactaggtacgccgatgacattaccttttctagcaatcacaacacatacaagatttccttagaaaaggaggaggccatcttcgagaaagatactacatttgatatcgagctgcgcaggatcattaaggagcaaaacttccatatcaaggaaaccaaagtgagactacagaaacggggttatcgacaagaagtgaccggcttagtggtcaacgacaagatcaacattaaacgcagctacattaagagcgtcagacacaatctctatttgtgggaacggttcggttatgataaggcatacgagctcttccttaacaattatctgaaggaaaaaggccataccaagaaagggaatccaaatatgctgatggtgttggagggaaaactgctgtatttgaagatggtgaaaggcgaatccgacagcacctatcttaagttgaaatcccgatttgataagctttctatcactccccagccagtggagaaaattaagaagagactcacgctgaaagagaaacggcttaaaaccgacaacgccaaaaacaagtctgatatttcctcaatcgaattcatgaaactggtcgctaaggccaaagccaagaaagaggcgaataagaagaagaacatcaacaagatactggacgtgctgttcgaaaaaggactggacgaagcgatgaaactatatgacaaatga

SEQ ID NO: 7431 - RNA, 1323 nt, synthetic construct
  source 1..1323: mol_type = other RNA
atgaagcccacacctaaccagaaatatacaattaggcagctcttcgcagaaatgaaaactaaggaagattttctcagcctgctgaattacagtaaggaggtgctgtaccgtgagaaaatgattccattctccatgaagcaactcaacttttacggcagcccgaagtttaatatccacagattcgacaagaaattctatcacgaattcgaaatcccaaaaaagtccggtctgaagcggctcatacacgcgccaactaaaggcttaaaagagttccagaaggcactgaatcttattctccactgcgtgtatgagcctcattacgctgccaccgggtttgtgcccgacaagagcattgtggataattcgaagcctcacgttggcaaactgtacgtgtacaacattgaccttaaggacttttttccctcaatcgacgcttcaagggtatgggggcggctgctggttactccatttaaccttggaacaactaatgagagacgatacatagcaaacatgatcaaaatcctgtgctgtcattacctgccagctgagcggtttgtcgataacgtatgggtgactgagaaacgccatgttttaccccaaggcgcagccacaagcccgaccttgacaaacgccatttgtgagcggctcgatatcaggttgtccggggtcgccaaaagattcgggctcacttatacccgctatgccgacgatattaccttctctagtatgcacaactctttccccaacaaagaaggcgtcgcggaaaccatctttaagaagggatccacctttgatctagagctcaggaaagtcatcgagtcccagaacttccacataaaggagaataaagtgcgcctgcagaagaaaggctataagcaggaggtgacgggtctggtggttaatgataagatcaacgtgcctcggagctatatcaaggatttgagacactggatctacttctgggaacgatatggatacgacaaggcttacgagctgtttttgaagaagtacagtaacaatcgtggccatgtgaaaaaaggcaagcccaatatgggtatggtcattgaggggaagctactttatctaaagatggtaaaaggatcagaagactctacctatttgggacttagagaaaggttcaagacgatatgcgatgaaaattctaacgacaacaataagacggtcaatacacatatcgaagggctgctggaggaatttttccttaaaatggacaagcctattgagaataccaacacccagaaaattttagatctgatcttcgaggaaggactcgaccgcgccatggagctgtacaaaacatga

SEQ ID NO: 7432 - RNA, 1305 nt, synthetic construct
  source 1..1305: mol_type = other RNA
atgaagctcaacacctatcaaacggagtatattagggatctttttgcgaatatgtcctcaaagaaggacttcctatttctgctgaacaaggtcaaagagttaatctacaaggaaaagacgatcgccttttcggaacaacagctgaactattacatcaacctcaaccccaacgtgaaaatggaaaaaaagtacttcagcttcagcattgaaaagaaaagcggaggcactagaacaatccacgctccctcagaaggcttgaaggaatttcagaaggcagtgtcgatcatcttatccgccatccatcagccccacgataatgcgaccggattcatccagaataggagcatcgttaataatgccagaaaacatatagggaagaattacgtctacaacatcgatttgaaggactttttccccagtattgatgccaatcgcgtttgggctaggctccttattgagccattcaatttgggaaccagtgtcgagcgcaaaaagatcgctaatatgataaaggccatttgttgcaccaacatggaggtgcagcgcctgatcgatgacaaatgggagagcgtgaacttgaacgtccttccacaaggcgcatccacctcacctgttctgactaatattatttgcgaccgactggacaaaaggctgactggcgtcgccaaacgctttggcctgaattatactaggtatgccgacgacatcacattctcttccaaccacaatgtgtaccgcctggattccggagatactgaaacaatctataccgctaattctagtttcgatagagaggtacggcggattattgtggggcagaagtttcatgttaaagagtccaaagtcagactccagaaacgaggttacagacaggaggtaaccggtcttacagtgaacgaaaaggtgaacgtgccaaagcggtacataaaggagattagacactggatttacttttgggaacgttacggctatgacaaagctacagagctgttccgtgtgaagtatcgaaaggacaaggggcacatcaaaaacgactcaccgaatctaataatggtgctggagggaaaactcttatatctgaaaatggttaagggtgagtacgatcctacctacgtgaaactgcggtctaggttccgggagctcttgaacccagacagtgcaattacaattaacctcagcgacgacaactacgaatctatcatactggacactatctttagcgacgggcttgatgaagcaatgaaggaatatgatcctgtctatatagagatcatgtctcctgagcagcggaataaagatgtatga

SEQ ID NO: 7433 - RNA, 1134 nt, synthetic construct
  source 1..1134: mol_type = other RNA
atggaagacctcctatctctcattaagctggtgaatgaaatgttatacggggagacagctaaggcggtgaaactgaagtcacttacttactattcaaaccctagcttgaggggagatgtgtacgagaaattcaagattccgaagaaaagcggtggcgttcgagttattcacagtccagttagtggcctgaaaagcatccagaaggccatcgctcatatactgcaatcagtttttgagccccaccccaacgccactggatttgtgaccgataaaagcgtagtggacaacgctaagccacacaccggcaaaaacttcgtattcaatactgacctcaaggacttctttccctctatcgacaagcccaggttttggaaacggctgcagtatccaccatttaatcttaatcgcaataacggacggctggaactggcaaaccgcatctctgccatctgcttcactgaccttgaggtcgagcgtaaagttgagggacattggaaaaagcaagtgaaggacgtcctcccgcagggtgctcctacctctcctattattactaacatcatctgttaccgcctcgacgtgaaattaacgtccctggctgaacagtttggctgcgcctatacacggtacgcagacgatatcacgtttagttccaaccacaacatctacaataaggatggcgaattcagagcctccctcaagaaactgatcaaggaggagaatttccatgtcaagcaccagaaaacaagactgaataccaagaccgaaaggcaagaggtgacagggctgacagtcaatgagaaggtcaatgtaaacagacggtacataaagcagctgagacattggatatacttctgggaacagtatgggaaagagaaagccgaagaactaattctgaacaactacaaggcagataaggggcacgtgaaaaatggagagcccgatatcgagaatgtgattgatgggaagttacgatatttgaaaatggtcaaaggtgcaaacgatcattcctatcgcaagttgcagcacaggtttgaagtgcttaccggtatatcgattaacttcaatcctgatcgtttgttcgaagtctgggacagcgacggcattgtggccgcgatggagtattattacggctga

SEQ ID NO: 7434 - RNA, 1365 nt, synthetic construct
  source 1..1365: mol_type = other RNA
atgcaattcagcgcagagcatataactcacattaggcaggaatttgccacaatggccaccaaagaagagttcgtcgctcttctgaactacgccaaagagatcctgattggtgacaaataccaaccctttgagttgaagcagattacctattacgccaatgctaaggtttcaggagtgaggtacaagaagtttgaaatcaagaaaaagagcggcggcgtaagggtcattcatagtccaatcaaaggtctgtctattatacaaaggtgcttaaacgctatcctgcagtgtgtttttactcctcacgatgctgctaagggattcgtgctgggacgctccatagtagacaatgccaagaagcacgtggggaggaactatgtctataacattgacctcaaggattttttccccagcgtggaccaggcacgggtgtggaagtgcctgcagttgccaccctttaatctggtcgattcagagaagtcccagatagtaacgcgcaagacaatcaagagtgaagttttggccttgatgaaagcgaatgggctgggagaagatcgacaaaccctgaatcgggcactcgataaagtgtccccacagatcaataaggggcgaatccatctggcccacattatagcctctctaagctgcactgagatgatcgtggagcgctgtatcgacggtgagtggcaggaagttaagaagaatgtactaccccagggcgctgctaccagtcctatactcaccaaccttgtgtgccagcgcctggattatcttctgactggcgtggcaaagcgtttcgggttacgatacacaagatatgctgatgacattaccttttcttctcagcacaacatttttaaggaggacggcgaatttatcaaagagcttcggagaatcatcgccgaacagggcttccatatcaaagaatcgaaggtgcgtctgcagcaggcagcattccgccaagaggtcacgggtcttatcgttaacaagactgtcaacgtgaatcagaactacattaaacagctcagaatgtggttgtataactgggaacggtacgggtacgacagagcgtataactatttcctgcctagctacttcgccagcaaaacaacacctgtcaaaggcaaaccggatatggcgaatgttattggcggaaagctcaactacctcaaaatggtgaaaggcgagaataatgaaatgtatctcaagcttaaggagagatttgacttcctgatctccaactgtttaccaatccggtcaatcctcgacatttgggagcacgagggaattgagaaagccatggggtcattctacaatgtgaaagcagatcaacaggtgctgtccatcattaaaggggacctactgtga

SEQ ID NO: 7435 - RNA, 1206 nt, synthetic construct
  source 1..1206: mol_type = other RNA
atgaagatagagaagaagcacattaactacattagaaacgcatttgagaagatgcaaagctctaatgatttcctcaagctcttgaactacacaaaaccattagtctatggtgaaaactatgtgcctttcgaactgaagcagatcgtattttactcaaatccaaagaacacctccaaagcctacacggaatttcagatcaagaagaagagtggcggtatccggaccataaatgcgcccgataatcacttgaagattattcagaaggttctggcattcatccttcaatgtattttccagcctcatgaggctgcaaaggggtttgttaagggaaaaagcatcattgacaacgctcgggaacacacaggaaagaactacgtttacaacatcgatttcaaagacttcttctctagcatagataaggcccgtatcaaggggagtctcaagaatgagcccttcaatctgaataacaagcaggctctggctaatatcatctccgaaatctgttgcacggagatggacgtggagcataaaaatgagaagggcaactggattcggataaaaagtaacgttctaccccagggcgcccccacttcacctatcttttccaacattatttgcaaggaggtggatgtgaaactgaccggcgtggcgaagcggtttaatctcaagtataccagatatgccgacgacattactttctcttccatgcacaacatttatcaggaaaacggcgattttttgaaggagcttaacagggtcatcaaagtggagtcatttcatatcaaagagtcgaaaaccaggctgaaaaaaactggatacagacaagaggtcactggcttagtggtaaatgattcagtgaacgtccgaaagaggtatgtaaaacagataaggatgtggctatactattgggagaaatacgggtataataaggcaaaaacaatctttctccgcgactacatcaaagacaaaggactgctgaagagtatgaaaccgaacttcaaaaatgtgctttctggtaagttggaataccttaaaatggtcaaaggggccagcaacagcacatatattagcttaaatctgcgcttcgaaaaactctccaataagaacaaccacatagacagagtgctggaagagtgggaacgcaatgggatcaataaagccatcctggagtactatcgaaagccacaacagctgtttattcagtga

SEQ ID NO: 7436 - RNA, 1443 nt, synthetic construct
  source 1..1443: mol_type = other RNA
atgaagattgagaaagagcatatcaagtacatccaggatgagtttgccacaatgcagtcacgggaagatttcctcgatctgctgaactatgcgaagcccttgatttacggggataactatatcccatttgagctcaaacagataacttattatgctaacccgaaaagaagtagaaaggcctacaaggaatttcaaatcaaaaagaagagcggtggcgtgagaacaatttacgcgcccgaaaacggcttaaagaccattcagaagaccatcgccctcatcctgcagtgtgtgtttgagccccatgaagctgcaaagggattcgtgatgggaaaatccatagtcgacaatgccaaggaccacgtcgggaaaaactatgtttacaacatcgacctcaaagactttttcccatcgatcgaccaggctcgggtatgggcctgcttaaagctggccccttttaacctgatcgatcagaagacaagtaaggagttcgatttcaaaaagcttgaaacgggaattcgccgctttacaaccgaatttgacgaggagattttctaccaactgaagggagggacttttctgcttgtgaacgacaaaaaaggcaattataaggcataccaaaagaggctgaaaaaattggataaggatgttttcaaggacgccgccaaatacattaccactgatgcaaatctcaaagaactggagaagcttacagtgcatagggagaaactggcaaatatgattgctagcctctcttgcacgaaaatgcaggttgagaggaaggacgagaacgggtcctgggtgaaggtcataaggaacgtgctgcctcagggtgcccctacaagcccagtgtttagcaacataatctgtcaacgactggataagaaactatccggtgtcgccaagcgcttccacttgaattatacccgctacgctgacgatatcacgttttcttcaatgcacaacgtctatcaagaaaacggcaagtttctgaaagagttgacaaaagtgattaagggacagaatttcgacatcaaggaatcaaagactcgacttcagaaaactggctatcgtcaggaagtgaccggcctaatcgttaacgacaaggtgaatgttcggaagcggtatgtgaaacaggtaagaatgtggctctactactgggaaaagtacggctacaacaaggcggagagtatcttcctgaaagattacttcattgacaaaggtcacgtaaagaatgcaaaacccaatttcggcaatgtcctgtctgggaaattggagtatctgaagatggtcaaaggcttcgaaaacaccacttacctgtctctaaataagaggttcgaaaagttacttggggtgatagatcctatcgagcgtattctcaatgagtgggagaataatggaattgactccgctatgaaaatctataaaaccgacatacacgagtga

SEQ ID NO: 7437 - RNA, 2259 nt, synthetic construct
  source 1..2259: mol_type = other RNA
atgcaactggagcaggagcaggttgaaattattaggaccatgttccagcaaatcaagagtaaaaacgacctcctgaagttgataaacttcgcgaagaagctgctgttcggcgaagctgctcacgctgtgcccttaaagaccttaacatactacggaaacgcaaatctcgcaagcgacgcatatcggaccttttcaatcaggaagaaatctggcggaaaaaggccgattcatgctccggtcaaggggctcaagcctatacagaaggcccttaacctgatcctgcagtgtctgtttaccccacatcatgcggctaatgggttcgtgcccgaacgttcaatagtggataacgctaaggtccaccagggggcccactatgtgtacaacatagatctgaaggacttctttcccagcatcgatttgtctagagtcgccgcatgtctgcgcctgcctccttttaacctgatcgacactgccgaggaaccgctggcctttctggtggccaatttgtgctgcactcccatccttgtcgaacggcaaaatgagtccggcgagtggatcaacaagatactgaacgttcttccacagggcgcgcctacgtcccctacaatcacgaatatcgtggcccagagactcgacaaacgcttaacaggtctggcccggcgctttggagctaatttttctcggtatgccgatgacatcacattctcttccatgcacaatatttacaaacaggacgaggcattcaccattgaattgactagaatcatagagtcacaggggttctatatcaatccaagtaagacaagactgcaaaaaacagggttccgacaagaggttaccggcctcgttgtcaacgagaaggtgaatgtgcaccgccgatatgttaaacaaattcgtcactggctatacctttgggagcggtatggctacgctcaggctgaacaaatcttcaaaagggaatatgtgaaagacaagggatacgcaaagaaaggcaatcccaaacttgaaaatgtgcttgagggaaagttgctctttatgaagatggtaaagggcggagaggacggtacttttttaggactgtggcgccgcttcgatcatttgctaattgaactcaacgaggtgcgagataatacgtcaatccctgaggaggcattcaccgaaaaagagcagctgactagaacgatcaagatatcgctgctaccaatcgatgacggcaagttcattcagactctgcagcacgacaaattgatccccatgggtgtcgccctcccatacgaggagacatttgaaaacaacatcgaagagacttacgaaaagccatccctccagcacaatcccattaacacaatgaacttcctcaagaatttcaagtacgacaatgcaagtggctttaaagaattggtccatgcaccctttgacgtggacaacttcgatttcgaaaagattctggacaccgtaaagaatcacccaaactttattctcacctttaagaacaccagagccgaaaaatttaccggggagctgcccctgggcctttggaagaaggccaaagagctgattaatcatctcagcacagaggggctcgacctgttcaaactaactaaacagcaccctatagagagcgagaaattcctcacagaaatccaggacttcaagaagaactataggtttagttcagatgataccgagtcctcgatcctgaagaagctgattattcatgtggccaaaaaagctgagcacaagaacagcgataagaacattgtattttccttcgggaatacagatcagagtggtcagtttagtgatgaccaacttgtcttcctccctgatgagcgaatattcggtcttagatccggattttttacctgggtcccaaacgtgaggaataccctagcctggattttcaaagggattttgcagcatagcaatgttaacggttcccggacgtttgagaaaaaaagcaagaagattgttgtggagatcaataggtttagggataaagacattggactgactaaagtacagctgaccatctctgatgaattcagcgtgttgaaaaagtctccagatcagttcctggaggacctgttaaatagcgagccttgcaaacactatctccggaatatcgcggattgggccatcgaatgcgactgtgataacggcgaatcatacctgtttcagattttacccaagaacgactataaacgtcttgaaagaaaagtgaactctttcaagcatatcatcactttctacgactga

SEQ ID NO: 7438 - RNA, 1257 nt, synthetic construct
  source 1..1257: mol_type = other RNA
atgcagatcaatcaggaacacattgacactatcaaagcacgctttcaacagatgaagacaaaagaggagcttttggaactcgttaacttcgcaaaaacgctggtgtatggcgagaaggccaaacctgtgcccctccgaactttaacctattatgggaacatccaggtcgcgggtagcgcctacaaggagttcagtatccgcaaaaaatcagggggagtgcggaagatccatagtccagttaaaggcttgaagcccatccagaaagctttaaacctgatcctgcagtgtgtcttcacacctcatcaagcagcgaccggattcgtgccagagaaatccattgtggacaatgctcgagtgcatcggggcatgaactacgtgtataacattgatctcaaggatttctttccgtctgttgatatgaacagggtcaaggcctgtttgcgtctgccccccttcaatgtaatatatacggatgaggctcctctggcctttctgattgccaacttgtgctgcacaccaatcgaggtggaacgcaagaacgataagggggaatgggagaaaaaggttatgaatgtcctgccacagggggctcctacctcaccgacagttactaatatcatttgccaaagactagaccgaaagctgaccgggctcgccagaaaatacggagcacagtacacaagatacgccgacgatataaccttcagcagcatgcacaacatctacgaagagtcctctgaatttataaagctgaatgagggctataggaatttcatccgggacatggtcaaaattattgagggccagcggttttctattaatcccaagaagactaggttgcagaagtccgcctacagacaggaggtgaccggactggtagtaaacgaaaaagtgaacgtgcggaggcggtacgtaaagcaaatacgcagatggctatatttatgggaaaggtacggatatgtccaggctgaggctattttcaggaacgactacagagcagataagggtcacgtgaagaagggagaaccttctctccaaaatgtgcttgatggcaagcttctgtttctcaaaatggtgaaaggtggcggcgacggtacttttagcaagcttctcgaacgttttacaaaactgaccgattcactggaacaggtccgctcggagaatgtcgacctagattccgtgctggacgttctgctgaacaaggggcttgacgacgccatgaatctgttcgacaagtttaaaagtctcggccagtga

SEQ ID NO: 7439 - RNA, 1290 nt, synthetic construct
  source 1..1290: mol_type = other RNA
atgaaaattgagcagagtcacattctggaggtgcgcagcgtgtttgaaaagatgcattctagggaggattttctgaacctactgaatcaggtgaagcctttggtttatggagtgaagacagttcctatcgaattaaagcaactcacctggtacgccaaccccaatctcggtgggaaacgctatagtgacttctccatcaaaaagaagtctggggctgacaggttaatacacgcacccgttagcggaatgaaaagcatacagaaagccctctccttcatcttacagtgcgtgttcgaaccacacaaggccgcaaccggctttgtcatcgggagatccatagtcgacaatgcacgcatccatcagggctgtaactatgtgttcaacattgaccttaaagatttcttcccctccatcaatcagtcacgagtttgggcctgtctgcaaatggagccttttaacctgaacgagaaaaagagtatagcccctaccgaatcggcagacaagtactttatggtgcggtcccgtaccattgccggacgtaaacagattgccaacatgatcgccgccatttgttgcacagagatgactgtagagcggcaggacgaaaaaggggagtgggtgcaggtgaaacagaacgtgctgccgcaaggcgcgccaacatctccagtaattactaacatcgtctgcaaaaagctggatcacaggctaaccggtgtcgctaataggtttggccttagatattcacggtacgctgatgacatcactttctctagcatgcacaatgtgtatcagaaagatggagagtttctcaaggagttgcatagaatcattacggatcaagggttccacataaatgagaaaaagacccggctccaaaagactggccaccggcaggaagttacaggactggtggtgaatgagaaggtaaatgtgcagaaacgctacatcaagcagctgaggatgtggctgtactattgggaacgatatggctacgaaaaggctgagaggatttttctggaacagtacatggatgatagaggccatcttctggacggtggtaagccaaatatgatcaacgttcttgctggaaagctcgactacctgcgcatggtgaaaggcgctgataactcagcatacaagaagatgaaaaagcatttcgacaacctgatcattgaaaaccgaagcaatgtcatcacagaccccttgagagtcaaagaactcgacgatgtcttgaacacgtttttcgagtcagggttcgatgtagcgatgaataagtacagcatgaattga

SEQ ID NO: 7440 - RNA, 1149 nt, synthetic construct
  source 1..1149: mol_type = other RNA
atgaccaatagagaggatctgcttaccctgctgaacctggctaacaagcacctgcactcaaacaaggcgttggatttcgagctgaagcaacttaattggtactctaatccagccataaacaagagacgatacaagacgttcagcatccagaaaaagtctggcgctgaacgcaaaatccacgctcctgtgaaaactttgaagtacatacaacaagcactctgctttgtgttagagtgtgtatttgaaccccataaggcggcctatggatttgtcaagaataagtcgatcgtggacaatgctcagaaccatgtcggtcagatatacgtatacaacatcgacctcaaagattttttcccttccatcgaagccgggcgactgtttagcaggctgcagtatccaccattcagcctgagcgacaaaagggacgttgcaaatgtgataacttggctctgtaccgaaaagctggaggttgaacggttcaataaagaaaacagtacatgggaggccaaagagctaaatgttcttccgcagggagcacctacgtcccccctgattacaaacattatatgctataagctcgactacgttctgtccgccgtggctaaacggtttgggttaaagtattctcggtatgccgatgatattaccttcagttcaatgcacaacgtgtatcagaagaactcagaattccttactgagttgaagagggtcattcaggaccagaatttccatatcaaggagtccaaaacaagactccaaaaagatgggtttagaaaggaggtaacaggcctgctcgtgcacgagagtgccaacgtgcataagcgttacattaagcagctgcggatgtggttgtattattgggagcgttacggctacgagaaggcatacggtttctttctaccccagtatgtgggcgatcgcggtaatgtcaaaaaaggcaatcctaatatggaaaacgtcatcggcggaaagctggaatacctgaaaatggtgaaaggggtggaaaacgagctttatctaaaactcaaagacaggttgtctatcctcattggatacaccgagcccatcaaccagattttagacgtctgggagatcgaggggattgaaaagctgtggaaattcatcattcgcatcaatgaaactaagtga

SEQ ID NO: 7441 - RNA, 2151 nt, synthetic construct
  source 1..2151: mol_type = other RNA
atgaaactcgaagaggctcatatcaagtccatcaagtcatccttcgagaaaatgaaggacaaagaggacctgctacaattactgaatttcgtgaaacccctggtttacggtgaaaaaaccataccctttaagctcaaacagcttacctggtatgccaattcgactttgaagggaagaaggtacaaagagttcaacatcaagaagaagagcggagaacaccgtactattaatagccccgtgagcggccttaaagccattcagcgaatcctgaatttcattctccagtgtgtctacgaaccccataaagctgccatggggtttgtgaatggaaaatcgatcgtcgataatgctcggctccatactggcaatcactatgtgtataacatcgacctaaaggattttttcccctctattgaggccgggcgcatctggagtagatttcagcatcctccattcaacctcaatgatagaacaaataggaaggagctggctaacatcattacttggttatgctgctgcgagatggaggtcgaaagactggatgagaaaaatcagtggcacatcgttaagcgcaatgtactgccgcaaggcgcccctacgtcccctactattagtaacattgtctgtcatcagctcgatttttatttaagcgcggttgccaaaaggttcggcctgaagtactctcgctacgctgacgatattacctactcttcaatgcacaatgtctatcaaaaagggtcagaattcctaagcgaggtgcatcggataatcagtgcacagtcctttcacattaacgtgaataaaacgcggctgcaaaaagcagggtaccgacaagaagttacgggtctgctcgttaatgagaacgttaacctgcagacacgctacataaagcagttgaggatgtggctgtactattgggagcgatatggctatgaacgcgcctctggtttttttctgcagcaatacgtggcagataaaggacatgtgaagaatgggaaacccgatcttgccaatgtgattagtggaaaactagactacctaaagatggtgaaggggtccgagaacgatctgtacctgaagttgaagaataggttcaaccaattgactacaaaaacaatcgaccagatagacctttcaaaggtaaaaaagatctccaagccctcggaacgggaatctataatcgaggagaacattgacatcaacaacaataacagctatcctattctccacaacccgcagaaaaccattactcttctgaagtccttcagtgtgaatgagaaggacctgaagtactcaacccacagctgggaagagggaaagtacaacagttatgaggagtatatcgagaagatcagaatcgaatggaatgaaataaaggacgaacttaagaatcagtccccacggctcttcgcgaagatctccaacttcttgttcaacaacaaactgggccagaagaatgaggagggctactacatttcctggggggaaaaaagactgaaatttggatggtcaagcgcaaacctcaaggaccacatgtctgatccaggtaactcaccgtttagctgtccaattcctgatcagattagggaactggataagaggcatgatttgctgtactttaaagactatgctgacgtgttcaaaaatgaaatagaattccgggaggatagtaacaacttcaagaagatgatccttgaactttgggaaaaggagctcagctatgactttaacattaaaggagtggagcagtttgcaggtttctctttctttacagacgtgcacctggtcaaggaatctcttagaacagtctttagggacatgtacaaagtgaaaccacagtttcctaccataattatcgagaagatcagtagctttaacgagcgagggtaccacctgattaaggtaacccagaaagatagctttatcactcgtgatgtaaacgatccaaagttaacatcacctagcggcaacctcttctctataatccgcaatttaaagaatctctctgactactctatcgtctcccggttccgcgacggcagaaattatcgtctgaactatttgacatccaccaaaaccgacttcatcgagacattgacccaggacgagaacaccctgggcttcagccacgagttcaagttttatctgtga

SEQ ID NO: 7442 - RNA, 2268 nt, synthetic construct
  source 1..2268: mol_type = other RNA
atgattaccgagaaagataaggaatacatcgacatcgcattccacaagatgaggaatagggaggatctgctctccctgctgaattacgccaagactattctgtttggccaagaagccagtcagattgcattgcaccagctgtcgtattacgccaatcccaaagccggcggcaagcggtatcacacgtttcgaatcgcaaagaaaacaggcggttctagaaaaattcatgcccccgtggaggggttgcgggtcatccaacagtgtctcaacctcattctgaaatgtgtgtacaaaacgcagcaacaagcacacggtttcgctcagggtaaatccatcaaaacaaatgccgctatgcatgttggatcctactacgttttcaacattgaccttaaggactttttcccttccatcgatcaggctagggtctggaaagtcttgcagctggaaccgtttaatttactaaaccgggaacccgcagaacaggaagggatagacaattacgaaatcgctaatctaactgccgcactgtgctgcacgagtatgatggtggagcgtatcgacgaggagggagagctgatcaaggtgcgccgaaatgttttaccacagggggccccaacatccccactgttgtcaaacgtgatatgccagcggctcgattttttgttagccggggtcgctaaacgcttcggattaaagtacagcagattcgctgatgacataacattctcatcccttcacaatgtatttcagtctcatagcccatttaccaaggaacttactcggatcatatacgaccagggtttccggatcaatgaacagaaagtccgcctgcaaaggagcgcctatagacaaatggttactggcatagttgtcaacgaaaagaccaacctgactaagaaatatctggtcagtttgcgcaagtggatatatctgtgggaaacatatggattcgcccgtactctggagatctatagacaggagtataaacttgaacagattaagcctctggatatcgacctggtggccatccttcgaggaaagattgcctttctcaaaaatgtgctgggggacacaaatccgagatataagcagtacaagtataggttcgacgcgttgaacgctcccactctcgccgagaatatgccagtgcaaggagatgctagggagatggcaaagaagttagatcggattgacgagctgctgaagtctaataaaattccttccgtggatgccagcatcgaagagttaagagaattcgtgtctcttgtgcatcttcgctctgagattcccctgatagataacccgagtaaagagacgaacttggaggacgacatccacgatcctcgcttcgtagtgagtctcctcagcaagtttaccgaagaaaccaaccttaagtacaccgtacacatgtgggacagcgagaacagatatggcagctttcaggatttctcaagtgcgattttcgcagacatcaggcagtacaaactaaggtccctgccccggtacaatagccgactctactggaagatcatataccccttcattattcaagaacacaccctcaagaagaaatctggcgagccattcgaatatgcttggggccggtataacttgaagcttggctatcactaccccagtaccctcgctcagtggatggactctaacccaaacaaatcgccttttatgatgcccattagcaaggacctgcgtcctgcagagcctatcaaggggcgaagcatctcatacttcgaggatgtggtagacatctttaagcaggccattgagttccgtggaaacgacctctattatctgttcaaagagctgacagggtcgttgctcttcgatttcaatatcgaactgctcaacctgaaaggcatatctttttttaccgatacccatcaggttgagaaagcgctgagaattatcttttcaagcattcgcaagtacaccgagtcacctcagatcagggtgtcaggtacatatatctctgaagctcactactttgatatcgagatcctgcagctaggatccttttgcgataagccaattgatgaccccaagataaccctcaaagggaacaagggcgactttaatactattcgcacactcctgcattctctatgtaactggtccgtcgagagtaggttcagagtgggcgacaagtacaaattctacagactgaactaccttaactcctcagcgagcgatgagatcgaagagatggacgccgcagaggggtttaaacatcgcctgcggttttatatttga

SEQ ID NO: 7443 - RNA, 2220 nt, synthetic construct
  source 1..2220: mol_type = other RNA
atgaaaagccgcgaagacctgcttgatttgatcaactactccaagaaagcgctgtacggtgaagatgtggagcctattacaatttcacagcttacgttttacagtaatccctcagccggcggtaaaagatacagacagttcaacattgcaaaatccagcggtcagtatcgcgctatacatgccccggttcagggattgctcctgatacagaggtgcctgaacctcatactgtcctgtatctacaaaccaacccctcaggcacacggctttacccccggcaggtccgtgaagacaaacgcattcgtgcacgtgggcaactattatgtcttcaacgttgatctcaaggatttttttcctagcatcgaccaggccagaatttggaggatgttacagctaccacccttcaatctagttgccaagaacgactctagaatcagcccaaaaaaccggtacgaactcgctagtatgatctcagccatatgctgtacctcgatgttggtagatcggattgacaggaaggggaacttgacgcgagtggtaagaaatgtcttgccacagggggcacctacaagtccattcttcagtaatatgatttgtcagaggctcgaccagcgcttgatgggagtcgctaaacgtttcgggcttaagtacactagatatgccgacgatatcaccttctcatctctgcataatgtgttccatagccacaatccctttatcgtggagatgcgcagaatcattaccgagcagggattcacagtgaatgaagacaaagtgcgcttacagcggactggataccgacagatggttactgggctcgtagttaatgaaaaggtgaacgtgacacgggaattcataaaatctctgcgcaagagcttatatcttctggaacggtataacgaggagaaggcctcccaggcttacattaaggataataagcttgacgacgtcagcattaacgatattgacatccaggctattgtgacaggaaagatcgcgtacctcaaagatatcctcggaaaaaactcgcccaggtacctgagctataagacccgaatcgaccagctgtacccggggaaagggacaacggtgcccgtggagaaggtggatgccaagacacttgctcgcaatattgaccgggtgaagcacaacctgctgaataatgagctgccgactgaaaatgcaagtttcgaagaactgagagcattcgtgcggcttctaagggacgagaacagcgtctcagccttactcgtcgacaaagccggccaagccgaagaagatgaaatccatgatcctaactttgttgtgagtgtcctcgaaaaattcacttccgagacacatctgaaatacgctacgcactattgggacacccaagacaggtataagaactataatgttttccgcaagtccatcatggaggacgtccggctgtttaagctgaggctcctgcctagatacaattcccacctgtactggaaggtcatccacccattcctaatacgagataagcccgacgagaagaagtctggagagaaattcgagtatcagtggggtcgacataagttgaaggtgggcctgcaatatccaggcatcctggaggagtggatgcaggaaaatcccggaaaatctcctttcagcatgcctatacccaaagagttacggccccctttccgcatttctggtaagtcgctgacctactttgaggacttcgttgatgagtttaaaaacgaaatcgagtttcggcgtaatgatcttcactatctgatcaaggacattacctcctccatggaatttgattttgatatctcaatcaccaacctcaaaggcctgagcttttatactgatacttaccaagtagagcaagccctgcgcattatctttaacgctattcgtaagtaccctggcgcgccaaagatcattgtcaatggctcttatgacaccgaggcgaagtttatcgacatagacatattgcacattgactccttttgcgatagaccattaaatgataggaagctccagctaatggacaaacgaggggactttttcactatcaggaaactcctgaacagtctctgcgattggtctattcaatcaagatttcgggtaggtaacgagtatacttcttacaccatccactacctgaatagcacaggcgcccaaaacccggagaaatctgcagatgctctggggttccttcataaattgcgtttttacctgtga

SEQ ID NO: 7444 - RNA, 2286 nt, synthetic construct
  source 1..2286: mol_type = other RNA
atgaagattgagaaagaccaaaaggactacgttgttaaagcttttcactcaatgcgcgatagggacgatttcgtcaaactgctcaactatgcaaagaagattatttacggggaaaaaaccgtattctttgacctgcgacaactcacctattactctaacccgaatgtgaacttcaaaagatacaagagcttcgagatcgctaagaaaaatggcaagtcccgcaaaattcatgccccagtgaaagggctgctggtgattcagaagtgcctaaacctcattcttaattgcattttccagcctaccgtcttcgccacaggatttgttatgggcaaatccattgttgacaacgctgcattccatgctggtaattactacgtttacaacatagacctcaaggactttttccactctgtagaccaggcacgggtctggaaatgtctgcagctaaagcccatcaacctgagcctgtttcagaatcccgaagacaacaaatataactcctccctagaaatcgtcaacatcatctcagctctgacttgtaccgagctccttgtcacgaggacagaccgaaatggcaaggagatcgaggtgaataagaatgtgctccctcagggagccccaacctctcccctgattaccaacctggtatgccagaaactggactatctgttaagcgccactgcaaaacggtttggcctcaagtactctaggtacgcggatgatatcactttttctagcttgcacaatgtatatcagcagaatagtgatttcttgatcgaactgaatagaatcatcaaagaccagggtttcgtcattaacgaagaaaaagtgagactgcagaaggacggattcaagcaaatggtaacgggattggtagtgaataagcatcctaacgtgtccaagtcgttcatcaataacattaaaatcgacctgtactactgggagcattatggctacgtgaaagccacgaaattctttctgagacgatataagcacactaaggaaagcactaaaaaggtgaacgtggatatgagcaatgtgatttgcggacgcctccagtatttaaagatgattaagggagccaacaacaaaacctatacctccctggccctcaaataccaaaagctgcttgcgaagaaacagaagagtgagctgaatcccgaggacgtgcactttaaatcagtcgagtcatcgggctatgacctgacagaaaacggcctgattaatccagacctaaagacatttatggtcagtattctgaactctgaccaaatagcactggccgagaaacaggagatcttcgcaaacgttaatctggagttatctcggttggtgaacaatgataatacagggaagaactcgcttgggtcttcctccagtataaactctagtagcgtcaccacagacgggtggaaatccgaacattcacctaaggatgtggcccgtttcatgagtttgtttaataagcgggatggattgaagtaccttactcacgacttcgacgaggagggtaagttcgaaatctcctttttcctggagaaatggaggtccatctttgaacagagcttacgggggaagaatggctttgaaatcccatcttccctttatcgcatagtgaatgagttcgctttttcaggcaaacctaattggacgagcgtcaacgatagattagtgaatgaaggatggagcaccgacaagtggataaagtggagctccaagaatatgctgcacccctttagaaacactgggttgaaagtgatcattgaagactttaggagactcatcagggttgagtcaccaaatctggagttcttagtgaacgaagcttttagcgatgctctcatcgatgagaacaataagtacagcttgaaactcgatcaagtctcaaaagccgatttttatacacacatccctagcttgaaacgcgcgctgtttgcaatcttcagtgccatgggtaagtatggtggggatcgcgatatatctgtgtcttaccagcggtcaacagaggatgatttcttcgtgcgtaagctcattatcagtcagacaaacagctatcccaccaaagagctagagcagatccttatcgagtggaacactgacaagggagccatgggcggtataaagcataatctttacgggtactgtgattggagtatagagactaagattgataacacaccgtacaggataaacattcttaaggacaaaaagaccccaaaattcgatgttattggcatggaagaaatcataggcttcaagcacatcctcaagttttactatatctga

SEQ ID NO: 7445 - RNA, 2298 nt, synthetic construct
  source 1..2298: mol_type = other RNA
attcagcggatgaagcaacaggcttccaagaacatctacatcatgaagctcaccaagaatcagtgtgaatacattgttaagcgtttccgtgaaatgcgaacaagagaggactttttgcacctagccaattatgcaaagaagattatctatggcgagaaggcatatgatttcaagctgaaccagctgacctattactcaaatccccgcgtcaatcccaacaggtatagaacgttcactgtcaaaaagaaatccgggggcgtgcgcatgatacatgccccaactaaggggctcatggagattcagaaaagcctcaacctgattttgaattgcgtgttcaacgcccactcatctgcctttggctttgttccgggcaagtcaattagggacaacgccgccgtgcatgctggaaattactatgtgtacaacattgacctgaaggactttttttttagtatcgaccaggctcgagtgtggaaatgttttcagctggcacccttcctgttagggaagaaaacagatacccttaacgacgagaaaggtaaaaacctggaggtggtcaatatgatcagcgctctctgttgcgctgagatcgagactggtatgcagcaaaccgacggcactttaaacatcgtgaagaagaacgtggtacctcagggggcaccaaccagcccaatagtcaccaatatcgtgtgccagcgtctagattttctgctcgcagcggcagcaaaacggttcggcctcaaatactctagatacgctgatgacattaccttctccagcctgcataatgtgtaccaaaccgactctgatttcatcgctgaaataaaacgggttattaaggagcagggctttcagattaactctagtaaaacacggcttcaaaagatggacgaaagacaaactgtgacgggcctggtggttaataaaaatgtgaatgtgcctcgcaactatattaaaaaaatgcggagctggctctacctgtgggaacgatacggctatgagaagacgtattcattctttctgaacgattacatacgggataaaggacacctaaagaagcggactcctgatatggcaaatgtcttaagaggaaaactcgagttcctaaagattgttaaaggtactgatgataaggtttaccagcagctgaataacagatatactgtcctcatcgctaggaacagaaaggactcacttaatgaccgcctgttaaactattgggaattgcacgggttgcacgctgcttgggaacacttcaaggcggagacagggattatgaccattgacaaattccttgacaaactgcttaaggagacagtaacggatgacgagagaaagaacaaactgttgaagcttatccagtccagcttaaacacctccagccttctgaccaagtcaacatccaaattcaccattcccgacaatgagaagctcaatatgccaaagcgagtcgccgactttatgagtttgtttgatgatcccgccgggctgaaatatctaacacacgatttcgacgagagtgaccagatatttgacatcgaaagcttcctgccccaaaccaggaaggtcttcgaagataaaaccaaaccgggcaatctgacgatcccctcgtcgctgtggaagatcgtgtacgagttcgccttcagcgaaacaccagattggaataagggttgcaaagacgggtggtctttacctgataggataaaatggtccatcgatagtaaaaagcatctgaaacggaatgaaggatttgctgcgacaatcgaaagttttcgcaagctcactcgcatcgaggcccctgaactcaagaggctgattaaccagatcgtaaaagaaaagcttggagacaaataccctgagtgtacaattaagctgaaagactgcgaaaaggcagacttttacacacatgtcgcctacttctctgaagccataaagctgctgcttgatggattcaataaaaggatcggagagtgtaaggaaatagccattacctacacccggaaaaacgatgacccttataggttgaggatcattactctcgaacatgtaggatcctttccaatgaagcccctggacgatttcttccgcgacttgggcaacggtaagggagagctggcggatgcccgaaacaagttgacaggctattgcgattgggccatcgagactatctgggactctaaactcgtgagaatcactctgcttggggccggcaatgagatcgagtacctcccaaacacaaaagaggtgtccaaccgcataaccggttttacccacatcctgacattttatcagaagtga

SEQ ID NO: 7446 - RNA, 1386 nt, synthetic construct
  source 1..1386: mol_type = other RNA
atgaagcccacaaaagagcagattgattctatcaagaccaagttttccgcaatgcagactactgaagacctcctcgatctgttaaacttctcgaagtccattatctacggtgagaaggttatccccttcaaacttaaggacatcacgttttattgcaatccgaaacgaaccattgatcacaagtggaagttctttcatcagtatcaagagttcactattgcaaaaaagtctggagggacaagaacaatatatgctcccaaaaagggccttaaagccgtccaaagatcaattgcgtttgtattccagtgtatattcgaaccccacaaaagcaccatgggcttcacgaaggagcggtccatcgtccacaatgcccagctccacattaactcatattacgtgctgaatatcgacttgaaggattttttccctagtgtggaccaggcccgcgtttggaagtgtctgcagcaagcaccctttaatctgaaccaagcaacctcaaaagtgttcgagacatttgccatagacgaatttaagatcaagtatccagagcagtctaaaaagatccatccgaacaagaagtttgtgattagcgatatcgatagcaattacttcaaggctaccaatcgaattcctaaagcagctagattggagctggccaacatgctggcggccatttgttgcaccgagatggaagttgagagtatactggctgacggctccgtggagaaaattaagaaaaatgttctgccacagggagcccctacctctccaatcctttcaaacgtggtgtgccagaaattagatctcagactggcaggggtagccaagaggttcgggctgttgtactctcgctacgcggacgacataactttcagcagcctccataatgtgtttcaggtagacagtgagttcaagaaagaactgtaccgtatcattctcgatcaaggatttaggatcaacgagaaaaaaactcggctgcagaaggacggatacaagaaagaggttaccgggctgcttgtgcacggtcaggtcaatgtccagaaaagctttatcaaggatttaaggatgtggctgaacctatgggaaaggtatggttacgaaaaggccaataacatcttcttgaacgagaatggacctctgctgaatacgactgccaaaatcaagaaagctgaactacgtaacacacttgaaggcaagcttaattatctctccatggtcaaaggcctcaacaacattacctacgtgaaattgaacaaccggtttcggactctgaaaccaacaattaagatccatacagaagaccgcagtgcccacatcgaaaagaccctggagttgctactcaataacggcataaatgatgctatggctttctaccagcctcaatga

SEQ ID NO: 7447 - RNA, 1209 nt, synthetic construct
  source 1..1209: mol_type = other RNA
atggatacgaaggaaatcacgatagagcagaagaagaaaattgtggaattctttggggtcgtgaacacttctttcgggttttgtgtgctgctcaattactgtcagcggatcctctatcctaaaaccgtatatcagatttctcagtttgagctgaggaccttagcccaccctgatagtaagaaacgttacaagacttttaccatacggaagaagaatggcgggactcgaactattcatgcgcccaagcccgaactaaagatggtccttcgctgcatcaatctgatcctgcaatgtgtatacacagtccatgaaaatgccaatggctttgttgagggcaagagtgttgtggataatgcaaagctccactgcaataacaactacatcttcaacatcgacctgaaggattttttcccttcgattgaaatcggacgagtgcttaatcgcttatcctacccaccattcaatttcaaaaaagagaaaggaaccgaggaaattggaaattacatcgcttggctggcttgcgagaacactcttgtagaaagagagctcgacgggaacattatcaaaacggtgaagagagtactgccgcaaggctccccaacctctcccatactgtctaatattatctgcgagaggctggacagacggcttacaggtctagccaaccggttcggcttgcgctattcacgctacgctgacgatgtcacatttagttctatgcataacgtctaccagaaggacggtgaattccgtaaagagatggaaaggatcattagcgagcagtacttcacaatcaaccagtcaaaggttagactgcagaagtccatcatgaggcaggaagtgacaggtataactgttaacaaacaagtgaacgtcagccagaagtatatcaaacagctgagaatgtggctttactattgggagagctatgggaccgtcaaaggattgtccttgttcctgcaatcctacattaaggataagtcacacgtgaaaaaagtggtgcctacccccgaatttatggaagccgttatcggcggcaaactcaactatttgagtatggttaagggaacagagaacagcacctatctcaagctgaaagagaggtttgacaagttaagctccaattacgtggacattgataatattctcagcgtgtgggaggagaacggtattgacgaggcaataaacctgtattcaaaaacagtgtga

SEQ ID NO: 7448 - RNA, 1209 nt, synthetic construct
  source 1..1209: mol_type = other RNA
atggtcacgaaagagattactatcgagcagaagaaaatcattagtgacacctttcggtgggtgaaaaatgtcagcgacttttgtttagtgctcaactactgccaatcgatcgtgtatccccaaacttacttcgacatctccgaatacctcctgaaaacactggcccatcctaactcaaagaataggtataagaccttcaagatcaaaaagaagaacggaggtacacgaacaatccactcccctaagcctgagctgaaaatacttctgaggtgtattaaccttatcttgcaatgcacttacaccgtgcaccagaatgcgtacggctttgtagaaggtaagtctgttgttgataacgctaaactccattgtaacaacaactatgtgttcaacattgatctgaaagatttctttccaagcattgaaattgggcgtgttttaaatcgcctctcctttccaccctttaatctgaaaaaggagaatgggaatgagaaaataggaaactacatcgcatggctggcatgcgaaaatatcctggtggagagagaactcaatggaaagattattaagaccgtcaagcgagtgctgccccagggcagtccgatcagtcctatcttgacaaatattatctgcgagcgccttgaccgtcgccttacaggcctggccaatagatttggcgtgcgctactctcggtacgccgacgatattacattctcttccatgcacaacgtatatcagaaggatggggagttcagaaaagagatggagaggataatatcagagcagtatttcaccatcaatcagagtaaagtacggttgcaaaaatcaaccgtcaggcaggaggttactggaataacagtgaacaaacaggtgaacgtctcccagaagtatataaagcagctgagaatgtggctctacttctgtgaaacttatgggaccaataagggcttgagcctattccttaagtcatacatcaaggacaagactcatgtgaagaaagcaattcccaccccagagtttatggaggccgtaatcgtcggtaaattgaactatctatctatggttaagggcgtggaaaactctacctatttaaagctgaaggaacggttcgacaatctgagcagcacgtacgtggatgtggaaaacattctggctgtttgggaagagaatgggattgacgaagctatggatctctacagcaaaatcgtctga

SEQ ID NO: 7449 - RNA, 1254 nt, synthetic construct
  source 1..1254: mol_type = other RNA
atggtgaaaaatatatctatagagcaagccgagttcatcaagaagttcttcaagagcatgaaagacctccgtgacttttgcatgctgatcgacatttgtcaggacatcctgtacccagagttcaaagaccggactcgcattgatgagtatgttatcaaaacactggctcacccaaaaagcaagaatcgctaccatagttttgagataaagaagaagaacggaggcatgagaaccattcacgctcctcagccggagcttaaggtggtactccagtgcataaacttaatgtttcagaccgtcttcacaccccattccgcggcgtatggttttgtcaaggatgccagcgtggtagataacgccaacttacactgtgggaataactacgtgttcaatatcgacctgaaggactttttcccttcgatcgaaattggcagggtgctgaataggctgtccttccctccctttaactttaataaagagaacgggcgcgaggaactgggcaattatattgcctggttggcttgtgagaacacgatcgttgagcgactcgttgatggtaagatccaaaaggcagagaagagagtcctcccacaggggagccctttgtcacccatcttgaccaatattatttgcgaacgattagaccgtcggctgacaggccttgccaaaaggtttggcgtcaagtactctcgctatgcagatgatatcacgttcagctcaatgcagaacgtgtatcaggaggaaggggcattcagaaaagagctaggccggattgtgtcagaccagtatttcatcattaatcaggataaagtgcggttgcaaaaatccggaactcggcaggaagtgactggcattactgtcaacgagttctctaatgtaacacgcacctacgtgaaaagaatcaggctgtggctctctttctgggaaaagtttggtgcagaaaaagcctttaatctttttctcaacggatacatcaaggataaggggcatgtgaagaatctgggaaaaaccagtttctttatggaaaacgtcatcgagggaaaactgaattacctgaaaatggtcaaaggggagaacaattccacctacctcggcctgaaggaaagattcgaaaagctttccctgaggaacaagtcagttgatcagctactggatacctgggaaaagaacggaattgacgaagccatgagtaaattttatgccgatcccagcccacgagtggacaaggttgctgaccaaatagctttgctttga

SEQ ID NO: 7450 - RNA, 1206 nt, synthetic construct
  source 1..1206: mol_type = other RNA
atggaggtcaaggacattagcgccgaagagaagagtttaattgcaagattcttccgtatctgtgacagcgagaaaatgttctgccacttattgacctactgtcagcgcttgttgtaccaacagaagattgtcaatatcatcccccaaacactgaaagcactgtcccacccaaattcctctagacgcttcaagacctttgagatcagcaagaagaatggagggaagcgaacgatacatgctccaaaggcagatcttaaagtcgtgctgaaatgcctaaatctcattatgcatagtctgtatgagccccataatgccgcctatggcttcgtgcatgggaaatccgttgtggataacgccaaactgcactctaattccctctatgtctttaacctggacctgaaggattttttccccagcattgaaatcggaagaatcctcaatcggctgaaccatcccccttttaatctgaaaggcgagggcaaagacaagatagccctttacattgcatggctgagctgcgagaacatgatagtggaacgagagatagagggtaaactgcagaagaccgtacggagggtcctcccacaggggtcacctgtatcccctatttttacaaacatcatttgtgagcgactggactacctgttgagtgcagtggcgaagaggtttggagctgtgtattccaggtacgccgatgacatcaccttctcgtcgaatcacaacatatatcagaaggatggcgctttcagacaggaagttgagcgcattatcgctgatcaacactttcagatcaaccggtcaaaagtgcggttacaaaagtctaacgtccgtcaggaagttactggcatcactgtaaacaaggagccaaacgtggcccggagatatattaaacagatccgcatgtggttgtacttttgggagacttacggtaccgacaaagccttcagccttttcctgaagtcataccttaaagggaagggccacgtgaaggtgccgggaaacacgcctctatttatggaagctgttatcaggggtaaacttgactatctcaagatggttaaaggagaaagcaattctacctactctcagctcctgtcaaggtttgagaaggtgtctagtactccgaaccacattgaccacatcctcgatgtgtgggaaaatgatgggatcgaaacagcgattataaagttcgaaacagacggctga

SEQ ID NO: 7451 - RNA, 1104 nt, synthetic construct
  source 1..1104: mol_type = other RNA
atgtaccccttcgaactggtgaagatcgacgagtataaagtgagaaccctggcccagcaaaactccgttctgcgatacaagacttttgagatcaagaagaagaacggtggggtccggcacattcatgcgcctaagtccgagttgaaagtgctacttaagtgcatcaatctcattttccactgcatatatactccgcacgactctgcttacggattcgtcgacggccggtccgttgtcgataacgccaggcttcattgtagaaacaactacgtattcaatcttgacctgaaggatttctttcccagcatagaaattgggcgaatcctcaaacgcttcaattttcccccattcaatttaaacaaggaaaacggccgccaagaaatcggaaattatattgcatggctgtgttgcgagaatatgatggtcgaaagggagttaatgggcgagacaaaaaaagtgtttaagagagtgctgcctcagggcagcccagtgtctcccatcttgaccaacattatttgtgagaggctcgattacaagctgagcgcagttgctaaaaagttcggaatcaaatatacgcgttacgccgacgatatcactttctcaagtatgcacaacgtctaccataaagaaggcgattttcgcaaagaggtcgaaagaatcatcaaagagcagtacttcgtgatcaaccagtcgaaagttaggttgcagaaaaccaatgtgcggcaggaggtgactgggatcacagtaaattctgagacaaacgtgccaaggcggtatgttaagcagattcgtatgtggctctattactgggaaaactacggtgactccaaggcattgtctctgttcctgcagagctatatgaaggacaagagtcacattaaaaaggccgtacctacccttggttttatgacagccgtgataggaggaaaactcaattatctgtcaatggtgaaaagcgaagggaatagtacgtatctaaaactgaaagatcgctttgagataatagctgagaagcaaatcaagatttcaggcatttccgaaaataccaatgacgagaagctcaagaagtttgtctcaagcagttttaactacgattttctgtga

SEQ ID NO: 7452 - RNA, 1200 nt, synthetic construct
  source 1..1200: mol_type = other RNA
atgaacaagtacatttcatcagaggataaagtgaagatcaaagagaagtttgagaaaatgagcgatctgaaagagttctgtaacttgttgaaccattgttatagcatcctgttcagtgatgagagcaactttatagatgaagagaagctgaaacgttttgcaaatcagaatagtcaaaaccggtatcactactttgagattaagaagaaggacggctctacccggattatccatgccccaagctctgagctgaaggttctcctcaagtgccttaatctgatcttccatagcatctttatacctcaccatgcctcctacggttttatatacgggcgctctattctcgacaatgcgaagatccactgcaaaaacaattacgtctttaaccttgacctgcaggacttcttttcttccatagagattggacgaatcctcaagagattcaattatccacccttctcactaaataaagacaacggccgagaaattattggtaattatatcgggtggatcgcctgcgaggaaattgatctagaggaagaagtgaacggcaaactgctcaagattaagaaaaaggtgcttccccagggctctcccttatcaccgattctgaccaacatcatctgtgagcgcctggattataaactgaccggcgtggctaaaaggttcaacgtaacttattcgcgttatgccgatgacattacgttttccagtatgcacaacgtctatcaggagaaatcgattttccggaatgaggtggaaaagatcataggggaacaatactttcgcatcaaggaaaaaaagaccaggctgcagaaacggaatgtgagacagaaagtcacaggtatagttgtgaacgaaaaggttaacgtaactaagaactacatcaaactgatcagattatggttgagcatgtgggagaaatatggcgcagaaaaggcttaccaccttttcattaactcctacataaaagagaaggggttcactaagtatatcggatctacacctgtgttcatggagaatgtcatcgacggaaagctcaattacctcaagatgattaagggagagagtaatagcacataccagtccctgagggaaagatttaataggctgtccatcaagaatgctaaaatgaacaagatcttggacttatgggaattcgagtccatcgaaaaagcaattgaatattactaccgctga

SEQ ID NO: 7453 - RNA, 1242 nt, synthetic construct
  source 1..1242: mol_type = other RNA
atgaaaattaaacagtctcacatcgagcacattcggaaacaattcacagagctgcagagcaaggacgatttggtcaatctactgtccgacgcaaaaaacatactgtggggggaggaatcaactcccgtacagttaaagtcactgacatactacgcgaaccctgccctgtgcaaaaagcgctaccgaacattcacaatcaagaaaaagagcggtgctgacagaataattcacgcccccgtgaaaggtctgaagtcaattctgcgctccctcaatttcgttttccaatgcatgtacaagcctcacgaggctgccaccggtttcatccccgaaaaaagtatcgtcgataacgccaaaaaacatgtgggccatcactatgttctcaacatggacttgaaagattttttccataccttcgacctgtatagggttaagtatgggctcctgacagaagtctggggaatcaacagtataaagaagttcaaggagcataatgaggagcgatttctggagatcgataagatcgcctttttgattgcttctctgtgtactcacccatttaagatcgatggcgaagagaaaaccgttctcccgcagggatcgcccacatctcctacccttactaatatcctttgtaagaagctggactccagattgacgggcctcgcgaagagattcggggcaacttatacccgttacgccgatgatataactttttctagccctcacaatatctacaatgacgaggccttcaaccaagaactgaagcggattatcgaagaagaccagaaactcgtgattaatccaaagaaaacccgcttacagaaatccgtctataggcaggaagcaaccggactcatcgtcaacgataaggtgaacgtgaggcggaggtatgtgaaacagatacgcatgtggctatactattgggagaaatacggctatggaaaagcagaggaaaagtttaaacgggattacatcgctgacaagggccatgtgaagaacatcaatgcccacctggtaaacgtgctagacggcaaactggaatttcttaagatggtgaagggaaaggaggacgacacgtacaagaaacttaagaaaagattggacggcctcacagatagagaaagcccaattacgaagatccttaacatctgggaaaatgaggggatagaggctgctatggcaacccgtgatattaccgaggatgacttaagtactaatgggaggattattgtgattttttga

SEQ ID NO: 7454 - RNA, 1374 nt, synthetic construct
  source 1..1374: mol_type = other RNA
atgaatttgctcattaaaaacatccagaggttcatctccatccagatcgagtatcaggccggagtcttcaaggtcctaaacatctttaagatgaagatcgagcaggttcacatcgaccaaattaggaagcagtttgccggcttgcaaaccaaagaagatctagccaaactgctgtctttcgcggatatcgtgttatatggtgaggctcgtaagcctgttcgcctgaaggctctcacatactatgcaaatccagccttgtgcaaaaaacgttaccagaccttcataataaagaaaaagtccggcgcagacaggacgattcatgcacctgtgaaagggttaaagtctctcctccaatcacttaaccttgtgctgcaatgcattcatgaaccccacgaggctgccaccggttttgttctggagaagtctatcgtggataacgcgaaaaaacacgtggggcatcactacgtattaaacatcgacttgaaggactttttccattcattcgatttgtacagagtgaaatttggccttttaaacgaggtctggggtataaaaacaatcagcaagtttaggaaggaaaacggcgcaagctttcaaaagatggacgaactggctttcctgatggcttccctgtgtacccacagcttcgagatcgacggagagctgaaaactgtcctgccacaggggagccccacaagtcctactatgacaaacattctgtgtaagaagctggaccgcagactcactggccttgcaaatagattcggcgctacttatactcggtacgccgacgacattaccttctcgtctccacacaatatatacgaagaagtggagaatcccgtactaaaccagaagggcgcgtacgacgattttttgagtgagcttaaacggctgattaaagaagagaaactcactatcaatccgaagaagaccagactgcagaaggccggttatcgacaggaagccacaggactcattgttaacgacaaggtcaatgtgcgccggcgctacgtgaaacagatacggatgtatcttaacttctgggagaaatatggatatgaaaaagccgagcagatctttaagcgagattacctccatgataggggaaatgtgaagctgcttaaagaggggaagctgaaagtgaattttccaaagatgaaggatgtgctgggagggaaactagagtttctcaaaatggtgaagggggtcgaagacaacacatacctgtcactgaaagatcggctcaataacctgaataccacgattgtacagaaccctattcccaagagtgttgatttgaattccgtactggaagtcttcaccagaaagggcctcatggaggccatggaactgttcaaaaagtgcaagtga

SEQ ID NO: 7455 - RNA, 1209 nt, synthetic construct
  source 1..1209: mol_type = other RNA
atgaagatagaacagactcatatcgatcagattcggaaacagtttgcagaactacagtctaaggaggatttggtgaaattgctgtcaggagcgaagaatatcctgtacggcaaggagtgtaagcctgtgcagcttaagtccctgacatattacgccaatccgactctatgtaaaaagcgttaccagaccttcaccataaaaaagaagtctggtgcagacaggactatccacgcaccagtgaaaggtctgaaatccatccttcgaagcctgaactatgtgttacagtgcgtcaatgaaccccatgaagccgctaccggatttgttctggagaagagcattgtagacaacgccaagaaacatgtgggccaccattatgtccttaacatggacttgaaggatttcttccactccttcgatttataccgtgtcaaattcggactgctccacgaggcttggagtatcgggaatatttccaaatatcgggagacaaatgaacagcagtttcagcagaaggaagagctggcctttttactggcctgcctgtgcacgcaccccttcaagatcgatggggaggagaaaacagttctccctcagggctctccaacgtcacctaccctcactaacattttgtgtaaaaagcttgatcgaagattgactggtctggctaacagatttggcgctacttacaccagatacgccgacgatattacattttcgagcccccacaatatctacaccaatggagaattcaacaaagaactgaagaggattattgaagaggatcagaagctcgtgatcaatcccaagaaaacccggctgcaaaaagcgggctatcgccaagaggccacagggcttatagtcaacgacaaggtcaatgtgcaccggcgctatgtgaagcaaatcaggatgtggctctactactgggagaagtatggcaacgaaaaagcagagcagatctttaagagggattacattgccgataagggccatgtaaagaatatcaacgcacacctggttaacgtgctggatgggaaactcgagttcctgaaaatggttaaaggagtgaacgacagaacgtatattaaactaaagaaccgctacgacaaactcacagaaaaggacagcccaataaatcaactgcttgacatttgggacaccgacgggatcgaccaagctatgagtatctattacaaggacaaactcgagtga

SEQ ID NO: 7456 - RNA, 1191 nt, synthetic construct
  source 1..1191: mol_type = other RNA
atgaagattgaacaggcacacattaatcagatacgacaacagttcgcagagctgcagtcgaaagaggatctggtgaaactcctgtcagaggccaaaaatctcctgtatggggaaaaatgtaagcccgtgcagttgaaaagcctcacctactacgctaatccagaattgtgcaagaagcggtaccagacatttacgatcaagaaaaagtctggcgcggatcggactattaactcccctgtgaaggggcttaaatcaatcctgaggagtctgaactttgtgctccaatgtgtgtacgaacctcatgaggctgccacaggttttgtcctggaaaagagcattgtggacaatgcgaaaaaacatgtcggccaccactatgtgctcaatatggatttaaaggacttcttccatacattcgatagaaatcgtgtgaagatgggattcatctatgaaccattcaatttaagtggggacaaggaacccctcgctttcctgctcgcaagcctgtgcacccacccgtttgaaatagatggtaaagagaagacggtgctgccccaaggcagccctacctctcccaccttgacaaacattctttgcaagaagttggacagacgcctaaccggcctcgccaatcggtttggtgcaacatacactagatacgccgacgacatcactttttcttcccagcataacatctataccgacgaggtatttaacaacgaactaaaacgaatcatcgaggaggaccagaagttaatcataaatccaaagaagactcgcctccagaaggccggctatagacaagaagccaccggtctgattgtgaacgacaaggttaacgtacacaggaggtatgttaagcagattcgtatgtggctatactattgggagaaatatggatacgagaaggccgaacagattttcaagcgggactacctggtagataaagggaatgtgaagaatttgaatgctaaactggagaacgtcttggacggaaaactggagttcctgaagatggtcaaagggatcgaggatgttacatacaagggcctgaaagagaggtttgatctgcttaacggcatcaaagtcaagaaagagaacgagaaaatcgatcttgagaacgttgtcaacactatcctgaataagggacttatagaaggaattaacctttacgatcgctataaaaagtcctga

SEQ ID NO: 7457 - RNA, 1191 nt, synthetic construct
  source 1..1191: mol_type = other RNA
atgaaaatcgagcaggcccacatcgatcagatcaggaaacagtttgccgagttacagagcaaggaagagctagtgaagctgctgtcggatgccaagaatatgctttacggcgaggagtgcaagcctgtgcaactcaagtccctgacatactatgctaatcccaccctctgtaagaagagataccagacattcactataaagaagaagtcaggcgctgaccggattattcatgcaccagtgaaaggtctgaaatcaatactgagatccctcaactttgtgctgcagtgcgtatacgaatcccatgaagcagctactggatttgttttggagaagagtatcgtggacaacgccaagaaacacgttggacaccattacgtcttgaacatggacctgaaggacttctttcacacattcgaccgtaacagggttaagatgggctttatttacgaaccgttcaatttgaacggggacaaagagcccctcgcctttctgcttgcatctctctgcacccaccctttcgagatcgatggggaggtaaaaacggtgcttccccagggatcccctacgtcacccacactcacgaacatcctgtgtaagaaactcgatagacgtctgacaggcttggcaaatagatttggggcgacttatacccgatatgccgacgatatcacctttagcagcccacacaatatctataccgacgaggagttcaataaggaacttaaacgcattatcgaggaagaccagaaactcataattaacccaaagaagaccaggctgcaaaaagccggctaccggcaagaagcaactgggctcattgtgaatgacaaggtcaacgttcggcgccggtatctgaagcagattaggatgtggctatactattgggagaaatacggttacgaaaaagccgaacagatcttcaagcgagactatattgctgataagggacatgtcaaaaacataaatgcgcatctggtcaatgtgctggacgggaaacttgaattcttaaaaatggtcaagggtacagaggatggcacctacaagaggcttaaggaacgcttcgataacctgaccggcttcaaagagactaaagatcaaagcaaaatcgatttgagtagtgtgctgaatactttagtgaaccagggactaaacaaagctatgtctctgtattctcgctttaagaatcagtga

SEQ ID NO: 7458 - RNA, 1212 nt, synthetic construct
  source 1..1212: mol_type = other RNA
atgaagatcgagcagattcacatcaaacaaattaggaaacagttcgcagagcttaagagcaaggaagatttagtcatcctgctgtccgacgcaaaaaatatattgcactcagaggagtgtaaacccttccagctcaagtctctgacttactatgctaatcccaagctgtgcaaaaaaaggtaccagacttttacgattaagaaaaagagtggagccgaccggaccataaatgcacctgttaagggacttaagagcatactcaggagcctcaacttcgtgctgcaatgtgtatacgagcctcatgaggctgccacaggtttcgtcctgcagaagagcattgtggacaatgctaagaaacatataggccatcattatgtccttaacatggatttgaaagacttctttcacacttttgaccggaatagagtgaagatgggatttatctatgccccattcaacttaaatggggataaggaacccctggcctttctgcttgcgtcactctgcacccacagttttggtattgagggggaagtgaagactatcttaccacaggggtcgccaacctctccgacattgacgaacatcctctgctccaagctggacagacgcctaaatggtctggcaaatcgattcggcgccacttatacaagatatgccgatgatatcacattttcttccccccacaacatctacaacaatgaggatttcaacaaggagctgaaacgcattattgaagaggatcagaagctggtgatcaatcctaagaaaacccggctgcaaaaagctgggtttcggcaggaagttaccggactcattgtaaacgacaaagttaatgttcagcgccgatatgtcaagcagatcagaatgtggctgtacctgtgggagaagtggggctatgaaattgcccagcaaaaatttttgaacgactacattgtggacaaaggccacgtgaagaatatcaacgcccatctagtcgatgtgttggacgggaaactcgaattccttaagatggtgaaaggcatagaggacggcacctacatgggtctgaaacaaaggttcgatcgtctggtgggagtaaccgatcctattaaccagctcctagatatctgggaaaaggctgggatcgaatccgcgatgaacaactactacaagaacgagacaacaagtcttgacaaaggctcttcaaatatcgaagacctcttcaagtga

SEQ ID NO: 7459 - RNA, 1191 nt, synthetic construct
  source 1..1191: mol_type = other RNA
atgaaaatcgaacaggcccatatagagcaaatcaggaagcagttcattgagttacagtccaaggaggacctggtgaagctgctctctgatgccaaaaacatgatgtacggagaagtttgtaaaccgatccagctcaaatctctaacctattacgccaacccttcactatgtaagaagcgttgtcaaactttcactattaagaagaagagcggcgccgacaggaccatacatagccccgtgaaaggtctgaagtccatacttcgcagcctcaatttcgtcctgcagtgcgtgtacgagccccacgaagcagcaaccggattcgtccttgagaaatccattgttgacaacgcgaagaaacacgtgggtcaccattatgtgcttaacatggacctcaaagatttctttcataccttcgaccgaaacagagtaaagatgggctttatgtacgaaccttttgctctgaatggtgataaggaaccactggcgtttcttctcgcaagcttgtgcacgcaccccatcgaaatcgaaggggaaggcaagaccgtccttccacaggggagtcctacctcacccactgtgacaaacattctgtgcaaaaaactggatcgaaggctgaccgggttagccaatcgctttggcgcaacatacacaaggtatgctgacgacatcacctttagttctccgcataacatttatacggacgaggatttcatcaaagaattaaagcggatcattgaagaggaccaaaaactggtgattaaccccaagaagacgcggttgcagaaaacaggacacagacaagaggttacaggcttgatcgttaatgataaagtcaacgtgcacagatcgtacgtaaaacagatcagaatgtggctgtactattgggagaagtatggctacgagaaggccgatcagatattcaagcgcgattacattgctgacaaaggtcacgtgaaaaataagaatgcccacctggacaatgtgctggatggaaagctagagttcctcaagatggtcaagggcattgaggatcggacttttaaggggttgaagaaacggtttgacaaattgactgggatgaacgatcctatgaatcagctcctcgatctgtgggagaacaaaggaatcgaagacgctatgaagaattattacaagtccccaccagagatgactatcatattcacactgtga

SEQ ID NO: 7460 - RNA, 2157 nt, synthetic construct
  source 1..2157: mol_type = other RNA
atgaagattgagcaggcgcacattgatcaaatacggaaggaatttgccgaactccagtcaaaggaagacctggtgaagctgctgagcgatgctaagaacatgctatacggcaaagaatgcaagcccgtgcagctcaaatcgctgacctattacgccaatcctaccctgtgtaaaaagagataccagacgtttaccataaaaaagaagagcggggcggaccggactatcaacgctccagttaaaggtctgaagtccatcttaaggtccctcaactttgtgcttcaatgcgtgtgcgatcctcacgaagcagctaccggcttcgtcttgggcaaatctatcgtagacaacgcaaaaaaacatgtcgagcaccattacgtgctgaatatggacctcaaagattttttccatacgtttgataggaacagagtgaaaatgggttttatgtacgagccatttaatctcaacggcgataaagaacctctggccttccttctggcctctttatgcactcaccccttcgaaatagatggcgaggtcaagactgttcttccccagggaagtcccaccagccctaccttgacaaatattctgtgtaagaaacttgacaggcggttgaccggactggccaaccgctttggcgcaacttatacacgttacgcagatgatataacattcagctcccctcacaacatatacaccaatgaagcctttaacaaagagctgaagcgcatcattgaggaagatcagaaactcgtcatcaatccagagaagacacgtctacagaaggccggatataggcaagaagctacagggctcattgtgaatgacaaggttaacgttagacgtaggtacgtcaagcagattcgcatgtggctttattactgggagaagtacggatatgaaaaagcgcagcaaatctttatcctggactatacaacagataagggacatgtgaagaaggggaagccaaatctggccaatgtgctcgatggaaagctggagtttctgaaaatggtgaaaggggagaatgacagcacctatgagacactgaaaaaaaggttcgacaagctctatgtgatcgagaactccttctcaaaggtacttgacatttgggagaacgaagggattttgaagaatactgacaagaatacaggtcagaagacatcagaacacattatacataacccgaaacacattactaagtttctgagacagttcaaagagaatactgacttgaagtggactacccatagctgggataacatcaaatatgccagtatagacgactttatcaacgcccttaacgaaaataagaaggagttcaatcggctctataaacataaccgggacttgtataatctcatccagtatttcatctaccagccgaagtcaaatccgatcgagaatggcattcctaaatatgggtgggtgaaccttcaagcaatgaagtttggttggcagttcccagacaataagtttctgttgtggtgtaaggagaactacgataataaaagttacgacgaacggaagaaacctttccagtacttgctacccaaggaacttcgaccctccaaaaccgtaaaaggaaaggagatcaaatacttccaggatgtggtcgagatctttaagacggaaattcagtttcgagaagagtacctgtataaagagatccgcaaacgcatacacagaatttctgacttcaattttagcggcttagatgagctgaagaaactggacttctatacctatacccccggcgttttatccgcaatcgaccacatcttcgagcaaattaagcgaaatgagactgctatcgacatcaacatttcatacatcattcacaaccagaagatcatcctcagtattacacagatcaattccttcccctcgaaagagctggatattaacaacacgaagtctttcttagggggacatctgaatgccatagctgaaagcctgttcagtctcgctgatttctctattgagagcaactttaagtacaacggtaagatcatcccaggcgaattgcaaatcacctacgaaaacatgataggcaagagagtcgcttccaacattaccctaacccaggagccaattttcatcgagtctaataacaaactgcctgggttcacttacaaactgacattctacatttga

SEQ ID NO: 7461 - RNA, 1170 nt, synthetic construct
  source 1..1170: mol_type = other RNA
atgaagatcgaccagtcccatattgaccatataagaaaacagttcgcagacctccagagcaaagaggagctcgtcattttgctctctgaggctaagaacttgctgtatggcgaagaatgcaagccggtgcagctgaaaagtctgacttattacgccaatcctgaaatttgtaagaaaaggtaccagaccttcactataaagaaaaagagtggggccgacaggacaatcaacgcccccgtgaagggtttgaaatcaatcctgcgaagcctgaactttgtgctccaatgcatctacgagccacacaaggccgccaccggttttgtcagagataagtccatcgtagacaatgcaaaaaaacacgtcggacatcactacgtgttcaacctggatctgaaggacttttttcattcctttgataggaatcgggtgaaaatgggcttcatctatgaacctttcaaccttggaggtgacaaagagcccctggcctttctgctcgcatccctgtgtacacaccccttcgaggtggacggagaacttaaaaccgttcttccacagggcagccctacgagcccaacattaaccaacattctgtgcaaaaagctggaccgccggctcaatggcctagccaaccgcttcggtgcaacattcactcgctacgctgatgatatcaccttcagctcaccacataacatttataacgacgaagcattcaacaatgagctgaagcgtataatcgaggaagatcaggagctggctatcaatcctaagaagacgagactacagaaagaaggctacagacaggaggctactggcctcattgttaacgagaaagtcaatgtgaggcggaagtatgttaaacaaatccggatgtggttgtactactgggagaagtatgggtacgagaaagctgagcaaatttttaagcgtgactacatagccgataaggggcacgtaaagaataccaatgcccaccttatgaatgtgcttgatgggaagttggagtttttaaagatggtcaagggaggcaacgattcgacttatctaacactgaaaaatcgcttcgaaaagcagattggattagcggctcccatctcttctgtgctcaacatttggcaaaatgaagggatagaaaaggcgatgaaaatctttaaccagctgcagcgaaattga

SEQ ID NO: 7462 - RNA, 2154 nt, synthetic construct
  source 1..2154: mol_type = other RNA
atgaaagtggagcaggaacatattgaccagattcgaaagcaatttgctgagttacacaataaggaggaactgatcaatttgctgtcctacgccaagaacatgttttatggagaggagtgtaagccagtccaattaaagtctcttacgtactatgccaaccctgaaatctgtaagaagaggtatcagactttcacaatcaagaagaagtcaggagccgatagaactattaatgctcccgtaaacggccttaaaagcatactcagatccctgaacttcgtgctgcagtgtatgtatgaacctcatgaagtggccaccgggttcgtaatggacaagagtatcgtggacaatgcgaaaaagcacctggggcatcactatgtgctcaatctggatctcaaggacttcttccacacttttgatagaaatcgcgtgaaaatgggtttcatatatgagccattcaatcttagcggtgataaggagcctctcgctttccttttggcttccttatgcacacacccatttgaaatagacgaggagctgaaaactgtactgccccaggggagtcctacctcccctacccttactaatatactctgcaagaagctagatcgccgacttaatggcctggccaatcgattcggcgctacatttacccgttacgccgacgatatcacgttcagcagccctcataacatttataacgacgaggcgttcaataatgagctcaaaagaattatcgaggaagaccaggagctcgcaatcaatccaaaaaagacacgcttgcagaaagccggctaccggcaggaggtcactggactgatcgtgaacgagaaggtaaacgtcggccgacgttacgttaaacaaattcgcatgtggctgtactactgggaaaagtacggatacgaaaaggccgaacagatttttaccagggattacattgcagacaaagggcatgtgaagaaaggaggcgccaacatggctaatgttttagacgggaagctagagtttttgaagatggtcaaaggcgcagctgacacgacatatctgggattaaagggaagactggataaactggtcattaatcaggacaccaacaaaactgagatcgccgaactgaccaacaagggtctgaggttctccaatgagaatgaggtgttacacgacccggacttcgtggtcaagcgtctaaagcagtttacgatagaccctattatgaaatggacaacccacttttgggatatccccacagaaacggataccgatgttcactcactaagggacattgctgatcacttcgccgcagtgaacagtcggttcgacgaatttgttgcacttcagaaatacaacaacaacctgtggtggaaagtgatctatcccttcatcttccagaaaaaaccaaaaaagaacgagaacaaagacaacccttatcggtggggggagtataacctccatattggctggcagtaccccaaatttgttgcagaatggtctaaagataactacgatatcccccctcccgcgctgaagaagactccctttgagatgcccttgccaagtgagctcataacagacctcgccaatcagaagtatcgggaactatttggaaaggagattcggtatttcggtgatgcgattcaaatgttcaagagagagattgaattccgcgaagacaccaaagatctctactacgaggtcaaagtgctggcaaggcaggagctgaccgaattttcagtgaatggcttggagtcgcttaaacagttgagcttttttacctacactgctccagttctgaaagccatcagacgcatctttcggatgatccaatctcgcaccgaacagagagaagtgatcattgagtgcaaaaagctcactgacctgaggctcatcgagctgaggataatccacaaaaactctctgtcgcacagggaaagcaccgatgataagataacaaaaccatctggtgacctgcttgaagtcatcaagaatctcattagcatctgcaatttcgagatcgaatcctcttttaacgacgggattttccggatcacatatctgcgaccgaacacaaacgtgataaagctcaatcatttgcggcccctgaagcaatccctggattcactgcatggcttcacctacgtcttgaagtttccgatctga

SEQ ID NO: 7463 - RNA, 2208 nt, synthetic construct
  source 1..2208: mol_type = other RNA
atgaagatcgaccagacccacattaatcagattcagaaacagttcaatgagctggagtcaaaggaagacctggtgaaactcctaagtgatgctagaaatatgttatacggccaggaatgcaaaccctttcagttaaaggcccttacatattactctaacccgaaggtctgtaggaagcggtataagacctttaacattaagaagaagtccggagctgaccgcacaataaatgctcctgtgaaaggattaaaggccattttacgaagtttcaactttgtcctgcaatgcttgtataaacctcacgagaatgccattggattcgtgcttgacaaatctattgtggacaatgcccagaaacatgtaggccatcattacgtactcaacctagacctgaaagacttctttcattccttcgacaaaaaatgggttaagtatggcttgatgtctcccccatttaatctgcacggtgataaggagcccttagcgtttcttctggcttcactcgttacgcacccattcgaggtggaaggcgaggtaaaaaatgtcctgccacaggggtcgcccacttccccaacactgaccaatatcctgtgtcagaagttagaccgacgcctcaacggtctggcaaataggtttggggccaccttcacaaggtacgcagatgatattacgttttcaagcccccacactatttataacgacgaggcttttaacaacgagcttaagcggatcatcgaagaagaccagaagctggcaattaatcctaagaagactagattgcagaaagctgattataggcaagaagcaacaggcctcatagtgaacgataaagtgaatgttaggcgcagatacgtcaagcagattcggatgtggctgtactattgggaaaagtatggatatgaaaaggccgagcaaatatttaagcgtgattacatcgccgataaaggtcacgttaagaatatcaacgcacacctggttaacgtcctcgacgggaagctggagtttctcaaaatggtgaaaggcatagaagacggcacctataagggtctaaaggaacgttttgacaagctgactcagtcatacccttcccccaccatacttaagctgagcgatgacaatcagaatcgaatgttggagaatgaaaccgtgtccataagcaatggcacacccagtgagctgttgaacaacaacaagatcaacaacatcgaattgatcgtgcgccctctcggaaactccaccgtggaggaacttatggtcgacaaatacctcgtcaaggggctgaaattgcctcatattgaaattttcgagaaccctgacaaatacaagccatcactgccgcataacccggagcagactacgatcctgctcactgaattcaagaatgatgggagcggattcaaagaattggtgcacaagcctttcgatgagattaccccatacaaggtgctcgaggaggtgaaaaaccacccaaacttctcagagtacttcaaaaagggtaggaaatccggctttaagggtaatataaatagagaagtgcagaactcggtgattggccttatcaatagctttgaacggatcggaaatatgcattgggatcagttcaaagagtatcctttcggggagcacggctcctcagagtacaccacctatgccatgaacttcaaaaagaactaccgcttcggacccagacaagacggctacactagtctggaggaactgatccggtttaccttccttaaagagatcacacgcttcgacagtaaactgatcttccttccagatgataggcgatttaacctgagagggtctttttacacgtgggttcccagcgtgaaaaaaggactcgagttcatcgcccaaggtataaacgaacatagcaacatttgcggctctagctctttttccacgaaggaaatttactttgagctacgtcgggatacctttctgaacactatctccttgctaattaccgatagtgatagcgtcgcgaaaagacccgcggaggacatcctgaaagatctgcggctgagcgaggtcttcaagaagtatttcaggtctatatgtgactggactatctatctcaagaatgaggacggaaatttccaactccgcgtactgaagagaatccaggacacagggaaggaggatatcatctctatcgaagggacaaaggggtttacacacaaaattacattctacggcacttga

SEQ ID NO: 7464 - RNA, 1170 nt, synthetic construct
  source 1..1170: mol_type = other RNA
atgaacatcgaaccattccagaaagagcagatcagaaagaactttgccgagctgcagaataaggaagatttggtcaatatactgagcgatgctcagcgaatgctgtatggcgaaaactgtaaggacgtgcagttaaagtcactcacctactacgccaatcctgagatctgcaagatgcggtatcaaactttcaccattaaaaagaagagcggcgccgacagaacaattcatgctccagtgaagggtctgaaatccatcctgcgctctctcaattttgtgttccaatgtattagcgagcctcatgaagccgccactgggttcgttctggacaagtcaattgttgacaatgcgaagaaacacgtcggaaatcactatgtcctcaatatggatctgaaggattttttccactcttttgatcggaatcgcgttaagatggggttaatgtacgagccgttctctttgggaggcgataaagagcctctcgctttccttctggcaagtttgtgcacacaccccttcgagattgacggggaggtgaagacagttctaccccaggggagcccaacttcgcccacgatcactaacatcctgtgcaagaagctggataggcggttgaatggccttgcaaacaggtttggggccacctttacaaggtacgcagacgacataacgtttagttcccctcataacatttacaacgatgaaaccttcatcaaggaactcaaaagaataatcgaggaggaccagaacctcgtcatcaaccccaaaaagacccgattacaaaaagcaggttatagacaagaagccaccgggctgatcgtaaacgataaagtcaatgtgagacgtcgctacgtgaagcagattcgtatgtggctttactactgggaaaagtatggctacgaaaaagccgaacagatattcaagcgcgactatatggctgataaaggccatgtgaagaacgtgaatgcgcacctggtgaatgtgctagacggaaaactggagtttcttaaaatggtaaagggatccgaggatggtacataccagaggctgaaagagcggtttgacttcttggtcggttttaccgaaccaattaacgacgtactcgacatctgggagaaatatggcattgacaaggctatggatgtgtattacaaaaacaaacttggatga

SEQ ID NO: 7465 - RNA, 1197 nt, synthetic construct
  source 1..1197: mol_type = other RNA
atgaagattgaacaagctcatatcgatcagatcaggaagcagttcgcagagcttcagagcaaagatgacctggtgaaactgctgagtgacgctaagaacatgctgtactccgaagagtgtaaaccgattcagcttaagagtctgacttactacgctaatccagtgttgtgcaagaagcgataccagacctttattatcaagaagaaatctggagccgaccgtatcattcacgcgcccgccgagggccttacctccatactcagagcactgaatttcgtgttgcagtgcatgtatgtaccccacaaagctgtgaccggtttcgtcttggaaaaatccatagttgacaatgccaaaaaacatgttggccatcattacgtcctgaacatcgacttaaaggatttctttcacagcttcgataggaatagagtgaagatgggatttatgttcgaacctttcaatctgaacggagataaggaacctctggcctttctcctggcctcattgtgcacacacccatttgaaatcgacggagaagtgaaaactgtactgccacaaggttctcctacaagcccaaccattaccaatatcttgtgtaaaaagctggaccggcgtctaaccgggctcgccaatagatttggtgttacatacactaggtatgcggatgatatcactttttcgtctcctcacaacatttacaacgacgaagcattcaacaaggagctcaaaaggattatcgaggaggatcagaagctggtggtcaatcccaagaagacgcgactccagaagactgggtaccggcaagaggttacgggcctaattgtgaatgataaggtcaacgtgcggcggcgctatgtgaaacagatccgcatgtggctgtattattgggaaaaatatgggtatgccaaggcagaacagatatttaagcgcgattacgtggcagataagggccatgtcaaaaacatcaatgtccacctcgtgaacgtactggacgggaagttagagttcctcaaaatggttaagggcacaaaagacgagacatataaaaagctgaaggagagatacgagaaccttgctgaagaaataaaccccatttcacaacttctcaatgtctgggagaaggagggcatcgagaaagccatggaagtgtactatgacaaagaggagaacagcaacattttaatcgaggacctattctga

SEQ ID NO: 7466 - RNA, 2178 nt, synthetic construct
  source 1..2178: mol_type = other RNA
atgaaggttgataaggtccacattgaacagctccgaaagcagttcgcggagatgcagtcaaaggatgatttgcttaaactcctgaacaacgcaaagaagatgctgtatggagagaactccatgccattccagaaaaagagcctgacatattacgccaatcccgacctatgcaagaagcgctaccagacctttaccatcaaaaagaagagcggagaggatagaataattcactcacccgtgagcggccttaagtccatcctcagggtgctgaacttcgtgttgcagtgcatttacgagccacataaagctgccactggctttgttctgaacaagtccattgtggacaatgctaagaagcatctgggacaaaactacgtctataatatcgatctgaaggacttctttcatagcttcgatcggaacagagtgaagattggttttatgtatgaaccgttcaatcttaagggggacaaagaatcactcgcatttctgttggcctgtctctgcacgcacccactagaggtggacggagagatcaaaacagtgctgcctcaggggagtccgactagtccgacactgacaaatatcctgtgtaagaagctggataggcgtcttacaggactagctaagcggtttggcgccacgtacacccggtacgctgacgatataaccttttcctccctgcacaacatctacaaagatgacgactttatcaaggagctcaagcgcattatcgaggaagaccagaagctcgtgattaatcctaataaaacgcggctccagaaggccgggtatagacaggaagctacgggtctgatcgttaacgagaaggtaaatgtgcataggcggtacattaaacaaattcgcatgtggctctattactgggaaaagtatggttatgagaaggccgaacagatcttcaaaagggactacatcgccgacaaaggtcatgttaagaatatgaatgcacacttggtgaatgtgcttgacggcaaattagaattcttgaaaatggttaagggcttcaaagactcaacatatcagggtctgaaaaagcgctttgacagattaactaaatctgagaaccccatagaaaataacgagataattgagcagaaccgtactcaggaacatctgaatgtcctttctgaggacaaaaaggccatattccatgaccctaaacttgtcatcaacaagctggagcaattcacatctgatccaattatgaaatggctgacccacttctgggatacaagccctgatatcaattctgagagtaactccagtaccgagaactattttaaagccgttaatagccgatacgaagaattcgtcttcttacagaaatacaacgccaatttatggtggaatgtaatctatccattcgtgttccaaaagaagatttcaaccaataaagaggggaaagaaatcccctttaaatgggggaaatatggcatcaaaattgggtggcaatatcccgactcagtgattaactggatagtagagaattacgataacaagcctcacgcattaaaaaaaaccccctttgagatgtccataagcgacgatctcgtctctgcggaagcgaaccagaagtaccggctgatgtacggcaaggaaattcgtttctttggcgacataattaaccttttcaagagggagatcgcatttcgcgaagaaaccagggatttttattacgagatcaacaacttggtactacaggaactgcgagaatttaaagtgtctggcctcgagacacttaagtacgagagctttactgtgtataccgtgccagtgttgaaagctatcagaaggatcttccgcatgattcagaccagaactgagaatagagaagtcgaaatctcttgtaaccgactgtcgaatcaaaacctcatactgttgaagataatccacattgggagtcatcccctcaagaatagcgagcacagtaaattcatgaaaccttcgggagatctggaggaagtaattaagccactgatttccatctgtgacttcgaggttgccgcacactttactgacggagatttcgtgctgaagtatctgtaccctaacgtcaaaattagccacgagaattcccaattccacatcgctgagatcaaaaaggaggattgcatcgtcaaaggctttacttacatcttgaagttttacctgccctga

SEQ ID NO: 7467 - RNA, 1191 nt, synthetic construct
  source 1..1191: mol_type = other RNA
atgaagatcgaacagcagcacatcgatcacattcggcagaggttcgccgagatgcaaactaaggaggaactggtgagcttgctttctgacgctaagaatattatgtatggtaaggagtgcaaaccctttcatctcaaatctctgacctactacgccaaccccaaattatgcaagaaacgctacactaagttctccatcaaaaagaagagcggaaaagagagaattattaacgcaccagtgggaggcctgaagagcttactgcggagtctgaactttgtcctacagtgtatttacgagcctcaccacgcagccacaggctttgtcctggacaaatcaatcgtggataatgccaacctgcataccggcaaccataatgtgtataacctggacctgaaagactttttccactcattcgatcgcaatagagttaagatgggttacatctacgagcctttcaatctcgggggggatagggagcccctggcctttttgcttgctagtctctgtacacatcctttcgaaatcgagggggagatcaagacagtactcccgcagggaagccccactagccctacaatcacgaacatcctctgcaagaaactggacaggcgtttgactggtctggccaaccgctttggagctaagtactcccggtacgcggatgatataaccttctcctctccacataatatttataaggacgaagagttcctgcgcgaactgtcgcgaatcatagaggacgaccagaaactcgcaattaacccagataagaccagactgcagaaggccggctatcgacaggaagtgacagggttaatagtcaacgaaaaagctaatgtgaggaagagatatgttaagcaaatccgtatgtggttgtattactgggagaaatatgggtacgagaaagcacagcaaattttcaaacgggattatctgaccgacaaaggtcacgtaaagaaaggcgaaccaaacttcgcgaatgttcttgacggcaaactagagtttctgaaaatggtcaaagggctcgaagattcaacctataagacactaaagaagaggtttgacaagcttactgatgtgaaggaaaaaacgcagcaagaaaaagtggatctcgatgctgtcatagacaccatcattaataagggccttgaccagggaatatccttgtacgacaagtacaagagtacctga

SEQ ID NO: 7468 - RNA, 1230 nt, synthetic construct
  source 1..1230: mol_type = other RNA
atgaaaattgaacagcagcatattgatcagatccggcaaaagtttgcttcaatgcaaaacaaggcagatttggtgtcactgctgagtgaagccaagaacatactgtatgggaaagaatgcaagccattcgaacttaagtccctgacctactatgctaacccagacttatgtaagaaacgttacgcaaagttcactatcaagaaaaagagcggcggcgaaaggacaatcaacgcacctgtgagcggactgaagagtattctacgctctctaaatttcatcttacagtgcgtctacgaacctcacaatgccgccacaggattcgtcctgggcaagtccatcgtggacaacgccaaagttcacgtgggcaatcatcacgtgtacaatctggacctcaaagacttctttcatagttttgataggaaccgcgtgaaactgggatttatttatgagcccttcaacctcaatggtgaaagagagcctttagcctttttgctggcgtcgctgtgtacacacccgttcgaagtgaacggtgagataaagaatgtgctacctcaaggcagccccacctctccgactatcacaaatatcttgtgcaaaaagctcgaccggcgactcactgggctcgctaacagatttggggcaaagtacacgcgctacgcggatgatatcacattctcctctccacacaatatctataatgaagaggagttccagaaagagttggaaaggataatagctgatgacaatcttctcaagattaacggaaagcagaaagagatcggaccccagttgaacattaacaccgacaaaacccgtttgcagaaatcagtttaccggcaggaggtaaccgggctgatcgtcaacgagaaggtgaatgttcggcagagatacattaagcaaatcagaatgtggctgtactactgggagaagtatggctatgagaaggctcagcagatttttaccagggactacattactgataagggacatgtaaagaaaggcaaacccaaccttataaacgtgctcgatggtaagctggagttcctcaaaatggtcaagggggccgaggattccacgtatctgactctgaaaaaccgatttgacaaacttccacaggtaaaggagaagattcaaagcgaaaaagtcgacctggacgccgtgcttaataccctgatcaataaagggcttaatcccgccatggttctctatgatcgctataaaaatggctga

SEQ ID NO: 7469 - RNA, 1209 nt, synthetic construct
  source 1..1209: mol_type = other RNA
atgaagatcggccacgaacagactgaacgtataaggaaacagttcaagaatcttcagacacggcaggacttggtggatctcctgagtgaggcaaaggacatgatgtacgaagataagacgaaaccctttaagctaaaaacactgacctattacgcaaaccctgaaaactgtaaattccgatattccaccttcttcgtgaagaaaaaatctggcggccagcggacaatacacgccccaacaaaggggttgcgttccgtgcttcgcagcctaaactatgttctccagtgcatgcacgtcccgcatcaggctgctacaggtttcgtgcgcgatagaagcattgtggacaatgcgcaaaaacatgtcggccaccattacgtgcttaatctggacctgaaggacttctttcattcctacgatagaaacaaggtcaaactggcctttatgtactcaccatttaatttaagggggtgtaccgagaaggagaaattggccttcttcctggcttgcctctgtactcacccttttgagattgaaggagcaactaaaactctcctcccccaaggctcgcctacaagtccgactatcaccaacatactctgcgaacgcttagatagaaggctgacgggattagcgaacaggtttggggccacgtataccagatatgccgacgatattaccttcagctcaccccataatatctaccaggaggaaacaaatccctccctgaaccctaaggggagctacgagaactttcgagccgagcttgagcgactgattgaggaggagaagttgactattaacccaaagaagacccggctgcaaaaatctggctatcgccaagaagccaccggactcatagttaacgagaaggttaatgtgcggcgccggtatgtaaagcagattagaatgtggctttattactgggaaaagtatggttacgagagagctgagcagatctttaggtctgattacatgatcgacaaggggcacgtcaaaaaaggcaagcccgacctaatgaatgtcctggatggaaaactggagttcctgaagatggtgaaaggtaaggaagacggaacctacaaggggttgaaagaaaggttttacgaactcattggacacgaggacccaatcaaccgggtgctgaatgtatgggagactgaaggcatcgatcaggcaatcaatatctattacaaggacaaactggagtga

SEQ ID NO: 7470 - RNA, 1230 nt, synthetic construct
  source 1..1230: mol_type = other RNA
atgaagatcgatcctcagcacatcgcccaagtcaggaaacagtttgagaatctccagagcaaagaggacttgctccagttactgaacgctgcgaaaaaaatgatgtatggcgaaaagttcaagccactggagcttagagcactcacatactacgctgatcctaaactttgtacacgaaggtacagtaagttcagcataaagaaaaagtctggcggtgtgcggacaattcacgcccccacgaatgggcttaagtccattttgcgctcccttaactttgtgcttcagtgcattcatgaaccacacagaaccgctactgggtttgttctggacaaatctatcgtcgataacgcaaagaatcacgttggcaaccactacgtgctgaatctggacttgaaagatttctttcattcgttcgacaggaacaaggtgaagttggcattcatgttcacaccttttaatctgggcgtttctaaggaaaaagagaagattgcattcctcctcgccagtctgtgtactcatcctctagaggtggacggtataacgaaactggtgttaccccaagggtcccccaccagtccgactatcaccaacatactctgcgagcggttggacaggagattaaacggactggcaaagcggtttggtgccaactacagccgttatgccgacgatatcacattcagctcaccacataacatttaccacattgaggataacccctccctgaatcagaaaggacgttttgataatttccgcgccgaatttgggcgcctaattgaagaggagaaattgagcatcaatccaaaaaagaccagactgcagcgatccggcttcaggcaggaggctactggactgattatcaacgacaaggtgaatgtccgccggcagtacgtgaaagagctacggatgtggctttattattgggagtcttatggctatgaaaaagcggaacaaatatttaagcaggattacatggccgacaaaggccatgtgaagaatatgaatgcccacctcgtaaatgtaatcaagggaaagctggagttcctgaaaatggtcaaaggaaatgaggacgggacctacaaggggctgaaggaaagattttcaaagctcgatctggctaagggcaagcaagattttgaaaagatcgacttagaaaccgttgtcactaccattctgaacaaaggactcgacgagggtatcaacctgtatgaacgattcaagaactcatga
